(19) United States
(12) Patent Application Publication
(10) Pub. No.: US 2012/0117685 A1
(43) Pub. Date: May 10, 2012

(54) Isolated Novel Nucleic Acid and Protein Molecules from Soybeans and Methods of Using Thos Molecules

(76) Inventors: Wei Wu, Chesterfield, MO (US); Jeffrey M. Staub, Wildwood, MO (US); James A. Morrell, Saint Louis, MO (US); Bo-Xing Qiu, Chesterfield, MO (US); YongWei Cao, Chesterfield, MO (US)

(21) Appl. No.: 13/202,625

(22) PCT Filed: Feb. 23, 2010
(86) PCT No.: PCT/US10/24993

§ 371 Date: Dec. 5, 2011

Related U.S. Application Data
(60) Provisional application No. 61/155,936, filed on Feb. 27, 2009.

(51) Int. Cl. A01H 5/10; C12N 15/82; C40B 40/06; A01H 1/02; C12N 15/29; C12N 5/10; A01H 5/00

(52) U.S. Cl. 800/275; 435/419; 435/320.1; 800/298; 800/320.1; 800/312; 800/314; 800/320.3; 800/320.2; 536/23.6; 506/16

(57) ABSTRACT

This disclosure provides purified nucleic acids and polypeptides and various uses of these sequences such as transcript profiling. Also provided are transgenic plants, seeds, and plant cells containing DNA for expression of the proteins that are useful for imparting enhanced agronomic trait(s) to transgenic crop plants, methods of making such plants and methods of making agricultural commodity including seeds and hybrid seeds from such plants.

### CROSS REFERENCE TO RELATED APPLICATIONS

[0001] This application claims benefit under 35 USC §119(e) of U.S. provisional application Ser. No. 61/155,936 filed on Feb. 27, 2009 which is incorporated herein by reference in its entirety.

### TECHNICAL FIELD OF THE INVENTION

[0002] Disclosed herein are inventions in the field of plant genetics and developmental biology. More specifically, this invention provides novel compositions of soybeans DNA and peptide molecules. Also disclosed are plants comprising recombinant DNA providing one or more enhanced traits in a transgenic plant, including cells, seed, and pollen derived from such a plant, as well as methods of making and using such plant.

### INCORPORATION-BY-REFERENCE OF MATERIALS FILED ON COMPACT DISC

[0003] A sequence listing having the file name “38-21(56614)A_PCT_SeqListing.txt” was created on Feb. 12, 2010 and has 15778 sequences is enclosed herewith in computer readable format and is herein incorporated by reference in its entirety.

### SUMMARY OF THE INVENTION

[0004] Certain embodiments of the disclosed invention provide recombinant DNA constructs having polynucleotides characterized by reference to SEQ ID NO:1-5999 and the cognate proteins with amino acid sequences having reference to SEQ ID NO:6000-9779. Furthermore, SEQ ID NO:9780-15778 provides probeset nucleic acid sequences that represents complete and/or fragments of SEQ ID NO:1-5999. The recombinant DNA constructs are used in aspects of the various embodiments of the invention to provide enhanced traits when stably integrated into the chromosomes and expressed in the nuclei of transgenic plants cells. In many aspects of these embodiments, the recombinant DNA constructs, when expressed in a plant cell, provide for expression of cognate proteins. In particular aspects of the invention the recombinant DNA constructs for expressing cognate proteins are characterized by cognate amino acid sequence that have at least 95% identity over at least 95% of the length of a reference sequence selected from the group consisting of SEQ ID NOs: 6000-9779 when the amino acid sequence is aligned to the reference sequence. In some aspects of the invention, the recombinant DNA constructs are characterized as being constructed with sense-oriented and/or anti-sense-oriented polynucleotides from the group consisting of SEQ ID NOs: 1-5999 which, when expressed in a plant cell, provide for the suppression of cognate proteins having amino acid sequences that have at least 95% identity over at least 95% of the length of a reference sequence selected from the group consisting of SEQ ID NOs: 6000-9779.

[0005] In some aspects of the invention, the recombinant DNA constructs are characterized as being constructed with sense-oriented and/or anti-sense-oriented polynucleotides from the group consisting of SEQ ID NOs: 9780-15778.

[0006] In certain aspects of this invention the recombinant DNA constructs of the invention are stably integrated into the chromosome of a plant cell nucleus.

[0007] Certain aspects of this embodiment of the invention provide transgenic plant cells having stably integrated recombinant DNA constructs, transgenic plants and seeds comprising a plurality of such transgenic plant cells and transgenic pollen of such plants. Such transgenic plants can be selected from a population of transgenic plants regenerated from plant cells transformed with recombinant DNA constructs by screening transgenic plants for an enhanced trait as compared to control plants. The enhanced trait provided may include, but is not limited to, enhanced water use efficiency, enhanced cold tolerance, increased yield, enhanced nitrogen use efficiency, altered seed protein composition, altered seed oil composition, or any combinations thereof.

[0008] Other embodiments of the invention provide for plant cells, plants, seeds, and pollen that can further comprise DNA expressing a protein that provides tolerance from exposure to an herbicide applied at levels that are lethal to a wild type plant cell.

[0009] Embodiments of the invention also provide methods for manufacturing non-natural, transgenic seed that can be used to produce a crop of transgenic plants with an enhanced trait resulting from expression of a stably-integrated recombinant DNA construct. The methods may comprise one or more of the following steps: (a) screening a population of plants for an enhanced trait and a recombinant DNA construct, where individual plants in the population can exhibit the trait at a level less than, essentially the same as or greater than the level that the trait is exhibited in control plants, (b) selecting from the population one or more plants that exhibit the trait at a level greater than the level that said trait is exhibited in control plants, (c) collecting seed from a selected plant, (d) verifying that the recombinant DNA is stably integrated in said selected plants, (e) analyzing tissue of a selected plant to determine the production or suppression of a protein having the function of a protein encoded by nucleotides in at least one sequence selected from SEQ ID NOs:1-5999 or their complete complement thereof. In certain embodiments of the invention, the plants in the population further include DNA expressing a protein that provides tolerance to exposure to a herbicide applied at levels that are lethal to wild type plant cells and the selecting is affected by treating the population with the herbicide, e.g. a glyphosate, dicamba, or glufosinate compound. In another embodiment of the invention, the plants are selected by identifying plants with the enhanced trait. The methods can be used for the manufacturing corn, soybean, cotton, canola, alfalfa, wheat, rice, sugarcane or sugar beet seed. In other embodiments of the present invention, the methods can also be used for manufacture transgenic plants including, but are not limited to, millet, barley, peanut, pigeon pea, sorghum, vegetables (including but not limited to Broccoli, Cauliflower, Cabbage, Radish, Chinese cabbage, Melons, Watermelons, Cucumber, Gourds, Pumpkin, Squash, Pepper, Tomato, Eggplant, Onion, Carrot, Garden Bean, Sweet Corn, Pea, Dry Bean, Okra, Spinach, Leek, Lettuce, and Fennel), grape, berries (including blue, black, raspberry, mullberry, boisenberry, etc), cherry and related fruit trees (including but not limited to plum, peach, apricot, kiwi, pomegranate, mango, fig), fruit trees (including but not limited to orange, lemon, lime, blood orange, grapefruit, and the like), and nut trees (including but not limited to coconut, walnut (English and black), pecan, almond, hazelnut, brazil nut, hickory nut, acorn, and the like) and sunflower, other oilseed producing plants or any combinations thereof.

[0010] Other embodiments of the invention provide a methods for producing hybrid corn seed by acquiring hybrid corn seed from a herbicide tolerant corn plant which also has stably-integrated, recombinant DNA construct having a promoter that is (a) functional in plant cells and (b) is operably linked to DNA that encodes or suppresses a protein having the function of a protein encoded by nucleotides in at least one sequence selected from the group consisting of SEQ ID NOs:1-5999. The methods of these embodiments may further include producing corn plants from said hybrid corn seed, wherein a fraction of the plants produced from said hybrid corn seed is homozygous for said recombinant DNA, a fraction of the plants produced from said hybrid corn seed is hemizygous for said recombinant DNA, and a fraction of the plants produced from said hybrid corn seed has none of said recombinant DNA; selecting corn plants which are homozygous and hemizygous for said recombinant DNA by treating with an herbicide; collecting seed from herbicide-treated-surviving corn plants and planting said seed to produce further progeny corn plants; repeating the selecting and collecting steps at least once to produce an inbred corn line; and crossing the inbred corn line with a second corn line to produce hybrid seed.

[0011] Other embodiments of the invention provide methods for selecting a plant comprising plant cells of the invention by using an immunoreactive antibody to detect the presence or absence of protein expressed or suppressed by recombinant DNA in seed or plant tissue. Another embodiment of the invention provides anti-counterfeit milled seed having, as an indication of origin, plant cells of this invention.

[0012] Yet another embodiment of this invention includes nucleotides disclosed in SEQ ID NO: 1-5999, SEQ ID 9780-15778 or fragments thereof and their uses in transcript profiling.

[0013] Still other embodiments of this invention provide for transgenic plants with enhanced water use efficiency or enhanced nitrogen use efficiency. For example, this invention provides methods of growing a corn, cotton, soybean, or canola crop without irrigation water by planting seed having plant cells of the invention which are selected for enhanced water use efficiency. Alternatively embodiments of these methods include applying reduced irrigation water, e.g. providing up to 300 millimeters of ground water during the production of a corn crop. This invention also provides methods of growing a corn, cotton, soybean or canola crop without added nitrogen fertilizer by planting seed having plant cells of the invention which are selected for enhanced nitrogen use efficiency.

[0014] Other embodiments of the invention provide mixtures comprising plants cells and an antibody to a protein produced in the cells where the protein has an amino acid sequence that has at least 90% identity over at least 90% of the length of a reference sequence selected from the group consisting of SEQ ID NO: 6000-9779 when the sequence is aligned to the reference sequence.

[0015] In another aspect, the present invention includes a mixture having plant cells, and an antibody to a protein produced in said cells wherein said protein has an amino acid sequence that has at least 95% identity over at least 95% of the length of a reference sequence selected from the group consisting of SEQ ID NO: 6000-9779 when said amino acid sequence is aligned to said reference sequence.

[0016] In another aspect, the present invention includes a mixture having plant cells, and an antibody to a protein produced in said cells wherein said protein has an amino acid sequence that has at least 98% identity over at least 98% of the length of a reference sequence selected from the group consisting of SEQ ID NO: 6000-9779 when said amino acid sequence is aligned to said reference sequence.

[0017] In another aspect, the present invention includes a mixture having plant cells, and an antibody to a protein produced in said cells wherein said protein has an amino acid sequence that has at least 99% identity over at least 99% of the length of a reference sequence selected from the group consisting of SEQ ID NO: 6000-9779 when said amino acid sequence is aligned to said reference sequence.

[0018] In another aspect, the present invention includes a mixture having plant cells, and an antibody to a protein produced in said cells wherein said protein has an amino acid sequence that has at least 99.5% identity over at least 99.5% of the length of a reference sequence selected from the group consisting of SEQ ID NO: 6000-9779 when said amino acid sequence is aligned to said reference sequence.

[0019] Yet another aspect of the present invention includes a transgenic plant cell with stably integrated, recombinant DNA comprising a promoter that is functional in plant cells and that is operably linked to DNA from a plant, bacteria or yeast that encodes a protein having at least 90% sequence identity selected from the group consisting of SEQ ID NO: 6000-9779; wherein said plant cell is selected from a population of plant with said recombinant DNA by screening plants that are regenerated from plant cells in said population and that express said protein for an enhanced trait as compared to control plants that do not have said recombinant DNA; and wherein said enhanced trait includes, but are not limited to, enhanced water use efficiency, enhanced cold tolerance, increased yield, enhanced nitrogen use efficiency, enhanced seed protein or enhanced seed oil.

### ILLUSTRATIVE EMBODIMENTS OF THE INVENTION

[0020] While the making and using of various embodiments of the present invention are discussed in detail below, it should be appreciated that the present invention provides many applicable inventive concepts that can be embodied in a wide variety of specific contexts. The specific embodiments discussed herein are merely illustrative of specific ways to make and use the invention and do not delimit the scope of the invention.

[0021] To facilitate the understanding of this invention, a number of terms are defined below. Terms defined herein have meanings as commonly understood by a person of ordinary skill in the areas relevant to the present invention. Terms such as “a”, “an” and “the” are not intended to refer to only a singular entity, but include the general class of which a specific example may be used for illustration. The terminology herein is used to describe specific embodiments of the invention, but their usage does not delimit the invention, except as outlined in the claims.

[0022] In the attached sequence listing, SEQ ID NO:1-5999 are nucleotide sequences of the coding strand of DNA for “genes” used in the recombinant DNA imparting an enhanced trait in plant cells, e.g. each comprises a coding sequence for a protein; SEQ ID NO: 6000-9779 are amino acid sequences of the cognate protein of the “genes” with nucleotide coding sequences provided by SEQ ID NO: 1-5999; and SEQ ID NO:9780-15778 are full-length sequences or fragments of SEQ ID NO:1-5999.

[0023] As used herein, a “plant cell” means a plant cell that is transformed with stably-integrated, non-natural, recombinant DNA, e.g. by Agrobacterium-mediated transformation or by bombardment using microparticles coated with recombinant DNA or other means. A plant cell of this invention can be an originally-transformed plant cell that exists as a microorganism or as a progeny plant cell that is duplicated by regeneration into differentiated tissue, e.g. into a transgenic plant with stably-integrated, non-natural recombinant DNA, or seed or pollen derived from a progeny transgenic plant.

[0024] As used herein, a “transgenic plant” means a plant whose genome has been altered by the stable integration of recombinant DNA. A transgenic plant includes a plant regenerated from an originally-transformed plant cell and progeny transgenic plants from later generations or crosses of a transformed plant.

[0025] A “consensus amino acid sequence” means an artificial, amino acid sequence indicating conserved amino acids in the sequence of homologous proteins as determined by statistical analysis of an optimal alignment, e.g. CLUSTALW, of amino acid sequence of homolog proteins. The consensus sequences listed in the sequence listing were created by identifying the most frequent amino acid at each position in a set of aligned protein sequences. When there was 100% identity in an alignment the amino acid is indicated by a capital letter. When the occurrence of an amino acid is at least about 70% in an alignment, the amino acid is indicated by a lower case letter. When there is no amino acid occurrence of at least about 70%, e.g. due to diversity or gaps, the amino acid is indicated by an “x”. When used to defined embodiments of the invention, a consensus amino acid sequence will be aligned with a query protein amino acid sequence in an optimal alignment, e.g. CLUSTALW. An embodiment of the invention will have identity to the conserved amino acids indicated in the consensus amino acid sequence.

[0026] As used herein, “control plant” means a plant that does not contain the recombinant DNA that expressed a protein which imparts an enhanced trait. A control plant is to identify and select a transgenic plant that has an enhance trait. A suitable control plant can be a non-transgenic plant of the parental line used to generate a transgenic plant, e.g., devoid of recombinant DNA. A suitable control plant can in some cases be a progeny of a hemizygous transgenic plant line that is does not contain the recombinant DNA, known as a negative segregant.

[0027] As used herein, an “enhanced trait” means a characteristic of a transgenic plant that includes, but is not limited to, an enhance agronomic trait characterized by enhanced plant morphology, physiology, growth and development, yield, nutritional enhancement, disease or pest resistance, or environmental or chemical tolerance. In more specific aspects of this invention enhanced trait is selected from group of enhanced traits consisting of enhanced water use efficiency, enhanced cold tolerance, increased yield, enhanced nitrogen use efficiency, enhanced seed protein and enhanced seed oil. In an important aspect of the invention the enhanced trait is enhanced yield including increased yield under non-stress conditions and increased yield under environmental stress conditions. Stress conditions can include, for example, drought, shade, fungal disease, viral disease, bacterial disease, insect infestation, nematode infestation, cold temperature exposure, heat exposure, osmotic stress, reduced nitrogen nutrient availability, reduced phosphorus nutrient availability and high plant density. “Yield” can be affected by many properties including without limitation, plant height, pod number, pod position on the plant, number of internodes, incidence of pod shatter, grain size, efficiency of nodulation and nitrogen fixation, efficiency of nutrient assimilation, resistance to biotic and abiotic stress, carbon assimilation, plant architecture, resistance to lodging, percent seed germination, seedling vigor, and juvenile traits. Yield can also be affected by efficiency of germination (including germination in stressed conditions), growth rate (including growth rate in stressed conditions), ear number, seed number per ear, seed size, composition of seed (starch, oil, protein) and characteristics of seed fill.

[0028] Increased yield of a transgenic plant of the present invention can be measured in a number of ways, including test weight, seed number per plant, seed weight, seed number per unit area (e.g., seeds, or weight of seeds, per acre), bushels per acre, tonnes per acre, tons per acre, kilo per hectare. For example, maize yield can be measured as production of shelled corn kernels per unit of production area in bushels per acre or metric tons per hectare, often reported on a moisture adjusted basis at about 15.5 percent moisture. Increased yield can result from improved utilization of key biochemical compounds such as nitrogen, phosphorous and carbohydrate, or from improved responses to environmental stresses, such as cold, heat, drought, salt, and attack by pests or pathogens. Recombinant DNA used in this invention can also be used to provide plants having improved growth and development, and ultimately increased yield, as the result of modified expression of plant growth regulators or modification of cell cycle or photosynthesis pathways. Also of interest is the generation of transgenic plants that demonstrate enhanced yield with respect to a seed component that can correspond to an increase in overall plant yield. Such properties include enhancements in seed oil, seed molecules such as tocopherol, protein and starch, or oil, particular oil components as can be manifest by alterations in the ratios of seed components.

[0029] Seed according to the present invention may be planted, grown and harvested to produce a crop or terminal crop. As used herein, a “crop” is a plant or plant product that is grown and harvested, such plant or plant product including but not limited to plants or plant parts such as leaf, root, shoot, fruit, seed, grain, or the like. A “terminal crop” is a crop grown for uses other than for use as planting seed to produce subsequent generations of plants. In some crop plants, such as grain produced from hybrid corn, the crop is not very suitable for planting because it does not breed true and the crop can then be conveniently referred to as “hybrid grain.” In other crop plants, where the crop does breed true, such as soybean, whether a crop is planting seed or a terminal crop will depend on the uses and marketing channels of the crop. If used or marketed for planting, it will be a crop of planting seed; if used or marketed for other purposes it will be a terminal crop.

[0030] As used herein, “exogenous promoter region” refers to a sequence, capable of promoting mRNA transcription, that does not naturally occur in the plant at the same site and/or linked to the nucleic acids. The promoter can be from a different plant species or it can be from the same plant species, but naturally found in a different location in a non-genetically modified plant. Moreover, the promoter region can be found in the same genetic locus as is present a native plant, but linked to different sequence(s), than are native.

[0031] As used herein, “promoter” means regulatory DNA for initializing transcription. A “plant promoter” is a promoter capable of initiating transcription in plant cells whether or not its origin is a plant cell, e.g. is it well known that Agrobacterium promoters are functional in plant cells. Thus, plant promoters include promoter DNA obtained from plants, plant viruses and bacteria such as Agrobacterium and Bradyrhizobium bacteria. Examples of promoters under developmental control include promoters that preferentially initiate transcription in certain tissues, such as leaves, roots, or seeds. Such promoters are referred to as “tissue preferred”. Promoters that initiate transcription only in certain tissues are referred to as “tissue specific”. A “cell type” specific promoter primarily drives expression in certain cell types in one or more organs, for example, vascular cells in roots or leaves. An “inducible” or “repressible” promoter is a promoter which is under environmental control. Examples of environmental conditions that can effect transcription by inducible promoters include anaerobic conditions, or certain chemicals, or the presence of light. Tissue specific, tissue preferred, cell-type specific, and inducible promoters constitute the class of “non-constitutive” promoters. A “constitutive” promoter is a promoter which is active under most conditions.

[0032] As used herein, a “functional fragment” refers to a portion of a polypeptide provided herein which retains full or partial molecular, physiological or biochemical function of the full length polypeptide. A functional fragment often contains the domain(s), such as Pfam domain, identified in the polypeptide provided in the sequence listing. In some embodiment, a function fragment includes at least 1, 2, 3, 4, 5 or more starting coding codons and at least 1, 2, 3, 4, 5 or more stop codons.

[0033] Embodiments of the invention provide molecules of that include “fragments” of the disclosed recombinant DNA molecules; including oligonucleotides of at least 15, at least 16 or 17, at least 18 or 19, and at least 20, 21, 22, 23, 24, 25, 26, 27, 28, 29, 30, 31, 32, 33, 34, 35, 36, 37, 38, 39, 40, 41, 42, 43, 44, 45, 46, 47, 48, 49, 50, 51, 52, 53, 54, 55, 56, 57, 58, 59, 60, 61, 62, 63, 64, 65, 66, 67, 68, 69, 70, 71, 72, 73, 74, 75, 76, 77, 78, 79, 80, 81, 82, 83, 84, 85, 86, 87, 88, 89, 90, 91, 92, 93, 94, 95, 96, 97, 98, 99, 100 or more, consecutive nucleotides of any of the sequences provided. Such oligonucleotides are fragments of the larger molecules having a sequence selected from the group consisting of SEQ ID NO: 1 through SEQ ID NO: 5999 or SEQ ID NO:9780-15778 and find use, for example as probes and primers for detection of the polynucleotides of the present invention. Alternatively, these fragments can be used as RNAi for gene suppression purposes. In some embodiments, a fragment can contain one or more coding region. In another embodiment, a fragment can include non-coding regions only.

[0034] Aspects of the various embodiments of the invention also provide for nucleic acid fragments of SEQ ID NO: 1 through SEQ ID NO: 5999 that are at least about 125, 150, 175, 200, 225, 250, 300, 325, 350, 375, 400, 425, 450, 475, 500, 525, 550, 575, 600, 625, 650, 675, 700, 725, 750, 775, 800, 825, 850, 875, 900, 925, 950, 975, 1000, 1050, 1100, 1150, 1200, 1250, 1300, 1350, 1400, 1450, 1500, 1550, 1600, 1650, 1700, 1750, 1800, 1850, 1900, 1950, 2000, 2050, 2100, 2150, 2200, 2250, 2300, 2350, 2400, 2450, 2500, 2550, 2600, 2650, 2700, 2750, 2800, 2850, 2900, 2950, 3000 or more nucleotides in length. Some aspects of these embodiments provide for nucleic acid fragment molecules that encode functional fragment of any of the polypeptide sequences provided in SEQ ID NO: 6000 to SEQ ID NO: 9779.

[0035] In other embodiments, oligonucleotides are fragments of the larger molecules having a sequence selected from the group consisting of SEQ ID NO: 1 through SEQ ID NO: 5999, or SEQ ID NO: 9780-15778 and use, for example as probes and primers for detection of the polynucleotides of the present invention.

[0036] Other embodiments of the present invention provide for one or more polypeptides having at least about 10 contiguous peptide residues of one or more of the peptide sequences provided in SEQ ID NO: 6000 to SEQ ID NO: 9779. In other aspects of these embodiment, the polypeptide(s) comprises at least 15, 20, 25, 30, 35, 40, 45, 50, 55, 60, 65, 70, 75, 80, 85, 90, 95, 100, 105, 110, 115, 120, 125, 130, 135, 140, 145, 150, 155, 160, 165, 170, 175, 180, 185, 190, 195, 200, 205, 210, 215, 220, 225, 230, 235, 240, 245, 250, 255, 260, 265, 270, 275, 280, 285, 290, 295, 300, 305, 310, 315, 320, 325, 330, 335, 340, 345, 350, 355, 360, 365, 370, 375, 380, 385, 390, 395, 400, 405, 410, 415, 420, 425, 430, 435, 440, 445, 450, 455, 460, 465, 470, 475, 480, 485, 490, 495, 500, 525, 550, 575, 600, 625, 650, 675, 700, 750, 800, 850, 900, 950, 1000 or more contiguous peptide residues from one or more of the sequences provided in SEQ ID NO: 6000 to SEQ ID NO: 9779. In particularly aspects, these embodiments the poly peptide includes a functional fragment of one or more of the polypeptides provided in the Sequence Listing.

[0037] As used herein, “expressed” means produced, e.g. a protein is expressed in a plant cell when its cognate DNA is transcribed to mRNA that is translated to the protein.

[0038] As used herein, an “expression cassette of a DNA construct” is capable of integrating in a plant genome, expressing a functional polypeptide and providing a transgenic plant expressing polypeptides of the invention.

[0039] As used herein, “suppressed” means decreased, e.g. a protein is suppressed in a plant cell when there is a decrease in the amount and/or activity of the protein in the plant cell. The presence or activity of the protein can be decreased by any amount up to and including a total loss of protein expression and/or activity.

[0040] As used herein, a “functional fragment” refers to a portion of a polypeptide provided herein which retains full or partial molecular, physiological or biochemical function of the full length polypeptide. A functional fragment often contains the domain(s), such as Pfam domain, identified in the polypeptide provided in the sequence listing.

[0041] As used herein, a “homolog” means a protein in a group of proteins that perform the same biological function, e.g. proteins that belong to the same Pfam protein family and that provide a common enhanced trait in transgenic plants of this invention. Homologs are expressed by homologous genes. With reference to homologous genes, homologs include orthologs, e.g., genes expressed in different species that evolved from a common ancestral genes by speciation and encode proteins retain the same function, but do not include paralogs, e.g., genes that are related by duplication but have evolved to encode proteins with different functions. Homologous genes include naturally occurring alleles and artificially-created variants. Degeneracy of the genetic code provides the possibility to substitute at least one base of the protein encoding sequence of a gene with a different base without causing the amino acid sequence of the polypeptide produced from the gene to be changed. When optimally aligned, homolog proteins have typically at least about 60% identity, in some instances at least about 70%, at least about 75%, at least about bout 80%, about 85%, at least about 90%, at least about bout 92%, at least about bout 94%, at least about bout 95%, at least about 96%, at least about 97%, at least about 98%, at least about 99%, and even at least about 99.5% identity over the full length of a protein identified as being associated with imparting an enhanced trait when expressed in plant cells. In one aspect of the invention homolog proteins have an amino acid sequence that has at least about 80%, at least about 85%, at least about 90%, at least about 92.5%, at least about 95%, at least about 96%, at least about 97%, at least about 98%, at least about 99%, and at least about 99.5% identity to a consensus amino acid sequence of proteins and homologs that can be build from sequences disclosed herein.

[0042] Homologs can be identified by comparison of amino acid sequence, e.g. manually or by use of a computer-based tool using known homology-based search algorithms such as those commonly known and referred to as BLAST, FASTA, and Smith-Waterman. A local sequence alignment program, e.g. BLAST, can be used to search a database of sequences to find similar sequences, and the summary Expectation value (E-value) used to measure the sequence base similarity. Because a protein hit with the best E-value for a particular organism may not necessarily be an ortholog, e.g., have the same function, or be the only ortholog, a reciprocal query is used to filter hit sequences with significant E-values for ortholog identification. The reciprocal query entails search of the significant hits against a database of amino acid sequences from the base organism that are similar to the sequence of the query protein. A hit can be identified as an ortholog, when the reciprocal query's best hit is the query protein itself or a protein encoded by a duplicated gene after speciation. A further aspect of the homologs encoded by DNA useful in the transgenic plants of the invention are those proteins that differ from a disclosed protein as the result of deletion or insertion of one or more amino acids in a native sequence.

[0043] Other functional homolog proteins differ in one or more amino acids from those of a trait-improving protein disclosed herein as the result of one or more of the well-known conservative amino acid substitutions, e.g., valine is a conservative substitute for alanine and threonine is a conservative substitute for serine. Conservative substitutions for an amino acid within the native sequence can be selected from other members of a class to which the naturally occurring amino acid belongs. Representative amino acids within these various classes include, but are not limited to: (1) acidic (negatively charged) amino acids such as aspartic acid and glutamic acid; (2) basic (positively charged) amino acids such as arginine, histidine, and lysine; (3) neutral polar amino acids such as glycine, serine, threonine, cysteine, tyrosine, asparagine, and glutamine; and (4) neutral nonpolar (hydrophobic) amino acids such as alanine, leucine, isoleucine, valine, proline, phenylalanine, tryptophan, and methionine. Conserved substitutes for an amino acid within a native amino acid sequence can be selected from other members of the group to which the naturally occurring amino acid belongs. For example, a group of amino acids having aliphatic side chains is glycine, alanine, valine, leucine, and isoleucine; a group of amino acids having aliphatic-hydroxyl side chains is serine and threonine; a group of amino acids having amide-containing side chains is asparagine and glutamine; a group of amino acids having aromatic side chains is phenylalanine, tyrosine, and tryptophan; a group of amino acids having basic side chains is lysine, arginine, and histidine; and a group of amino acids having sulfur-containing side chains is cysteine and methionine. Naturally conservative amino acids substitution groups are: valine-leucine, valine-isoleucine, phenylalanine-tyrosine, lysine-arginine, alanine-valine, aspartic acid-glutamic acid, and asparagine-glutamine. A further aspect of the invention includes proteins that differ in one or more amino acids from those of a described protein sequence as the result of deletion or insertion of one or more amino acids in a native sequence.

[0044] Genes that are homologous to each other can be grouped into families and included in multiple sequence alignments. Then a consensus sequence for each group can be derived. This analysis enables the derivation of conserved and class- (family) specific residues or motifs that are functionally important. These conserved residues and motifs can be further validated with 3D protein structure if available. The consensus sequence can be used to define the full scope of the invention, e.g., to identify proteins with a homolog relationship. Thus, the present invention contemplates that protein homologs include proteins with an amino acid sequence that has at least 90% identity to such a consensus amino acid sequence sequences.

[0045] As used herein, “operably linked” refers to the association of two or more nucleic acid elements in a recombinant DNA construct, e.g. as when a promoter is operably linked with DNA that is transcribed to RNA whether for expressing or suppressing a protein. Recombinant DNA constructs can be designed to express a protein which can be an endogenous protein, an exogenous homologue of an endogenous protein or an exogenous protein with no native homologue. Alternatively, recombinant DNA constructs can be designed to suppress the level of an endogenous protein, e.g. by suppression of the native gene. Such gene suppression can be effectively employed through a native RNA interference (RNAi) mechanism in which recombinant DNA comprises both sense and anti-sense oriented DNA matched to the gene targeted for suppression where the recombinant DNA is transcribed into RNA that can form a double-strand to initiate an RNAi mechanism. Gene suppression can also be effected by recombinant DNA that comprises anti-sense oriented DNA matched to the gene targeted for suppression. Gene suppression can also be effected by recombinant DNA that comprises DNA that is transcribed to a microRNA matched to the gene targeted for suppression. In the examples illustrating the invention recombinant DNA for effecting gene suppression that imparts is identified by the term “antisense”. It will be understood by a person of ordinary skill in the art that any of the ways of effecting gene suppression are contemplated and enabled by a showing of one approach to gene suppression.

[0046] As used herein, “percent identity” means the extent to which two optimally aligned DNA or protein segments are invariant throughout a window of alignment of components, for example nucleotide sequence or amino acid sequence. An “identity fraction” for aligned segments of a test sequence and a reference sequence is the number of identical components that are shared by sequences of the two aligned segments divided by the total number of sequence components in the reference segment over a window of alignment which is the smaller of the full test sequence or the full reference sequence. “Percent identity” (“% identity”) is the identity fraction times 100. Such optimal alignment is understood to be deemed as local alignment of DNA sequences. For protein alignment, a local alignment of protein sequences should allow introduction of gaps to achieve optimal alignment. Percent identity is calculated over the aligned length not including the gaps introduced by the alignment per se.

[0047] As used herein, a “plant by-product” includes any product that is made from a plant or plant product, for example, by dehulling, crushing, milling, extraction, hydrogenation, and other processes. A plant by-products in accordance with the invention, therefore, will include such as, for example, dehulled soybeans, crushed corn, soybean meal, soy milk, paper made from corn stalks, and a wide range of other useful products of processing based on plant vitamins, minerals, lipids, proteins and carbohydrates and their constituents that can be characterized as being produced from crops or terminal crops in accordance with the invention.

[0048] As used herein, a “plant cell” means a plant cell that is transformed with stably-integrated, recombinant DNA, e.g. by Agrobacterium-mediated transformation or by bombardment using microparticles coated with recombinant DNA or other means. A plant cell of this invention can be an originally-transformed plant cell that exists as a microorganism or as a progeny plant cell that is regenerated into differentiated tissue, e.g. into a transgenic plant with stably-integrated, non-natural recombinant DNA, or seed or pollen derived from a progeny transgenic plant.

[0049] As used herein, the term “polypeptide” or “polypeptide molecule” means a chain of amino acids. Polypeptide is also commonly referred as “protein”.

[0050] As used herein, “polyadenylated ribonucleotides” refers to the series of adenosines at the 3′ end of a polyribonucleotide commonly referred to as a “poly-A tail”.

[0051] As used herein, “recombinant DNA” means DNA which has been a genetically engineered and constructed outside of a cell including DNA containing naturally occurring DNA or cDNA or synthetic DNA.

[0052] As used herein, the term “structural nucleic acid molecule” refers to a molecule having sequence that encodes a protein, functional peptide fragment, or any other molecule that has biological activity (including, but not limited to, mRNA and bioactive RNA molecules, including antisense RNA).

[0053] As used herein, the term “substantially purified nucleic acid” or polypeptide means nucleic acid or protein separated from substantially all other molecules normally associated with it in its native state. A substantially purified nucleic acid can be greater than about 60% free from the other molecules (exclusive of solvent) present in the natural mixture. The term “substantially purified” is not intended to encompass molecules present in their native state.

[0054] “Pfam” database is a large collection of multiple sequence alignments and hidden Markov models covering many common protein families, e.g. Pfam version 19.0 (December 2005) contains alignments and models for 8183 protein families and is based on the Swissprot 47.0 and SP-TrEMBL 30.0 protein sequence databases. See S. R. Eddy, “Profile Hidden Markov Models”, Bioinformatics 14:755-763, 1998. The Pfam database is currently maintained and updated by the Pfam Consortium. The alignments represent some evolutionary conserved structure that has implications for the protein's function. Profile hidden Markov models (profile HMMs) built from the protein family alignments are useful for automatically recognizing that a new protein belongs to an existing protein family even if the homology by alignment appears to be low.

[0055] “Transcript profiling” or “gene expression profiling” refers to a method where the expression of many genes is monitored in parallel using a microarray. Gene sequences, usually in the form of cDNA sequences or EST (Expressed Sequence Tag) sequences, or oligonucleotide probe sequences (typically 25 nucleotides in length for microarrays) can be designed to be complementary to the expressed mRNA and are immobilized on either glass or nylon membranes (Schena, et al. Science 270: 467-470, 1995; Drmanac, et al., Genomics 37: 29-40, 1996). Labeled total RNA or mRNA isolated from a particular tissue or tissues are used to hybridize with the immobilized cDNA or oligonucleotides probes. Because a large number of cDNAs or DNA probes or probesets can be immobilized on the arrays, the hybridization allows for the determination of parallel gene expression studies (Ramsay, Nature Biotechnology 16 (1) 40-44, 1998). The identification of tissue specific genes can be accomplished by hybridization to the microarray of mRNAs that have been isolated from a specific library or libraries (Ruan, et al., The Plant Journal 15 (6): 821-833, 1998). Analysis of the results can uncover genes that are highly expressed in the desired tissue but are not detected or detected at low levels in undesired tissues. The term “gene” refers to chromosomal DNA, plasmid DNA, cDNA, synthetic DNA, or other DNA that encodes a peptide, polypeptide, protein, or RNA molecule, and regions flanking the coding sequence involved in the regulation of expression. Some genes can be transcribed into mRNA and translated into polypeptides (structural genes); other genes can be transcribed into RNA (e.g., rRNA, tRNA); and other types of genes function as regulators of expression (regulator genes).

[0056] Nucleic acid hybridization is a technique well known to those of skill in the art of DNA manipulation. The hybridization properties of a given pair of nucleic acids are an indication of their similarity or identity and can be under low or high stringency conditions. Non-limiting example include selecting nucleic acid sequences with lower sequence identities to a target nucleic acid sequence with low stringency conditions. High stringency conditions can be used to select for nucleic acid sequences with higher degrees of identity to the disclosed nucleic acid sequences.

[0057] As used herein, an “ESTs” or “Expressed Sequence Tags” are sequences of selected clones from a cDNA (or complementary DNA) library that are representative of the cDNA inserts of these selected clones (McCombie et al., Nature Genetics, 1: 124, 1992; Kurata et al., Nature Genetics, 8: 365, 1994; Okubo et al., Nature Genetics, 2: 173, 1992).

[0058] As used herein, “probe” or “probes” can be 10, 11, 12, 13, 14, 15, 16, 17, 18, 19, 20, 21, 22, 23, 24, 25, 26, 27, 28, 29, 30 nucleotides or longer that are fragments of an EST template sequence. An example of the EST template, or target sequence can be found in the sequence listing e.g., in SEQ ID NO:1-5999. Approximately 10-16 unique probes can typically be created for each given template sequence. In some embodiments, 10, 11, 12, 13, 14, 15, 16, 17, 18, 19 or 20 unique probes can be created for each given template sequence. Each probe may or may not have sequence overlap with one another.

[0059] As used herein, “probeset” is a collection of unique probes from a given template sequence, e.g., nucleic acid sequences denoted in SEQ ID NO:9780-15778.

[0060] A fragment of a nucleic acid as used herein is a portion of the nucleic acid that is less than full-length. For example, for the present invention any length of nucleotide sequence that is less than the disclosed nucleotide sequences of SEQ ID NOs: 1-5999 is considered to be a fragment, e.g., as disclosed in SEQ ID NO:9780-15778. A fragment can also comprise at least a minimum length capable of hybridizing specifically with a native nucleic acid under stringent hybridization—conditions as defined above. The length of such a minimal fragment can be at least 8 nucleotides, at least 10 nucleotides, at least 15 nucleotides, at least 20 nucleotides, at least 25 nucleotides, or at least 30 nucleotides or more of a native nucleic acid sequence.

[0061] As used herein, the term “abiotic stress” or “abiotic stress condition” refers to the exposure of a plant, plant cell, or the like, to a non-living (“abiotic”) physical or chemical agent or condition that has an adverse effect on metabolism, growth, development, propagation and/or survival of the plant (collectively “growth”). An abiotic stress can be imposed on a plant due, for example, to an environmental factor such as water (e.g., flooding, drought, dehydration), anaerobic conditions (e.g., a low level of oxygen), abnormal osmotic conditions, salinity or temperature (e.g., hot/heat, cold, freezing, frost), a deficiency of nutrients or exposure to pollutants, or by a hormone, second messenger or other molecule. Anaerobic stress, for example, is due to a reduction in oxygen levels (hypoxia or anoxia) sufficient to produce a stress response. A flooding stress can be due to prolonged or transient immersion of a plant, plant part, tissue or isolated cell in a liquid medium such as occurs during monsoon, wet season, flash flooding or excessive irrigation of plants, or the like. A cold stress or heat stress can occur due to a decrease or increase, respectively, in the temperature from the optimum range of growth temperatures for a particular plant species. Such optimum growth temperature ranges are readily determined or known to those skilled in the art. Dehydration stress can be induced by the loss of water, reduced turgor, or reduced water content of a cell, tissue, organ or whole plant. Drought stress can be induced by or associated with the deprivation of water or reduced supply of water to a cell, tissue, organ or organism. Saline stress (salt stress) can be associated with or induced by a perturbation in the osmotic potential of the intracellular or extracellular environment of a cell. Osmotic stress also can be associated with or induced by a change, for example, in the concentration of molecules in the intracellular or extracellular environment of a plant cell, particularly where the molecules cannot be partitioned across the plant cell membrane.

[0062] The modulation of protein in transgenic plant cells (hereafter generally referred to as the “target protein”) can be achieved by a variety of approaches involving the use of recombinant DNA constructs. Examples of such recombinant DNA constructs include recombinant DNA constructs that produce messenger RNA for the target protein where native miRNA recognition sites in the mRNA for the target protein are modified or deleted, recombinant DNA constructs that produce an RNA gene suppression element such as a miRNA or a dsRNA comprising sense and anti-sense sequences from the gene encoding the target protein, recombinant DNA constructs that produce a transacting short interfering RNA (ta-siRNA) and recombinant DNA constructs that produce a miRNA element such as a decoy miRNA that is a target for native miRNA or RNA that sequesters target messenger RNA away from native miRNA.

[0063] Small RNAs that regulate protein expression include miRNAs and ta-siRNAs. A miRNA is a small (typically about 21 nucleotide) RNA that has the ability to modulate the expression of a target gene by binding to messenger RNA for the target protein leading to destabilization of the target protein messenger RNA or translational inhibition of the target protein messenger RNA, ultimately resulting in reduction of the target protein. The design and construction of ta-siRNA constructs and their use in the modulation of protein in transgenic plant cells is disclosed by Allen and Carrington in US Patent Application Publication US 2006/0174380 A1 which is incorporated herein by reference. The expression or suppression of such small RNAs are aspects of the invention that are conveniently illustrated by reference to use of miRNAs.

[0064] Recombinant DNA constructs can be used to modify the activity of native miRNAs by a variety of means. By increasing the expression of a miRNA, e.g. temporally or spatially, the modulation of expression of a native target gene can be enhanced. An alternative gene suppression approach for suppressing the expression of a target protein can include the use of a recombinant DNA construct that produces a synthetic miRNA that is designed to bind to a native or synthetic miRNA recognition site on messenger RNA for the target protein.

[0065] By reducing the expression of a miRNA, the modulation of a native target gene can be diminished resulting in enhanced expression of the target protein. More specifically, the expression of a target protein can be enhanced by suppression of the activity of the miRNA that binds to a recognition site in the messenger RNA that is transcribed from the native gene for the target protein. Several types of recombinant DNA constructs can be designed to suppress the activity of a miRNA.

[0066] For example, a recombinant DNA construct that produces an abundance of RNA with the miRNA recognition site can be used as a decoy for the native miRNA allowing endogenous messenger RNA with the miRNA recognition site to be translated to the target protein without interference from native miRNA. A recombinant DNA construct that produces RNA with a modified miRNA recognition site, e.g. with nucleotides at positions 10 and/or 11 in a 21 mer miRNA recognition site which are unpaired with respect to the native miRNA, can be used to sequester natively expressed miRNA thereby reducing the cleavage that normally occurs when miRNA binds to a recognition site. The unpaired nucleotides can be produced e.g. through additional nucleotides between positions 10 and 11 or through substitutions of the nucleotides at positions 10 and 11.

[0067] Additionally, a recombinant DNA construct can be created that produces RNA that can be processed in plants into synthetic small RNA (miRNA-like) that can bind endogenous miRNA recognition sites but is unable to induce cleavage of mRNA because the small RNA is modified, for instance by having a modified nucleotide at positions 10 and/or 11 or a deletion that produces a bulge between positions 10 and 11 when the small RNA is paired with the miRNA recognition site. The resulting synthetic small RNA, a cleavage blocker, can reduce endogenous miRNA binding and thus block cleavage of a protected miRNA target site enhancing the expression of a target protein.

[0068] A recombinant DNA construct designed for producing a modified messenger RNA for the protein where the native miRNA recognition site is modified to be resistant to the binding of cognate miRNA which regulates the native gene can also be used to express protein from heterologous messenger RNA that is no longer modulated by the native miRNA.

[0069] The activity of a miRNA which down-regulates an endogenous protein is enhanced by enhancing the expression of the miRNA or by enhancing the ability of the miRNA to bind an RNA encoding the target protein. A recombinant DNA encoding an RNA encoding the miRNA or a miRNA-sensitive messenger RNA encoding the protein in which a miRNA binding site is added are designed to enhance miRNA activity resulting in enhanced suppression of the target mRNA and cognate protein. Recombinant DNA encoding an RNA encoding a miRNA, or a miRNA-sensitive RNA are designed using methods disclosed in US Patent Application Publication US 2009/0070898 A1.

[0070] Some, if not many, miRNAs modulate the expression of multiple proteins or biochemical pathways. Transgenic plants can be provided with enhanced traits not so much from the suppression or enhancement of the expression of a particular protein, as from change of enzyme activity in a pathway by modulating the level of a miRNA. Thus, aspects of this invention are achieved by enhanced miRNA activity resulting from use in transgenic plant cells of recombinant DNA constructs that produce an enhanced level of a miRNA. Other aspects of this invention are achieved by reduced miRNA activity resulting from use in transgenic plant cells of recombinant DNA constructs that produce a reduced level or activity of a miRNA.

### Recombinant DNA Constructs

[0071] Recombinant DNA constructs are assembled using methods well known to persons of ordinary skill in the art and typically comprise a promoter operably linked to DNA, the expression of which provides the enhanced agronomic trait. Other construct components can include additional regulatory elements, such as 5′ leaders and introns for enhancing transcription, 3′ untranslated regions (such as polyadenylation signals and sites), DNA for transit or signal peptides.

[0072] Numerous promoters that are active in plant cells have been described in the literature. These include promoters present in plant genomes as well as promoters from other sources, including nopaline synthase (NOS) promoter and octopine synthase (OCS) promoters carried on tumor-inducing plasmids of Agrobacterium tumefaciens and the CaMV35S promoters from the cauliflower mosaic virus as disclosed in U.S. Pat. Nos. 5,164,316 and 5,322,938. Useful promoters derived from plant genes are found in U.S. Pat. No. 5,641,876 which discloses a rice actin promoter, U.S. Pat. No. 7,151,204 which discloses a maize chloroplast aldolase promoter and a maize aldolase (FDA) promoter, and US Patent Application Publication 2003/0131377 A1 which discloses a maize nicotianamine synthase promoter. These and numerous other promoters that function in plant cells are known to those skilled in the art and available for use in recombinant polynucleotides of the present invention to provide for expression of desired genes in transgenic plant cells.

[0073] Furthermore, the promoters can be altered to contain multiple “enhancer sequences” to assist in elevating gene expression. Such enhancers are known in the art. By including an enhancer sequence with such constructs, the expression of the selected protein can be enhanced. These enhancers often are found 5′ to the start of transcription in a promoter that functions in eukaryotic cells, but can often be inserted upstream (5′) or downstream (3′) to the coding sequence. In some instances, these 5′ enhancing elements are introns. Particularly useful as enhancers are the 5′ introns of the rice actin 1 (see U.S. Pat. No. 5,641,876) and rice actin 2 genes, the maize alcohol dehydrogenase gene intron, the maize heat shock protein 70 gene intron (U.S. Pat. No. 5,593,874) and the maize shrunken 1 gene. See also US Patent Application Publication 2002/0192813A1 which discloses 5′, 3′ and intron elements useful in the design of effective plant expression vectors.

[0074] In other aspects of the invention, sufficient expression in plant seed tissues is desired to affect improvements in seed composition. Exemplary promoters for use for seed composition modification include promoters from seed genes such as napin as disclosed in U.S. Pat. No. 5,420,034, maize L3 oleosin as disclosed in U.S. Pat. No. 6,433,252), zein Z27 as disclosed by Russell et al. (1997) Transgenic Res. 6(2):157-166), globulin 1 as disclosed by Belanger et al (1991) Genetics 129:863-872), glutelin 1 as disclosed by Russell (1997) supra), and peroxiredoxin antioxidant (Per1) as disclosed by Stacy et al. (1996) Plant Mol. Biol. 31(6):1205-1216.

[0075] Recombinant DNA constructs in this invention will generally include a 3′ element that typically contains a polyadenylation signal and site. Well-known 3′ elements include those from Agrobacterium tumefaciens genes such as nos 3′, tml 3′, tmr 3′, tms 3′, ocs 3′, tr7 3′, for example disclosed in U.S. Pat. No. 6,090,627; 3′ elements from plant genes such as wheat (Triticum aesevitum) heat shock protein 17 (Hsp17 3′), a wheat ubiquitin gene, a wheat fructose-1,6-biphosphatase gene, a rice glutelin gene, a rice lactate dehydrogenase gene and a rice beta-tubulin gene, all of which are disclosed in US Patent Application Publication Number 2002/0192813 A1; and the pea (Pisum sativum) ribulose biphosphate carboxylase gene (rbs 3′), and 3′ elements from the genes within the host plant.

[0076] Constructs and vectors can also include a transit peptide for targeting of a gene to a plant organelle, particularly to a chloroplast, leucoplast or other plastid organelle. For descriptions of the use of chloroplast transit peptides see U.S. Pat. No. 5,188,642 and U.S. Pat. No. 5,728,925. For description of the transit peptide region of an Arabidopsis EPSPS gene useful in the present invention, see Klee, H. J. et al (MGG (1987) 210:437-442).

[0077] Recombinant DNA constructs for gene suppression can be designed for any of a number the well-known methods for suppressing transcription of a gene, the accumulation of the mRNA corresponding to that gene or preventing translation of the transcript into protein. Posttranscriptional gene suppression can be practically effected by transcription of RNA that forms double-stranded RNA (dsRNA) having homology to mRNA produced from a gene targeted for suppression.

[0078] Gene suppression can also be achieved by insertion mutations created by transposable elements can also prevent gene function. For example, in many dicot plants, transformation with the T-DNA of Agrobacterium can be readily achieved and large numbers of transformants can be rapidly obtained. Also, some species have lines with active transposable elements that can efficiently be used for the generation of large numbers of insertion mutations, while some other species lack such options. Mutant plants produced by Agrobacterium or transposon mutagenesis and having altered expression of a polypeptide of interest can be identified using the polynucleotides of the present invention. For example, a large population of mutated plants can be screened with polynucleotides encoding the polypeptide of interest to detect mutated plants having an insertion in the gene encoding the polypeptide of interest.

[0079] Transgenic plants comprising or derived from plant cells of this invention transformed with recombinant DNA can be further enhanced with stacked traits, e.g. a crop plant having an enhanced trait resulting from expression of DNA disclosed herein in combination with other enhanced traits with various degree or amount of enhancement including, but not limited to enhanced water use efficiency, enhanced cold tolerance, increased yield, enhanced nitrogen use efficiency, enhanced seed protein and enhanced seed oil herbicide pest resistance traits, or any combinations thereof. For example, genes of the current invention can be stacked with other traits of agronomic interest, such as a trait providing herbicide resistance, or insect resistance, such as using a gene from Bacillus thuringensis to provide resistance against lepidopteran, coliopteran, homopteran, hemiopteran, and other insects. Herbicides for which transgenic plant tolerance has been demonstrated and the method of the present invention can be applied include, but are not limited to, glyphosate, dicamba, glufosinate, sulfonylurea, bromoxynil and norflurazon herbicides. Polynucleotide molecules encoding proteins involved in herbicide tolerance are well-known in the art and include, but are not limited to, a polynucleotide molecule encoding 5-enolpyruvylshikimate-3-phosphate synthase (EPSPS) disclosed in U.S. Pat. Nos. 5,094,945; 5,627,061; 5,633,435 and 6,040,497 for imparting glyphosate tolerance; polynucleotide molecules encoding a glyphosate oxidoreductase (GOX) disclosed in U.S. Pat. No. 5,463,175 and a glyphosate-N-acetyl transferase (GAT) disclosed in U.S. Patent Application Publication Number 2003/0083480 A1 also for imparting glyphosate tolerance; dicamba monooxygenase disclosed in U.S. Patent Application Publication Number 2003/0135879 A1 for imparting dicamba tolerance; a polynucleotide molecule encoding bromoxynil nitrilase (Bxn) disclosed in U.S. Pat. No. 4,810,648 for imparting bromoxynil tolerance; a polynucleotide molecule encoding phytoene desaturase (crtI) described in Misawa et al, (1993) Plant J. 4:833-840 and in Misawa et al, (1994) Plant J. 6:481-489 for norflurazon tolerance; a polynucleotide molecule encoding acetohydroxyacid synthase (AHAS, aka ALS) described in Sathasiivan et al. (1990) Nucl. Acids Res. 18:2188-2193 for imparting tolerance to sulfonylurea herbicides; polynucleotide molecules known as bar genes disclosed in DeBlock, et al. (1987) EMBO J. 6:2513-2519 for imparting glufosinate and bialaphos tolerance; polynucleotide molecules disclosed in U.S. Patent Application Publication Number 2003/010609 A1 for imparting N-amino methyl phosphonic acid tolerance; polynucleotide molecules disclosed in U.S. Pat. No. 6,107,549 for imparting pyridine herbicide resistance; molecules and methods for imparting tolerance to multiple herbicides such as glyphosate, atrazine, ALS inhibitors, isoxoflutole and glufosinate herbicides are disclosed in U.S. Pat. No. 6,376,754 and U.S. Patent Application Publication Number 2002/0112260. Molecules and methods for imparting insect/nematode/virus resistance are disclosed in U.S. Pat. Nos. 5,250,515; 5,880,275; 6,506,599; 5,986,175 and U.S. Patent Application Publication Number 2003/0150017 A1, each are herein incorporated by reference.

[0080] Another embodiment of the present invention provides methods for delivering transgenic crop plants comprising two or more genetic factors giving enhanced traits using haploid breeding approaches. One goal of transgenic trait integration is to deliver one or more transgenic traits to a inbred and the typical backcross process involved multiple generations with selection at each generation for the one or more transgenic traits coupled with selection for the elite inbred, referred to as the recurrent parent. As product concepts move to transgenic trait stacks, comprising two or more transgenic traits, the trait integration process becomes exponentially more complicated because an increasing number of progeny must be screened in order to recover progeny with both the transgenic traits and, as relevant, desired percent of the recurrent parent genome (i.e., 95% recurrent parent) and minimized percent of the donor parent genome (i.e., reduce linkage drag). The methods included herein provide an advantage over the art by reducing the time required to deliver a stacked transgenic trait hybrid to market as well as providing the potential for reducing the number of plots needed to generate an elite crop plant comprising two or more transgenic traits. These methods can be applied at any point in a breeding program, wherein the “recurrent” parent can be segregating. In other aspects, the recurrent parent comprises one or more genetic factors. Further, depending on the degree of segregating in the starting material, sister line generation can occur in parallel to trait integration. Examples of stacking two or more genetic factors using a haploid approach can be seen in U.S. Patent Application Publication Number 20090070891 and is herein incorporated by reference in its entirety.

[0081] Embodiments of the invention provide molecules of that include “fragments” of the disclosed recombinant DNA molecules; including oligonucleotides of at least 15, at least 16 or 17, at least 18 or 19, and at least 20, 21, 22, 23, 24, 25, 26, 27, 28, 29, 30, 31, 32, 33, 34, 35, 36, 37, 38, 39, 40, 41, 42, 43, 44, 45, 46, 47, 48, 49, 50 or more, consecutive nucleotides of any of the sequences provided. Such oligonucleotides are fragments of the larger molecules having a sequence selected from the group consisting of SEQ ID NO: 1 through SEQ ID NO: 5999, or SEQ ID NO: 9780-15778 and use, for example as probes and primers for detection of the polynucleotides of the present invention.

[0082] Aspects of the various embodiments of the invention also provide for nucleic acid fragments of SEQ ID NO: 1 through SEQ ID NO: 5999 that are at least about 50, 75, 100, 125, 150, 175, 200, 225, 250, 275, 300, 325, 350, 375, 400, 425, 450, 475, or 500 or more nucleotides in length. Non-limiting example include SEQ ID NO:9780-15778, where each nucleic acid sequence can be used as a probeset of corresponding SEQ ID NO:1-5999. Some aspects of these embodiments provide for nucleic acid molecules that encode functional fragments of any of the polypeptide sequences provided in SEQ ID NO: 6000 to SEQ ID NO: 9779.

[0083] Other embodiments of the present invention provide for one or more isolated (where isolated means occurring in its non-native environment) polypeptides having at least about 10 contiguous peptide residues of one or more of the peptide sequences provided in SEQ ID NO: 6000 to SEQ ID NO: 9779. In other aspects of these embodiment, the polypeptide(s) comprises at least about 15, 20, 25, 30, 35, 40, 45, 50, 55, 60, 65, 70, 75, 80, 85, 90, 95, or 100 or more contiguous peptide residues from one or more of the sequences provided in SEQ ID NO: 6000 to SEQ ID NO: 9779. In particularly aspects, these embodiments the poly peptide includes a functional fragment (e.g., pfam annotation) of one or more of the polypeptides provided in the Sequence Listing.

[0084] Other aspects of the various embodiments of the invention includes, transgenic plants, transgenic plant seeds, transgenic crops, plant products and byproducts having any of the nucleic acid or protein fragments described above. The invention also provides for various methods that use such fragments.

[0085] Embodiments of the present invention also contemplate that the trait-improving recombinant DNA provided herein can be used in combination with other recombinant DNA to create plants with multiple desired traits or a further enhanced trait. The combinations generated can include multiple copies of any one or more of the recombinant DNA constructs. These stacked combinations can be created by any method, including but not limited to cross breeding of transgenic plants, or multiple genetic transformation.

[0086] DNA vectors containing gene(s) of interest or fragments of genes disclosed in the sequence listing can be delivered into plant cells via one of the several methods known to those skilled in the art, including but not limited to protoplast transformation, biolistic bombardment and Agrobacterium-mediated transformation. The delivered DNA can be integrated randomly into a plant genome or can also be present as part of the independently segregating genetic units such as artificial chromosome or mini-chromosome. One aspect of this embodiment, the construct further comprises regulatory sequences, including, for example, a promoter, operably linked to the sequence.

### Plant Cell Transformation Methods

[0087] Numerous methods for transforming chromosomes in a plant cell nucleus with recombinant DNA are known in the art and are used in methods of preparing a transgenic plant cell nucleus cell, and plant. Two effective methods for such transformation are Agrobacterium-mediated transformation and microprojectile bombardment. Microprojectile bombardment methods are illustrated in U.S. Pat. Nos. 5,015,580 (soybean); 5,550,318 (corn); 5,538,880 (corn); 5,914,451 (soybean); 6,160,208 (corn); 6,399,861 (corn); 6,153,812 (wheat) and 6,365,807 (rice) and Agrobacterium-mediated transformation is described in U.S. Pat. Nos. 5,159,135 (cotton); 5,824,877 (soybean); 5,463,174 (canola); 5,591,616 (corn); 5,846,797 (cotton); 6,384,301 (soybean), 7,026,528 (wheat) and 6,329,571 (rice), US Patent Application Publication 2004/0087030 A1 (cotton), and US Patent Application Publication 2001/0042257 A1 (sugar beet), all of which are incorporated herein by reference for enabling the production of transgenic plants. Transformation of plant material is practiced in tissue culture on a nutrient media, e.g., a mixture of nutrients that will allow cells to grow in vitro. Recipient cell targets include, but are not limited to, meristem cells, hypocotyls, calli, immature embryos and gametic cells such as microspores, pollen, sperm and egg cells. Callus can be initiated from tissue sources including, but not limited to, immature embryos, hypocotyls, seedling apical meristems, microspores and the like. Cells containing a transgenic nucleus are grown into transgenic plants.

[0088] In addition to direct transformation of a plant material with a recombinant DNA, a transgenic plant cell nucleus can be prepared by crossing a first plant having cells with a transgenic nucleus with recombinant DNA with a second plant lacking the transgenic nucleus. For example, recombinant DNA can be introduced into a nucleus from a first plant line that is amenable to transformation to transgenic nucleus in cells that are grown into a transgenic plant which can be crossed with a second plant line to introgress the recombinant DNA into the second plant line. A transgenic plant with recombinant DNA providing an enhanced trait, e.g. enhanced yield, can be crossed with transgenic plant line having other recombinant DNA that confers another trait, for example herbicide resistance or pest resistance, to produce progeny plants having recombinant DNA that confers both traits. Typically, in such breeding for combining traits the transgenic plant donating the additional trait is a male line and the transgenic plant carrying the base traits is the female line. The progeny of this cross will segregate such that some of the plants will carry the DNA for both parental traits and some will carry DNA for one parental trait; such plants can be identified by markers associated with parental recombinant DNA, e.g. marker identification by analysis for recombinant DNA or, in the case where a selectable marker is linked to the recombinant, by application of the selecting agent such as a herbicide for use with a herbicide tolerance marker, or by selection for the enhanced trait. Progeny plants carrying DNA for both parental traits can be crossed back into the female parent line multiple times, for example usually 6 to 8 generations, to produce a progeny plant with substantially the same genotype as one original transgenic parental line but for the recombinant DNA of the other transgenic parental line.

[0089] In certain embodiments of the invention the recombinant DNA insertion is “targeted” in order to achieve site-specific integration, for example to replace an existing gene in the genome, to use an existing promoter in the plant genome, or to insert a recombinant polynucleotide at a predetermined site known to be active for gene expression. Several site specific recombination systems exist which are known to function implants include cre-lox as disclosed in U.S. Pat. No. 4,959,317 and FLP-FRT as disclosed in U.S. Pat. No. 5,527,695, both incorporated herein by reference.

[0090] Transformation methods of this invention can be practiced in tissue culture on media and in a controlled environment. “Media” refers to the numerous nutrient mixtures that are used to grow cells in vitro, that is, outside of the intact living organism. Recipient cell targets include, but are not limited to, meristem cells, callus, immature embryos and gametic cells such as microspores, pollen, sperm and egg cells. It is contemplated that any cell from which a fertile plant can be regenerated is useful as a recipient cell. Callus can be initiated from tissue sources including, but not limited to, immature embryos, seedling apical meristems, microspores and the like. Cells capable of proliferating as callus are also recipient cells for genetic transformation. Practical transformation methods and materials for making transgenic plants of this invention, for example, various media and recipient target cells, transformation of immature embryo cells and subsequent regeneration of fertile transgenic plants are disclosed in U.S. Pat. Nos. 6,194,636 and 6,232,526, which are incorporated herein by reference.

[0091] The seeds of transgenic plants can be harvested from fertile transgenic plants and be used to grow progeny generations of transformed plants of this invention including hybrid plants line for selection of plants having an enhanced trait. In addition to direct transformation of a plant with a recombinant DNA, transgenic plants can be prepared by crossing a first plant having a recombinant DNA with a second plant lacking the DNA. For example, recombinant DNA can be introduced into first plant line that is amenable to transformation to produce a transgenic plant which can be crossed with a second plant line to introgress the recombinant DNA into the second plant line. A transgenic plant with recombinant DNA providing an enhanced trait, e.g. enhanced yield, can be crossed with transgenic plant line having other recombinant DNA that confers another trait, for example herbicide resistance or pest resistance, to produce progeny plants having recombinant DNA that confers both traits. Typically, in such breeding for combining traits the transgenic plant donating the additional trait is a male line and the transgenic plant carrying the base traits is the female line. The progeny of this cross will segregate such that some of the plants will carry the DNA for both parental traits and some will carry DNA for one parental trait; such plants can be identified by markers associated with parental recombinant DNA, e.g. marker identification by analysis for recombinant DNA or, in the case where a selectable marker is linked to the recombinant, by application of the selecting agent such as a herbicide for use with a herbicide tolerance marker, or by selection for the enhanced trait. Progeny plants carrying DNA for both parental traits can be crossed back into the female parent line multiple times, for example usually 6 to 8 generations, to produce a progeny plant with substantially the same genotype as one original transgenic parental line but for the recombinant DNA of the other transgenic parental line.

[0092] Descriptions of commonly used breeding terms such as “crossing”, “hybrids” and methods for crossing and producing hybrid that are used to describe present invention can be found in one of several reference books (Allard, “Principles of Plant Breeding,” John Wiley & Sons, NY, U. of CA, Davis, Calif., 50-98, 1960; Simmonds, “Principles of crop improvement,” Longman, Inc., NY, 369-399, 1979; Sneep and Hendriksen, “Plant breeding perspectives,” Wageningen (ed), Center for Agricultural Publishing and Documentation, 1979; Fehr, In: Soybeans: Improvement, Production and Uses, 2nd Edition, Monograph., 16:249, 1987; Fehr, “Principles of variety development,” Theory and Technique, (Vol. 1) and Crop Species Soybean (Vol. 2), Iowa State Univ., Macmillan Pub. Co., NY, 360-376, 1987).

[0093] In some embodiments of the invention, during transformation, DNA is introduced into only a small percentage of target plant cells in any one transformation. Marker genes are used to provide an efficient system for identification of those cells that are stably transformed by receiving and integrating a transgenic DNA construct into their genomes. Marker genes provide selective markers which confer resistance to a selective agent, such as an antibiotic or herbicide. Any of the herbicides to which plants of this invention can be resistant are useful agents for selective markers. Potentially transformed cells are exposed to the selective agent. In the population of surviving cells will be those cells where, generally, the resistance-conferring gene is integrated and expressed at sufficient levels to permit cell survival. Cells can be tested further to confirm stable integration of the exogenous DNA. Commonly used selective marker genes include those conferring resistance to antibiotics such as kanamycin and paromomycin (nptII), hygromycin B (aph IV) and gentamycin (aac3 and aacC4) or resistance to herbicides such as glufosinate (bar or pat) and glyphosate (aroA or EPSPS). Examples of such selectable are illustrated in U.S. Pat. Nos. 5,550,318; 5,633,435; 5,780,708 and 6,118,047, all of which are incorporated herein by reference. Selectable markers which provide an ability to visually identify transformants can also be employed, for example, a gene expressing a colored or fluorescent protein such as a luciferase or green fluorescent protein (GFP) or a gene expressing a beta glucuronidase or uidA gene (GUS) for which various chromogenic substrates are known.

[0094] Plant cells that survive exposure to the selective agent, or plant cells that have been scored positive in a screening assay, can be cultured in regeneration media and allowed to mature into plants. Developing plantlets regenerated from transformed plant cells can be transferred to plant growth mix, and hardened off, for example, in an environmentally controlled chamber at about 85% relative humidity, 600 ppm CO₂, and 25-250 microeinsteins m⁻² s⁻¹ of light, prior to transfer to a greenhouse or growth chamber for maturation. Plants are regenerated from about 6 weeks to 10 months after a transformant is identified, depending on the initial tissue. Plants can be pollinated using conventional plant breeding methods known to those of skill in the art and seed produced. The regenerated transformed plant or its progeny seed or plants can be tested for expression of the recombinant DNA and selected for the presence of enhanced agronomic trait.

[0095] Progeny can be recovered from transformed plants and tested for expression of the exogenous recombinant polynucleotide. Useful assays include, for example, “molecular biological” assays, such as Southern and Northern blotting and PCR; “biochemical” assays, such as detecting the presence of RNA, e.g., double stranded RNA, or a protein product, e.g., by immunological means (ELISAs and Western blots) or by enzymatic function; plant part assays, such as leaf or root assays; and also, by analyzing the phenotype of the whole regenerated plant.

### Transgenic Plants and Seeds

[0096] Transgenic plants derived from the plant cells of this invention are grown to generate transgenic plants having an enhanced trait as compared to a control plant and produce transgenic seed and haploid pollen of this invention. Such plants with enhanced traits are identified by selection of transformed plants or progeny seed for the enhanced trait. For efficiency a selection method is designed to evaluate multiple transgenic plants (events) including the recombinant DNA, for example multiple plants from 2 to 20 or more transgenic events. Transgenic plants grown from transgenic seed provided herein demonstrate improved agronomic traits that contribute to increased yield or other trait that provides increased plant value, including, for example, improved seed quality. Of particular interest are plants having enhanced water use efficiency, enhanced cold tolerance, increased yield, enhanced nitrogen use efficiency, enhanced seed protein and enhanced seed oil. Transgenic plants of the present invention include, but are not limited to, corn, soybean, cotton, canola, alfalfa, wheat, rice, sugarcane, sugar beet seed, millet, barley, peanut, pigeon pea, sorghum, vegetables (including but not limited to Broccoli, Cauliflower, Cabbage, Radish, Chinese cabbage, Melons, Watermelons, Cucumber, Gourds, Pumpkin, Squash, Pepper, Tomato, Eggplant, Onion, Carrot, Garden Bean, Sweet Corn, Pea, Dry Bean, Okra, Spinach, Leek, Lettuce, and Fennel), grape, berries (including blue, black, raspberry, mullberry, boysenberry. etc), cherry and related fruit trees (including but not limited to plum, peach, apricot, kiwi, pomegranate, mango, fig), fruit trees (including but not limited to orange, lemon, lime, blood orange, grapefruit, and the like), nut trees (including but not limited to coconut, walnut (English and black), pecan, almond, hazelnut, brazil nut, hickory nut, acorn, and the like), sunflower, other oilseed producing plants or any combinations thereof.

Selection Methods for Transgenic Plants with Enhanced Agronomic Trait

[0097] Within a population of transgenic plants each regenerated from a plant cell having a nucleus with recombinant DNA many plants that survive to fertile transgenic plants that produce seeds and progeny plants may not exhibit an enhanced agronomic trait. Selection from such population is necessary to identify one or more transgenic plant cells having a transgenic nucleus that can provide plants with the enhanced trait. Transgenic plants having enhanced traits are selected from populations of plants regenerated or derived from plant cells transformed as described herein by evaluating the plants in a variety of assays to detect an enhanced trait. These assays also can take many forms including, but not limited to, direct screening for the trait in a greenhouse or field trial or by screening for a surrogate trait. Such analyses can be directed to detecting changes in the chemical composition, biomass, physiological properties, morphology of the plant. Changes in chemical compositions such as nutritional composition of grain can be detected by analysis of the seed composition and content of protein, free amino acids, oil, free fatty acids, starch or tocopherols. Changes in biomass characteristics can be made on greenhouse or field grown plants and can include plant height, stem diameter, root and shoot dry weights; and, for corn plants, ear length and diameter. Changes in physiological properties can be identified by evaluating responses to stress conditions, for example assays using imposed stress conditions such as water deficit, nitrogen deficiency, cold growing conditions, pathogen or insect attack or light deficiency, or increased plant density. Changes in morphology can be measured by visual observation of tendency of a transformed plant with an enhanced agronomic trait to also appear to be a normal plant as compared to changes toward bushy, taller, thicker, narrower leaves, striped leaves, knotted trait, chlorosis, albino, anthocyanin production, or altered tassels, ears or roots. Other selection properties include days to pollen shed, days to silking, leaf extension rate, chlorophyll content, leaf temperature, stand, seedling vigor, internode length, plant height, leaf number, leaf area, tittering, brace roots, stay green, stalk lodging, root lodging, plant health, barreness/prolificacy, green snap, and pest resistance. In addition, phenotypic characteristics of harvested grain can be evaluated, including number of kernels per row on the ear, number of rows of kernels on the ear, kernel abortion, kernel weight, kernel size, kernel density and physical grain quality.

[0098] Assays for screening for a desired trait are readily designed by those practicing in the art. The following illustrates screening assays for corn traits using hybrid corn plants. The assays can be readily adapted for screening other plants such as canola, cotton and soybean either as hybrids or inbreds.

[0099] In certain embodiments of the invention transgenic corn plants having nitrogen use efficiency can be identified by screening in fields with three levels of nitrogen (N) fertilizer being applied, e.g. low level (0 N), medium level (80 lb/ac) and high level (180 lb/ac). Plants with enhanced nitrogen use efficiency provide higher yield as compared to control plants.

[0100] In some embodiments, the present invention discloses transgenic plant exhibiting increased yield under various stress conditions (e.g., drought, heat, limited nitrogen, or any combinations thereof disclosed herein, compare to control plant. For example, transgenic plants of the present invention can exhibit averaged, or similar yield received in the past, but higher yield as compared the control plants under similar stress conditions. The present invention is capable of maintaining yield under stress conditions as compared with plants that do not comprise the genes or miRNA disclosed herein.

[0101] In other embodiments, transgenic corn plants having enhanced yield can be identified by screening using progeny of the transgenic plants over multiple locations with plants grown under optimal production management practices and maximum weed and pest control. A useful target for improved yield is a 5% to 10% increase in yield as compared to yield produced by plants grown from seed for a control plant. Selection methods can be applied in multiple and diverse geographic locations, for example up to 16 or more locations, over one or more planting seasons, for example at least two planting seasons, to statistically distinguish yield improvement from natural environmental effects.

[0102] In other embodiments, transgenic corn plants having enhanced water use efficiency can be identified by screening plants in an assay where water is withheld for a period to induce stress followed by watering to revive the plants. For example, a useful selection process imposes 3 drought/re-water cycles on plants over a total period of 15 days after an initial stress free growth period of 11 days. Each cycle consists of 5 days, with no water being applied for the first four days and a water quenching on the 5th day of the cycle. The primary phenotypes analyzed by the selection method are the changes in plant growth rate as determined by height and biomass during a vegetative drought treatment.

[0103] In other embodiments, transgenic corn plants having enhanced cold tolerance can be identified by screening plants in a cold germination assay and/or a cold tolerance field trial. In a cold germination assay trays of transgenic and control seeds are placed in a growth chamber at 9.7° C. for 24 days (no light). For example, seeds having higher germination rates as compared to the control can be identified as having enhanced cold tolerance. In a cold tolerance field trial plants with enhanced cold tolerance can be identified from field planting at an earlier date than conventional Spring planting for the field location. For example, seeds are planted into the ground around two weeks before local farmers begin to plant corn so that a significant cold stress is exerted onto the crop, named as cold treatment. Seeds can be planted under local optimal planting conditions such that the crop has little or no exposure to cold condition, named as normal treatment. At each location, seeds may be can be planted under both cold and normal conditions preferably with multiple repetitions per treatment.

[0104] In other embodiments, transgenic corn plants having seeds with increased protein and/or oil levels can be identified by analyzing progeny seed for protein and/or oil. Near-infrared transmittance spectrometry is a non-destructive, high-throughput method that is useful to determine the composition of a bulk seed sample for properties listed in table 1.

TABLE 1

| | |
|---|---|
| Typical sample(s): | Whole grain corn and soybean seeds |
| Typical analytical range: | Corn - moisture 5-15%, oil 5-20%, protein |
| | 5-30%, starch 50-75%, and density 1.0-1.3%. |
| | Soybean - moisture 5-15%, oil 15-25%, and |
| | protein 35-50%. |

[0105] Although the plant cells and methods of this invention can be applied to any plant cell, plant, seed or pollen, e.g. any fruit, vegetable, grass, tree or ornamental plant, the various aspects of the invention are preferably applied to corn, soybean, cotton, canola, alfalfa, wheat, rice, sugarcane, and sugar beet plants. In many cases the invention is applied to corn plants that are inherently resistant to disease from the Mal de Rio Cuarto virus or the Puccina sorghi fungus or both.

### Homolog Identification

[0106] In certain embodiment, the present invention also includes identification of homologs of proteins encoded by the DNA identified in the sequence listing which is used to provide transgenic seed and plants having enhanced agronomic traits. From the sequence of the homologs, homologous DNA sequence are identified for preparing additional transgenic seeds and plants of this invention with enhanced agronomic traits.

[0107] An “All Protein Database” are constructed of known protein sequences using a proprietary sequence database and the National Center for Biotechnology Information (NCBI) non-redundant amino acid database (nr.aa). For each organism from which a polynucleotide sequence provided herein can be obtained, an “Organism Protein Database” are constructed of known protein sequences of the organism; it is a subset of the All Protein Database based on the NCBI taxonomy ID for the organism.

[0108] The All Protein Database are queried using amino acid sequences provided herein as SEQ ID NO: 6000 through SEQ ID NO: 9779 using NCBI “blastp” program with E-value cutoff of 1e⁻⁸. Up to 1000 top hits are kept, and separated by organism names. For each organism other than that of the query sequence, a list is kept for hits from the query organism itself with a more significant E-value than the best hit of the organism. The list contain likely duplicated genes of the polynucleotides provided herein, and is referred to as the Core List. Another list is kept for all the hits from each organism, sorted by E-value, and referred to as the Hit List.

[0109] The Organism Protein Database are queried using polypeptide sequences provided herein as SEQ ID NO: 6000 through SEQ ID NO: 9779 using NCBI “blastp” program with E-value cutoff of 1e⁻⁴. Up to 1000 top hits are kept. A BLAST searchable database is constructed based on these hits, and are referred to as “SubDB”. SubDB are queried with each sequence in the Hit List using NCBI “blastp” program with E-value cutoff of 1e⁻⁸. The hit with the best E-value are compared with the Core List from the corresponding organism. The hit is deemed a likely ortholog if it belongs to the Core List, otherwise it is deemed not a likely ortholog and there is no further search of sequences in the Hit List for the same organism. Homologs from a large number of distinct organisms are identified and reported.

[0110] Recombinant DNA constructs can be prepared using the DNA encoding each of the identified homologs and the constructs can be used to prepare multiple events of transgenic corn, soybean, canola, cotton and other transgenic plants mentioned. Plants can be regenerated from the transformed plant cells and used to produce progeny plants and seed that are screened for enhanced water use efficiency, enhanced cold tolerance, increased yield, enhanced nitrogen use efficiency, enhanced seed protein and enhanced seed oil. From each group of multiple events of transgenic plants with a specific recombinant DNA for a homolog the event that produces the greatest enhancement in yield, water use efficiency, nitrogen use efficiency, enhanced cold tolerance, enhanced seed protein and enhanced seed oil is identified and progeny seed can be selected for commercial development.

### Pfam Module Annotation

[0111] The amino acid sequence of the expressed proteins shown to be associated with an enhanced trait are analyzed for Pfam protein family against the current Pfam collection of multiple sequence alignments and hidden Markov models using the HMMER software in the appended computer listing. The Pfam domain modules and individual protein domain for the proteins shown in the sequence listing. The Hidden Markov model databases for the identified patent families are known to a skilled artisan allowing identification of other homologous proteins and their cognate encoding DNA to enable the full breadth of the invention for a person of ordinary skill in the art. Certain proteins are identified by a single Pfam domain and others by multiple Pfam domains.

### Selectable Markers

[0112] The present invention include transgenic plants with and without selectable markers. As used herein the term “marker” refers to any transcribable polynucleotide molecule whose expression, or lack thereof, can be screened for or scored in some way. Marker genes for use in the practice of the present invention include, but are not limited to transcribable polynucleotide molecules encoding B-glucuronidase (GUS described in U.S. Pat. No. 5,599,670, which is incorporated herein by reference), green fluorescent protein and variants thereof (GFP described in U.S. Pat. No. 5,491,084 and U.S. Pat. No. 6,146,826, RFP and the like), proteins that confer antibiotic resistance, or proteins that confer herbicide tolerance. Marker genes in genetically modified plants are generally of two types: genes conferring antibiotic resistance or genes conferring herbicide tolerance. Examples include, but are not limited to antibiotic resistance markers, including those encoding proteins conferring resistance to kanamycin (nptII), hygromycin B (aph IV), streptomycin or spectinomycin (aad, spec/strep) and gentamycin (aac3 and aacC4) are known in the art.

[0113] Included within the term “selectable markers” are also genes which encode a secretable marker whose secretion can be detected as a means of identifying or selecting for transformed cells. Examples include markers that encode a secretable antigen that can be identified by antibody interaction, or even secretable enzymes which can be detected catalytically. Selectable secreted marker proteins fall into a number of classes, including small, diffusible proteins which are detectable, (e.g., by ELISA), small active enzymes which are detectable in extracellular solution (e.g., alpha.-amylase, beta.-lactamase, phosphinothricin transferase), or proteins which are inserted or trapped in the cell wall (such as proteins which include a leader sequence such as that found in the expression unit of extension or tobacco PR-S). Other possible selectable marker genes will be apparent to those of skill in the art.

[0114] The selectable marker is preferably GUS, green fluorescent protein (GFP) or variants thereof, neomycin phosphotransferase II (nptII), luciferase (LUX), an antibiotic resistance protein, or a herbicide (e.g., glyphosate, bromoxynil, and the like) resistance or tolerance protein. The selectable marker is most preferably a kanamycin, hygromycin, or herbicide resistance marker.

### Transcript Profiling

[0115] Technologies for measuring gene expression such as transcript profiling or expression profiling are well known to one skilled in the art. Sequencing-based methods such as the use of expressed sequence tags (ESTs) now include methods based on short tags, such as serial analysis of gene expression (SAGE) and massively parallel signature sequencing (MPSS). These technologies permit the analysis of complex mRNA populations from selected cells or tissues, producing large-scale measurements of gene expression. In addition, gene expression changes observed due to environmental conditions such as biotic and abiotic stresses indicate the identity of encoded gene product plays a role in those processes.

[0116] In some embodiments of the present invention, when annotation for the gene exists, transcriptional profiling allows a biological pathway or process to be inferred, and it provides more insight into how a plant responds at a molecular level to stresses. With this knowledge, one skilled in the art can unravel approaches to mitigating the stress via transgenic technology.

[0117] In one embodiment, because gene expression profiles can be tissue-specific or regulated by time of day, the present invention can provide information and allows one to decide how these genes are expressed in transgenic plants. Furthermore, the promoter and other expression elements for these genes can be used to drive expression of other transgenes in plants.

[0118] In another embodiment, the present invention can be used to detect changes in expression of endogenous genes that occur as the result of ectopic expression of a transgene and gives insight into the mode-of-action of the transgene. This in turn can help reveal transgene optimization strategies. For example, those genes which are affected by over-expression of a transgene can themselves be overexpressed in transgenic plants to attempt to obtain a similar (or better) transgenic response.

[0119] In one embodiment, the sequences of the present invention provide sequences to be situated on the microarray and can be used to identify variants of the gene across different lines of the same plant species. For example, single feature polymorphisms (SFPs) occur when a variant of a specific gene hybridizes only partially to its homologue on the microarray. By statistical methods, one skilled in the art can identify 25-mer oligonucleotide probes that do not hybridize, thus identifying potential nucleotide polymorphisms. These nucleotide polymorphisms can be used as molecular markers in genotyping and breeding studies.

[0120] In certain embodiments, the nucleic acid sequences disclosed can be used directly as EST template sequences or used to design and subsequently create oligonucleotides probes that can be affixed to a solid support, e.g., glass microarrays. The collection of oligonucleotide probes for a unique template is called a probeset. The microarrays in turn can be used to identify gene expression patterns in a large variety of germplasm, over numerous environmental conditions or abiotic stress, and in a variety of tissues. This gene expression data can be used for mode-of-action studies, promoter and other expression element discovery, and systems biology networks.

[0121] In some embodiments, probes can typically be 25 nucleotides long or longer and approximately 10-16 unique probes are created for each template sequence as listed in SEQ ID 1-5999, or from “probeset” sequences denoted in SEQ ID 9780-15778. For example, SEQ ID NO: 1 can be used as a template sequence to design probes to be fixed on a microarray. The corresponding amino acid sequence of SEQ ID NO:1 is SEQ ID NO: 6000. Part of the SEQ ID NO:1 can be used as probes, and the collection of all of the probes are disclosed in SEQ ID NO:9780 with or without the overlapping sequence. Hybridization of cellular RNAs to the probes conjugate to the microarray can result in specific binding of mRNA to the microarray, and subsequent detection methods allow quantification of the amount of each template sequence, resulting in a gene expression intensity value.

[0122] In one embodiment, template sequences can be retrieved from public or proprietary EST sequence databases. Hybridization and detection of these templates via microarray technology can verify that these sequences are functional. Furthermore, specific expression patterns can be measured under numerous environmental stimuli, suggesting that these sequences have a function under those conditions.

[0123] In some embodiments, the polynucleotide or polypeptide molecules can also be used to prepare arrays of target molecules arranged on a surface of a substrate. The target molecules can be known molecules, e.g. polynucleotides (including oligonucleotides) or polypeptides, which are capable of binding to specific oligonucleotides, such as complementary nucleic acids or specific antibodies. The target molecules can be immobilized, e.g. by covalent or non-covalent bonding, to the surface in small amounts of substantially purified and isolated molecules in a grid pattern. By immobilized is meant that the target molecules maintain their position relative to the solid support under hybridization and washing conditions. Target molecules are deposited in small footprint, isolated quantities of “spotted elements” of single-stranded polynucleotide arranged in rectangular grids in a density of about 30 to 100 or more, e.g. up to about 1000, spotted elements per square centimeter. In additional embodiments, arrays comprise at least about 10, 20, 50, 100, 150, 200, 250, 300, 350, 400, 450, 500, 550, 600, 650, 700, 750, 1000 or more polynucleotides sequences, e.g. at least about 1000 to 5000 or at least about 10,000 to 100,000, distinct target polynucleotides per unit substrate. Where detection of transcription for a large number of genes is desired, the economics of arrays favors a high density design criteria provided that the target molecules are sufficiently separated so that the intensity of the indicia of a binding event associated with oligonucleotides molecules does not overwhelm and mask the indicia of neighboring binding events. For high-density microarrays each spotted element can contain up to about 10⁷ or more copies of the target molecule, e.g. single stranded cDNA or oligonucleotide probes on glass substrates or nylon substrates.

[0124] Yet in another embodiment, arrays can be prepared with molecules from a single species, e.g., a plant species, or with molecules from other species, particularly other plant species. Arrays with target molecules from a single species can be used with polynucleotide or peptide molecules from the same species or a different species due to the ability of cross species homologous genes to hybridize. High stringency hybridization is generally used when the target oligonucleotides and samples are from the same species.

[0125] In other aspects of this invention, the organism of interest can be a plant and the target molecules can be polynucleotides or oligonucleotides with nucleic acid sequences having at least about 80 percent, at least about 85 percent, at least about 90 percent, at least about 92.5 percent, at least about 95 percent, at least about 97.5 percent, at least about 99 percent, at least about 99.25 percent, at least about 99.5 percent, or at least about 99.8 percent sequence identity to a corresponding sequence of the same length in a polynucleotide having a sequence selected from the group consisting of SEQ ID NO: 1 through SEQ ID NO: 5999 or SEQ ID NO: 9780 through SEQ ID NO: 15778 or complements thereof. In other aspects of the invention, at least 10% of the target molecules on an array have at least 15, at least 16, at least 17, at least 18, at least 19, at least 20, at least 21, at least 22, at least 23, at least 24, at least 25, at least 26, at least 27, at least 28, at least 29, or at least 30, consecutive nucleotides of sequence having at least 80%, at least 85%, at least 90%, at least 95%, at least 99%, at least 99.5%, at least 99.8%, or 100%, identity with a corresponding sequence of the same length in a polynucleotide having a sequence selected from the group consisting of SEQ ID NO: 1 through SEQ ID NO: 5999 or SEQ ID NO: 9780 through SEQ ID NO: 15778 or complements or fragments thereof.

[0126] In another embodiment, the arrays of the present invention are useful in a variety of applications, including gene discovery, genomic research, molecular breeding and bioactive compound screening. One important use of arrays is in the analysis of differential gene transcription, e.g. transcription profiling where the production of mRNA in different cells, normally a cell of interest and a control, is compared and discrepancies in gene expression are identified. In such assays, the presence of discrepancies indicates a difference in gene expression levels in the cells being compared. Such information is useful for the identification of the types of genes expressed in a particular cell or tissue type in a known environment.

[0127] Yet in another embodiment, a sample can be prepared with RNA extracted from a given cell line or tissue. The sample can be produced by reverse transcription of mRNA or total RNA and labeled with radioactive or fluorescent labeling. A sample is typically a mixture containing many different sequences in various amounts, corresponding to the numbers of copies of the original mRNA species extracted from the sample.

[0128] In some embodiments, the initial RNA sample for sample preparation can typically be derived from a physiological source. The physiological source can be selected from a variety of organisms, with physiological sources of interest including single celled organisms such as yeast and multi-cellular organisms, including plants and animals, particularly plants, where the physiological sources from multi-cellular organisms may be derived from particular organs or tissues of the multi-cellular organism, or from isolated cells derived from an organ, or tissue of the organism. The physiological sources may also be multi-cellular organisms at different developmental stages (e.g., 10-day-old seedlings), or organisms grown under different environmental conditions (e.g., drought-stressed plants) or treated with chemicals.

[0129] In one aspect, the present invention includes recombinant DNA constructs having a polynucleotide encoding a protein that has an amino acid sequence having at least 95% identity over at least 95% of the length of a reference sequence selected from the group consisting of SEQ ID NO: 6000-9779 when said amino acid sequence is aligned with said reference sequence.

[0130] In another aspect, the present invention includes a mixture having plant cells, and an antibody to a protein produced in said cells wherein said protein has an amino acid sequence that has at least 95% identity over at least 95% of the length of a reference sequence selected from the group consisting of SEQ ID NO: 6000-9779 when said amino acid sequence is aligned to said reference sequence.

[0131] Yet another aspect of the present invention includes recombinant DNA constructs having a promoter that is functional in a plant cell and that is operably linked to a polynucleotide that: encodes a protein having an amino acid sequence having at least 95% identity over at least 95% of the length of a reference sequence selected from the group consisting of SEQ ID NO: 6000-9779, when said amino acid sequence is aligned to said reference sequence; or is transcribed into an RNA molecule that suppresses the level of an endogenous protein that has an amino acid sequence that is at least 95% identical over at least 95% of the length of a reference sequence of SEQ ID NO: 6000-9779, when said amino acid sequence is aligned to said reference sequence; and wherein said construct is stably integrated into a chromosome in a plant cell nucleus. In some aspect, this invention includes a transgenic plant cell having the recombinant DNA construct wherein said DNA construct provides for an enhanced trait as compared to control plants; and wherein said enhanced trait is enhanced water use efficiency, enhanced cold tolerance, increased yield, enhanced nitrogen use efficiency, enhanced seed protein or enhanced seed oil. The DNA construct further can express a protein that provides tolerance from exposure to an herbicide (e.g., a glyphosate, dicamba, or glufosinate compound) having an agent applied at levels that are lethal to a wild type of said plant cell nucleus.

[0132] In some aspects, this invention provides transgenic plants (e.g., corn, soybean, cotton, canola, alfalfa, wheat, rice, sugarcane, or sugar beet plant), that is homozygous for said recombinant DNA and have a plurality of plant cells.

[0133] Yet in another aspect, this inventions includes transgenic pollen grains having a haploid derivative of a plant cell nucleus having a chromosome comprising the recombinant DNA construct.

[0134] In one aspect, this inventions provides a method for manufacturing non-natural, transgenic seed (e.g., corn, soybean, cotton, canola, alfalfa, wheat, rice, sugarcane, or sugar beet seed) that can be used to produce a crop of transgenic plants with an enhanced trait resulting from expression of a stably-integrated, recombinant DNA construct, said method includes (a) screening a population of plants for said enhanced trait and said recombinant DNA, wherein individual plants in said population exhibit said trait at a level less than, essentially the same as or greater than the level that said trait is exhibited in control plants which do not contain said recombinant DNA, wherein said enhanced trait is selected from the group of enhanced traits consisting of enhanced water use efficiency, enhanced cold tolerance, increased yield, enhanced nitrogen use efficiency, enhanced seed protein and enhanced seed oil; (b) selecting from said population one or more plants that exhibit said trait at a level greater than the level that said trait is exhibited in control plants, and (c) collecting seed from selected plant from step b.

[0135] Yet in another aspect, the method of this invention further includes: (a) verifying that said recombinant DNA is stably integrated in said selected plants, and (b) analyzing tissue of said selected plant to determine the expression or suppression of a protein having the function of a protein having an amino acid sequence selected from the group consisting of one of SEQ ID NOs: 6000-9779.

[0136] In one aspect, this invention provides a method of producing hybrid corn seed including: (a) acquiring hybrid corn seed from an herbicide tolerant corn plant which also has a stably-integrated, recombinant DNA construct; (b) producing corn plants from said hybrid corn seed, wherein a fraction of the plants produced from said hybrid corn seed is homozygous for said recombinant DNA, a fraction of the plants produced from said hybrid corn seed is hemizygous for said recombinant DNA, and a fraction of the plants produced from said hybrid corn seed has none of said recombinant DNA; (c) selecting corn plants which are homozygous and hemizygous for said recombinant DNA by treating with an herbicide; (d) collecting seed from herbicide-treated-surviving corn plants and planting said seed to produce further progeny corn plants; (e) repeating steps (c) and (d) at least once to produce an inbred corn line; and (f) crossing said inbred corn line with a second corn line to produce hybrid seed.

[0137] In some aspect, this invention provides substantially purified nucleic acid molecule having a nucleic acid sequence wherein said nucleic acid sequence exhibits 95% or greater identity to a nucleic acid sequence selected from the group consisting of SEQ ID NO: 1 through SEQ ID NO: 5999 and sequences complementary to SEQ ID NO: 1 through SEQ ID NO: 5999.

[0138] In some aspects, this invention provides substantially purified nucleic acid molecule having a nucleic acid sequence wherein said nucleic acid sequence exhibits 95% or greater identity to a nucleic acid sequence selected from the group consisting of SEQ ID NO: 9780 through SEQ ID NO: 15778 and sequences complementary to SEQ ID NO: 9780 through SEQ ID NO: 15778.

[0139] Yet in another aspect, the oligonucleotides disclosed in SEQ ID NO: 1-5999 or SEQ ID NO: 9780-15778 can be conjugated to a solid support to be used in transcript profiling. Furthermore, fragments of SEQ ID NO: 1-5999 or complements thereof, and SEQ ID NO: 9780-15778 or complements thereof can also be fixed onto a solid support and used as probes in transcript profiling.

[0140] It is contemplated that any embodiment discussed in this specification can be implemented with respect to any method, kit, reagent, or composition of the invention, and vice versa. Furthermore, compositions of the invention can be used to achieve methods of the invention.

[0141] It will be understood that particular embodiments described herein are shown by way of illustration and not as limitations of the invention. The principal features of this invention can be employed in various embodiments without departing from the scope of the invention. Those skilled in the art will recognize, or be able to ascertain using no more than routine experimentation, numerous equivalents to the specific procedures described herein. Such equivalents are considered to be within the scope of this invention and are covered by the claims.

[0142] All publications and patent applications mentioned in the specification are indicative of the level of skill of those skilled in the art to which this invention pertains. All publications and patent applications are herein incorporated by reference to the same extent as if each individual publication or patent application was specifically and individually indicated to be incorporated by reference.

[0143] The use of the word “a” or “an” when used in conjunction with the term “comprising” in the claims and/or the specification may mean “one,” but it is also consistent with the meaning of “one or more,” “at least one,” and “one or more than one.” The use of the term “or” in the claims is used to mean “and/or” unless explicitly indicated to refer to alternatives only or the alternatives are mutually exclusive, although the disclosure supports a definition that refers to only alternatives and “and/or.” Throughout this application, the term “about” is used to indicate that a value includes the inherent variation of error for the device, the method being employed to determine the value, or the variation that exists among the study subjects.

[0144] As used in this specification and claim(s), the words “comprising” (and any form of comprising, such as “comprise” and “comprises”), “having” (and any form of having, such as “have” and “has”), “including” (and any form of including, such as “includes” and “include”) or “containing” (and any form of containing, such as “contains” and “contain”) are inclusive or open-ended and do not exclude additional, unrecited elements or method steps.

[0145] The term “or combinations thereof” as used herein refers to all permutations and combinations of the listed items preceding the term. For example, “A, B, C, or combinations thereof” is intended to include at least one of: A, B, C, AB, AC, BC, or ABC, and if order is important in a particular context, also BA, CA, CB, CBA, BCA, ACB, BAC, or CAB. Continuing with this example, expressly included are combinations that contain repeats of one or more item or term, such as BB, AAA, MB, BBC, AAABCCCC, CBBAAA, CABABB, and so forth. The skilled artisan will understand that typically there is no limit on the number of items or terms in any combination, unless otherwise apparent from the context.

[0146] All of the compositions and/or methods disclosed and claimed herein can be made and executed without undue experimentation in light of the present disclosure. While the compositions and methods of this invention have been described in terms of preferred embodiments, it will be apparent to those of skill in the art that variations may be applied to the compositions and/or methods and in the steps or in the sequence of steps of the method described herein without departing from the concept, spirit and scope of the invention. All such similar substitutes and modifications apparent to those skilled in the art are deemed to be within the spirit, scope and concept of the invention as defined by the appended claims.

What is claimed is:

1. A transgenic plant cell with stably integrated, recombinant DNA comprising a promoter that is functional in plant cells and that is operably linked to DNA from a plant, bacteria or yeast that encodes a protein having at least 90% sequence identity to SEQ ID No. 7826;
wherein said plant cell is selected from a population of plant with said recombinant DNA by screening plants that are regenerated from plant cells in said population and that express said protein for an enhanced trait as compared to control plants that do not have said recombinant DNA; and
wherein said enhanced trait is selected from group of enhanced traits consisting of enhanced water use efficiency, enhanced cold tolerance, increased yield, enhanced nitrogen use efficiency, enhanced seed protein and enhanced seed oil.

2. A recombinant DNA construct comprising a polynucleotide encoding a protein that has an amino acid sequence having at least 95% identity over at least 95% of the length of a reference sequence selected from the group consisting of SEQ ID NO: 6000-9779 when said amino acid sequence is aligned with said reference sequence.

3. A mixture comprising plant cells, and an antibody to a protein produced in said cells wherein said protein has an amino acid sequence that has at least 95% identity over at least 95% of the length of a reference sequence selected from the group consisting of SEQ ID NO: 6000-9779 when said amino acid sequence is aligned to said reference sequence.

4. A recombinant DNA construct comprising a promoter that is functional in a plant cell and that is operably linked to a polynucleotide that:
(a) encodes a protein having an amino acid sequence having at least 95% identity over at least 95% of the length of a reference sequence selected from the group consisting of SEQ ID NO: 6000-9779, when said amino acid sequence is aligned to said reference sequence; or
(b) is transcribed into an RNA molecule that suppresses the level of an endogenous protein that has an amino acid sequence that is at least 95% identical over at least 95% of the length of a reference sequence of SEQ ID NO: 6000-9779, when said amino acid sequence is aligned to said reference sequence; and
wherein said construct is stably integrated into a chromosome in a plant cell nucleus.

5. A transgenic plant cell comprising the recombinant DNA construct of claim 4 wherein said DNA construct provides for an enhanced trait as compared to control plants; and wherein said enhanced trait is enhanced water use efficiency, enhanced cold tolerance, increased yield, enhanced nitrogen use efficiency, enhanced seed protein or enhanced seed oil.

6. The plant cell of claim 5 further comprising DNA expressing a protein that provides tolerance from exposure to an herbicide comprising an agent applied at levels that are lethal to a wild type of said plant cell nucleus.

7. The plant cell of claim 6 wherein the agent of said herbicide is a glyphosate, dicamba, or glufosinate compound.

8. A transgenic plant comprising a plurality of plant cells of claim 5.

9. The transgenic plant of claim 8 which is homozygous for said recombinant DNA.

10. A transgenic seed comprising a plurality of plant cells of claim 5.

11. The transgenic seed of claim 10 from a corn, soybean, cotton, canola, alfalfa, wheat, rice, sugarcane, or sugar beet plant.

12. A transgenic pollen grain comprising a haploid derivative of a plant cell nucleus having a chromosome comprising the recombinant DNA construct of claim 4.

13. A method for manufacturing non-natural, transgenic seed that can be used to produce a crop of transgenic plants with an enhanced trait resulting from expression of a stably-integrated, recombinant DNA construct of claim 4, said method comprising:
(a) screening a population of plants for said enhanced trait and said recombinant DNA, wherein individual plants in said population exhibit said trait at a level less than, essentially the same as or greater than the level that said trait is exhibited in control plants which do not contain said recombinant DNA, wherein said enhanced trait is selected from the group of enhanced traits consisting of enhanced water use efficiency, enhanced cold tolerance, increased yield, enhanced nitrogen use efficiency, enhanced seed protein and enhanced seed oil;
(b) selecting from said population one or more plants that exhibit said trait at a level greater than the level that said trait is exhibited in control plants, and
(c) collecting seed from selected plant from step b.

14. The method of claim 13 wherein said method for manufacturing said transgenic seed further comprises:
(a) verifying that said recombinant DNA is stably integrated in said selected plants, and
(b) analyzing tissue of said selected plant to determine the expression or suppression of a protein having the function of a protein having an amino acid sequence selected from the group consisting of one of SEQ ID NOs:6000-9779.

15. The method of claim 14 wherein said seed is corn, soybean, cotton, canola, alfalfa, wheat, rice, sugarcane, or sugar beet seed.

16. A method of producing hybrid corn seed comprising:
(a) acquiring hybrid corn seed from an herbicide tolerant corn plant which also has a stably-integrated, recombinant DNA construct of claim 4;
(b) producing corn plants from said hybrid corn seed, wherein a fraction of the plants produced from said hybrid corn seed is homozygous for said recombinant DNA, a fraction of the plants produced from said hybrid corn seed is hemizygous for said recombinant DNA, and a fraction of the plants produced from said hybrid corn seed has none of said recombinant DNA;
(c) selecting corn plants which are homozygous and hemizygous for said recombinant DNA by treating with an herbicide;
(d) collecting seed from herbicide-treated-surviving corn plants and planting said seed to produce further progeny corn plants;
(e) repeating steps (c) and (d) at least once to produce an inbred corn line; and
(f) crossing said inbred corn line with a second corn line to produce hybrid seed.

17. A substantially purified nucleic acid molecule comprising a nucleic acid sequence wherein said nucleic acid sequence exhibits 95% or greater identity to a nucleic acid sequence selected from the group consisting of SEQ ID NO: 1 through SEQ ID NO: 5999 and sequences complementary to SEQ ID NO: 1 through SEQ ID NO: 5999.

18. A transgenic plant cell with stably integrated, recombinant DNA comprising a promoter that is functional in plant cells and that is operably linked to DNA from a plant, bacteria or yeast that encodes a protein having at least 90% sequence identity selected from the group consisting of SEQ ID No. 6000-9779;
wherein said plant cell is selected from a population of plant with said recombinant DNA by screening plants that are regenerated from plant cells in said population and that express said protein for an enhanced trait as compared to control plants that do not have said recombinant DNA; and
wherein said enhanced trait is selected from group of enhanced traits consisting of enhanced water use efficiency, enhanced cold tolerance, increased yield, enhanced nitrogen use efficiency, enhanced seed protein and enhanced seed oil.

19. A solid support comprising at least 10 nucleic acid sequences selected from the group consisting of SEQ ID NO: 1 through SEQ ID NO: 5999 and sequences complementary to SEQ ID NO: 1 through SEQ ID NO: 5999.

20. A substantially purified nucleic acid molecule useful in transcription profiling comprising a nucleic acid sequence wherein said nucleic acid sequence exhibits 95% or greater identity to a nucleic acid sequence selected from the group consisting of SEQ ID NO: 9780 through SEQ ID NO: 15778 and sequences complementary to SEQ ID NO: 9780 through SEQ ID NO: 15778.

21. A solid support comprising at least 10 nucleic acid sequences selected from the group consisting of SEQ ID NO: 9780 through SEQ ID NO: 15778 and sequences complementary to SEQ ID NO: 9780 through SEQ ID NO: 15778.

The application's sequence listing, which the Patent Office published only in electronic form, follows.

SEQUENCE LISTING (15778 sequences)

SEQ ID NO: 1 - DNA, 1967 bp, Glycine max
  misc_feature (6)..(6): n is a, c, g, or t
  misc_feature (52)..(52): n is a, c, g, or t
  misc_feature (58)..(58): n is a, c, g, or t
  misc_feature (81)..(81): n is a, c, g, or t
  misc_feature (138)..(138): n is a, c, g, or t
  misc_feature (145)..(145): n is a, c, g, or t
  misc_feature (151)..(151): n is a, c, g, or t
  misc_feature (195)..(195): n is a, c, g, or t
  misc_feature (197)..(197): n is a, c, g, or t
  misc_feature (216)..(216): n is a, c, g, or t
  misc_feature (240)..(240): n is a, c, g, or t
  misc_feature (244)..(244): n is a, c, g, or t
  misc_feature (249)..(249): n is a, c, g, or t
  misc_feature (261)..(261): n is a, c, g, or t
  misc_feature (264)..(264): n is a, c, g, or t
  misc_feature (273)..(273): n is a, c, g, or t
  misc_feature (282)..(283): n is a, c, g, or t
  misc_feature (318)..(319): n is a, c, g, or t
  misc_feature (324)..(324): n is a, c, g, or t
  misc_feature (360)..(360): n is a, c, g, or t
  misc_feature (365)..(365): n is a, c, g, or t
  misc_feature (378)..(378): n is a, c, g, or t
  misc_feature (381)..(381): n is a, c, g, or t
  misc_feature (384)..(384): n is a, c, g, or t
  misc_feature (402)..(402): n is a, c, g, or t
  misc_feature (420)..(420): n is a, c, g, or t
  misc_feature (424)..(424): n is a, c, g, or t
  misc_feature (430)..(430): n is a, c, g, or t
  misc_feature (441)..(441): n is a, c, g, or t
  misc_feature (470)..(470): n is a, c, g, or t
  misc_feature (493)..(497): n is a, c, g, or t
  misc_feature (503)..(503): n is a, c, g, or t
  misc_feature (515)..(515): n is a, c, g, or t
  misc_feature (541)..(541): n is a, c, g, or t
  misc_feature (546)..(546): n is a, c, g, or t
  misc_feature (572)..(572): n is a, c, g, or t
  misc_feature (612)..(612): n is a, c, g, or t
  misc_feature (623)..(623): n is a, c, g, or t
  misc_feature (644)..(644): n is a, c, g, or t
  misc_feature (698)..(698): n is a, c, g, or t
  misc_feature (736)..(736): n is a, c, g, or t
  misc_feature (775)..(775): n is a, c, g, or t
  misc_feature (790)..(790): n is a, c, g, or t
  misc_feature (820)..(820): n is a, c, g, or t
  misc_feature (837)..(837): n is a, c, g, or t
  misc_feature (846)..(846): n is a, c, g, or t
  misc_feature (851)..(851): n is a, c, g, or t
  misc_feature (927)..(927): n is a, c, g, or t
  misc_feature (938)..(938): n is a, c, g, or t
  misc_feature (969)..(969): n is a, c, g, or t
  misc_feature (999)..(999): n is a, c, g, or t
  misc_feature (1094)..(1094): n is a, c, g, or t
  misc_feature (1121)..(1121): n is a, c, g, or t
  misc_feature (1136)..(1136): n is a, c, g, or t
  misc_feature (1144)..(1144): n is a, c, g, or t
  misc_feature (1153)..(1153): n is a, c, g, or t
  misc_feature (1156)..(1156): n is a, c, g, or t
  misc_feature (1162)..(1162): n is a, c, g, or t
  misc_feature (1167)..(1167): n is a, c, g, or t
  misc_feature (1205)..(1205): n is a, c, g, or t
  misc_feature (1223)..(1223): n is a, c, g, or t
  misc_feature (1279)..(1279): n is a, c, g, or t
  misc_feature (1437)..(1437): n is a, c, g, or t
  misc_feature (1443)..(1443): n is a, c, g, or t
  misc_feature (1527)..(1528): n is a, c, g, or t
  misc_feature (1580)..(1580): n is a, c, g, or t
  misc_feature (1700)..(1700): n is a, c, g, or t
  misc_feature (1704)..(1704): n is a, c, g, or t
  misc_feature (1818)..(1818): n is a, c, g, or t
  misc_feature (1820)..(1820): n is a, c, g, or t
  misc_feature (1864)..(1865): n is a, c, g, or t
  misc_feature (1868)..(1869): n is a, c, g, or t
  misc_feature (1879)..(1881): n is a, c, g, or t
  misc_feature (1883)..(1883): n is a, c, g, or t
  misc_feature (1900)..(1903): n is a, c, g, or t
  misc_feature (1907)..(1907): n is a, c, g, or t
  misc_feature (1909)..(1909): n is a, c, g, or t
  misc_feature (1919)..(1919): n is a, c, g, or t
  misc_feature (1921)..(1922): n is a, c, g, or t
  misc_feature (1925)..(1927): n is a, c, g, or t
  misc_feature (1929)..(1929): n is a, c, g, or t
  misc_feature (1931)..(1931): n is a, c, g, or t
  misc_feature (1933)..(1937): n is a, c, g, or t
  Peptide Sequence Number=SeqID_6000
  Probeset Number=SeqID_9780
tgtctnctagcagcagataggctctaactagtagtaatgtactgctagtatngtgtgnagtctcactatagtttacgtcgnaccatcgcacagtagcgtgaaacatttgtcacgctgcagactagtgatgtggaggtngcatgcngcgtancagccgtacacacgtgcactacgtattaatatatcctctcgagngntgtcgttagctgctgtgtncttttatagtagtaaggacggcgnaccnatatncgacatgagttngangagctgatngcagctganngactcactagtcagcgacgcatcatgccacgtacnncctantaccgtcacgcgtcagtcgatagatactcactatcnatcgntctactcatcatnatnatnagatcacccatttgctgncgctcgtagctgcagcancccngagtanttttagattangtagctcgcctacgtcgactcgcattcgnccgagtatcgtacgcagcgacannnnncgacangctgaacgtagnaggacagtgcgctgcgcagtcgatcncgacngagtgacgtcgacagacacacgacgnagcacgtctcgacagcacgtccactacttgatgtgatatntatgcagtatngcgctacgtctgcacatatgntatgtagctgttgtctgaagcgtgtatcggtagcagtggtgaactcatcacgcntcagcgaggcgtacgctcacaccgtacgttcattcacnatgcatctctcactctagcgtcgtcgtgctgcatcgccngagtcacgctcacantcagtgtgcgcacagcgtcgccaatgaagncgcacgtcgctgagaanatcatcggngcgtntacatacgtcactatagataccagtactagatgtgcgcgcagtagctagtagatcatcacaaacactacgacacantctccgtgttntctgatcgatgtttgctagtgcgacacatantcgttcacactgctgtgttatgcatgcatnctgtaacctagcctctcgcttatctaccattcacgactcgttatcatcactctcatgtgatagtctatcatatatatacttaagtacgattgcgncgtccggcgtcctgctttcgcataacnacactcgcgccacancgacatancacataatnacntatgtncatcntcacactcttcactacatctcactatactacacacaanattcataacagcaaacanccatctacaccacatcgtaactctacacagtctgtattgacccatcgagccacagnaggtagcggagacgctgctgagactcgcgtgatatgtcggcgtgctcggagatagtcgaggcgcgtgagagagatcgcgcacacacagacagatcatttatgtctatgaattgataaagtgatagatatgagttgtatgtgttagtgctgtatgactnatcaanttatcgtatatatttctgagtgttgttgtgatcgttatattatcgatttatgtgttcgtctgtctctctctcctctctatcgcnngcccaccctacctccgcccctgtggagatcttctgtgtgttcctgaccatcntcctcgacatatcacacactccagagcatatacacctcttcgctcaggagtggagagaagagaagagaacacacacgaacccccgccgcctgcaccccgcgcaccccactaatacaacgnaccntcgcccgtgcgcggcttggctccatcctctctttctttttctgtgcgtgggctgtgttatatggcgctctcttctcccctgctctcccactttatgctttccatttttattcgngncgtcagtctcgtcgcttgcccggcttcgctggttgtgtgggccnnggnncgtggggggnnngnggggtgggggggagcgnnnnacgngngattaggcgngnntcnnngngnannnnnccctcttctctctactcacccctatcctcc

SEQ ID NO: 2 - DNA, 553 bp, Glycine max
  misc_feature (2)..(2): n is a, c, g, or t
  misc_feature (23)..(23): n is a, c, g, or t
  misc_feature (25)..(25): n is a, c, g, or t
  misc_feature (30)..(30): n is a, c, g, or t
  misc_feature (33)..(33): n is a, c, g, or t
  misc_feature (54)..(54): n is a, c, g, or t
  misc_feature (64)..(64): n is a, c, g, or t
  misc_feature (69)..(70): n is a, c, g, or t
  misc_feature (74)..(74): n is a, c, g, or t
  misc_feature (77)..(77): n is a, c, g, or t
  misc_feature (84)..(85): n is a, c, g, or t
  misc_feature (101)..(101): n is a, c, g, or t
  misc_feature (106)..(106): n is a, c, g, or t
  misc_feature (113)..(114): n is a, c, g, or t
  misc_feature (123)..(123): n is a, c, g, or t
  misc_feature (126)..(126): n is a, c, g, or t
  misc_feature (133)..(133): n is a, c, g, or t
  misc_feature (143)..(143): n is a, c, g, or t
  misc_feature (150)..(150): n is a, c, g, or t
  misc_feature (153)..(153): n is a, c, g, or t
  misc_feature (157)..(157): n is a, c, g, or t
  misc_feature (163)..(163): n is a, c, g, or t
  misc_feature (165)..(165): n is a, c, g, or t
  misc_feature (167)..(169): n is a, c, g, or t
  misc_feature (172)..(172): n is a, c, g, or t
  misc_feature (177)..(177): n is a, c, g, or t
  misc_feature (185)..(185): n is a, c, g, or t
  misc_feature (193)..(193): n is a, c, g, or t
  misc_feature (203)..(203): n is a, c, g, or t
  misc_feature (206)..(208): n is a, c, g, or t
  misc_feature (210)..(212): n is a, c, g, or t
  misc_feature (217)..(218): n is a, c, g, or t
  misc_feature (220)..(220): n is a, c, g, or t
  misc_feature (222)..(223): n is a, c, g, or t
  misc_feature (230)..(230): n is a, c, g, or t
  misc_feature (232)..(232): n is a, c, g, or t
  misc_feature (243)..(243): n is a, c, g, or t
  misc_feature (266)..(266): n is a, c, g, or t
  misc_feature (285)..(285): n is a, c, g, or t
  misc_feature (288)..(288): n is a, c, g, or t
  misc_feature (302)..(302): n is a, c, g, or t
  misc_feature (308)..(308): n is a, c, g, or t
  misc_feature (315)..(315): n is a, c, g, or t
  misc_feature (326)..(326): n is a, c, g, or t
  misc_feature (340)..(340): n is a, c, g, or t
  misc_feature (356)..(357): n is a, c, g, or t
  misc_feature (360)..(360): n is a, c, g, or t
  misc_feature (362)..(362): n is a, c, g, or t
  misc_feature (410)..(410): n is a, c, g, or t
  misc_feature (416)..(416): n is a, c, g, or t
  misc_feature (439)..(440): n is a, c, g, or t
  misc_feature (492)..(493): n is a, c, g, or t
  misc_feature (513)..(513): n is a, c, g, or t
  misc_feature (530)..(530): n is a, c, g, or t
  misc_feature (535)..(535): n is a, c, g, or t
  misc_feature (540)..(540): n is a, c, g, or t
  misc_feature (542)..(542): n is a, c, g, or t
  misc_feature (546)..(546): n is a, c, g, or t
  misc_feature (553)..(553): n is a, c, g, or t
  Probeset Number=SeqID_9781
anaactccagcaaggcattgttngnattgnttngtgtacttgaaaatctcgaancgcttaattntgatnnagtnttncaccgcnncgcggaacctctttcnctaantggatanntctcaggtnagnggctcgnacgctgattncagcaanacncggntgtggntngnnntgnatgangccctatnctccggcnactccaacgncgnnntnnngatcnncncnnccgaccncnagtggtgggtncatggtccgcacctctcaccagnttttgatgcgcatgctcancgncgactccgccgccntacaantccttcngattcgttccncagtgcatcgccgncttcgggtccaccgcnntcnanaaggtggtgcgactccgcccgcaacattgtgctgggtccacgccctgntaccgncactggatggagaagatcactcnnatcagagagtacttcattaccgacctcaccgtcactcgaatgcacgatgccnnttgagattggtccatatcanattcggagtcggcgcgnatgtnctgcnanatgnagagagn

SEQ ID NO: 3 - DNA, 2229 bp, Glycine max
  misc_feature (1)..(1): n is a, c, g, or t
  misc_feature (38)..(38): n is a, c, g, or t
  misc_feature (58)..(58): n is a, c, g, or t
  misc_feature (65)..(65): n is a, c, g, or t
  misc_feature (68)..(68): n is a, c, g, or t
  misc_feature (74)..(74): n is a, c, g, or t
  misc_feature (79)..(80): n is a, c, g, or t
  misc_feature (98)..(98): n is a, c, g, or t
  misc_feature (111)..(111): n is a, c, g, or t
  misc_feature (116)..(116): n is a, c, g, or t
  misc_feature (121)..(121): n is a, c, g, or t
  misc_feature (125)..(125): n is a, c, g, or t
  misc_feature (177)..(177): n is a, c, g, or t
  misc_feature (185)..(185): n is a, c, g, or t
  misc_feature (205)..(205): n is a, c, g, or t
  misc_feature (221)..(221): n is a, c, g, or t
  misc_feature (239)..(239): n is a, c, g, or t
  misc_feature (246)..(246): n is a, c, g, or t
  misc_feature (250)..(250): n is a, c, g, or t
  misc_feature (279)..(279): n is a, c, g, or t
  misc_feature (381)..(381): n is a, c, g, or t
  misc_feature (456)..(456): n is a, c, g, or t
  misc_feature (504)..(504): n is a, c, g, or t
  misc_feature (511)..(511): n is a, c, g, or t
  misc_feature (532)..(532): n is a, c, g, or t
  misc_feature (549)..(549): n is a, c, g, or t
  misc_feature (567)..(567): n is a, c, g, or t
  misc_feature (573)..(573): n is a, c, g, or t
  misc_feature (589)..(589): n is a, c, g, or t
  misc_feature (625)..(625): n is a, c, g, or t
  misc_feature (627)..(627): n is a, c, g, or t
  misc_feature (645)..(645): n is a, c, g, or t
  misc_feature (703)..(703): n is a, c, g, or t
  misc_feature (711)..(711): n is a, c, g, or t
  misc_feature (750)..(750): n is a, c, g, or t
  misc_feature (775)..(775): n is a, c, g, or t
  misc_feature (829)..(829): n is a, c, g, or t
  misc_feature (847)..(847): n is a, c, g, or t
  misc_feature (888)..(888): n is a, c, g, or t
  misc_feature (895)..(895): n is a, c, g, or t
  misc_feature (897)..(897): n is a, c, g, or t
  misc_feature (914)..(914): n is a, c, g, or t
  misc_feature (1002)..(1002): n is a, c, g, or t
  misc_feature (1094)..(1094): n is a, c, g, or t
  misc_feature (1141)..(1141): n is a, c, g, or t
  misc_feature (1161)..(1161): n is a, c, g, or t
  misc_feature (1167)..(1167): n is a, c, g, or t
  misc_feature (1175)..(1175): n is a, c, g, or t
  misc_feature (1247)..(1247): n is a, c, g, or t
  misc_feature (1347)..(1347): n is a, c, g, or t
  misc_feature (1386)..(1386): n is a, c, g, or t
  misc_feature (1486)..(1486): n is a, c, g, or t
  misc_feature (1488)..(1488): n is a, c, g, or t
  misc_feature (1496)..(1496): n is a, c, g, or t
  misc_feature (1546)..(1546): n is a, c, g, or t
  misc_feature (1562)..(1562): n is a, c, g, or t
  misc_feature (1593)..(1593): n is a, c, g, or t
  misc_feature (1638)..(1638): n is a, c, g, or t
  misc_feature (1711)..(1711): n is a, c, g, or t
  misc_feature (1779)..(1779): n is a, c, g, or t
  misc_feature (1987)..(1987): n is a, c, g, or t
  misc_feature (1995)..(1995): n is a, c, g, or t
  misc_feature (2000)..(2000): n is a, c, g, or t
  misc_feature (2009)..(2010): n is a, c, g, or t
  misc_feature (2012)..(2012): n is a, c, g, or t
  misc_feature (2015)..(2015): n is a, c, g, or t
  misc_feature (2019)..(2021): n is a, c, g, or t
  misc_feature (2025)..(2025): n is a, c, g, or t
  misc_feature (2030)..(2030): n is a, c, g, or t
  misc_feature (2034)..(2035): n is a, c, g, or t
  misc_feature (2043)..(2043): n is a, c, g, or t
  misc_feature (2045)..(2048): n is a, c, g, or t
  misc_feature (2050)..(2050): n is a, c, g, or t
  misc_feature (2054)..(2055): n is a, c, g, or t
  misc_feature (2058)..(2058): n is a, c, g, or t
  misc_feature (2063)..(2063): n is a, c, g, or t
  misc_feature (2079)..(2079): n is a, c, g, or t
  misc_feature (2081)..(2081): n is a, c, g, or t
  misc_feature (2090)..(2091): n is a, c, g, or t
  misc_feature (2095)..(2095): n is a, c, g, or t
  misc_feature (2097)..(2097): n is a, c, g, or t
  misc_feature (2116)..(2116): n is a, c, g, or t
  misc_feature (2140)..(2140): n is a, c, g, or t
  misc_feature (2143)..(2143): n is a, c, g, or t
  misc_feature (2147)..(2147): n is a, c, g, or t
  misc_feature (2153)..(2153): n is a, c, g, or t
  misc_feature (2159)..(2160): n is a, c, g, or t
  misc_feature (2163)..(2164): n is a, c, g, or t
  misc_feature (2169)..(2169): n is a, c, g, or t
  misc_feature (2171)..(2172): n is a, c, g, or t
  misc_feature (2180)..(2181): n is a, c, g, or t
  misc_feature (2190)..(2190): n is a, c, g, or t
  misc_feature (2195)..(2229): n is a, c, g, or t
  Peptide Sequence Number=SeqID_6001
  Probeset Number=SeqID_9782
ntctaattcaataaatgcatgataatggacatgcatanacaaagtcattagaatggtnttgcatnacnacatgncgacnntgcatcgacttagcgtanggctgtattatgnagcgnactangaangcctattgcagtcatgaataacaccctaccacattgcttcagcttaactctncgggtcangagggctgagcgtctcagangcgggtaggcggacgncgcgccgtgatcgataanacgtaancaanatgatcgatactagtgatcaatcatgacntgtatgtctttccgtccatctctgctactctgctccatcctcatttatcccaaacatctgcacgtcgcgctgacacgctgcagctgctgctattacaatacnagactattcatcggcatcttcgcagccagtctctggtacactatactataagtaacacgagcatcaactgttgantactagatatagatgatacatgattgtgatatgaaagtattatcatantgagcgnagagtatgacagagagtaggngtattggagcgtgacancacgatgcatctgacttnactctngctcgtggtcgtatgngtgacgcagttcgcatcgactcgcgttcagtcgatnangtacatatcatagtcccntatgtcggtacggctagcagatatatatagtagcatatcgagttggactcgatatatngacagctnctcgtctatatctaggctctgcagtgctttctcacttcntcacatagtaccgtatcgtctcgcnagatatgagagcaagagacagatatagcgtgtagagtagattatatagaaaganttagatataacatatgantccgtgtgtgtatatagcgtggtgtgcggagcactcgaganttcctgngncgtggtcagctgtgagnatcgatcatgcggtctctacgatacgtagcatgactatatcgcagagacaccgcacgagcagatagtgatgatcggtgtggctgtgtnctcgtactcgtgtcgtgttgtatcatgtgggtcttgtgtttatgtgtctcgtgatatacactatgtcgatcatctcgtgtggatcgatatgngacgccgacgatgacagagccgagatctatccgatgccataagtcgnatgtatcacataccatccgncatatncctcactnatctattgcgctccatgcgtctcgtacgatataagagtatgataatgagacatcatgcgcgagctagcagancagctaggaacatcgtgcagatatataatctcaattgcacagtggagataggtacttactctagtataacactcgggaccgactccgaccacatcacatntgcgtgaacgtgctgcacagctgtgttggacgatctgcngatagatcatatcggactctagctgtgttcttatgcaggagtataataatatagtatagtattccatatctctccagagcgctcagtttgttacgatacncncttaatancacaaccatcgtggatagataaatcaacgcacacacgcacgacgacacanccacaaccacacgccncagcaacaacaacacactcacatacataccnacctccgactccatctaacaaatttaatcatatcatattaacagncgtcgtcacaggccatatcgcaacgcagagagaagcgactcgcccgcaccgcgcgcacacagccgcctcacanacgcccgactcccacaccacagacaaaggagagtgtgtctattgctcgcgttctgtgttctcgtgtgntatcatcactgaatgctctccctccgacacccataggactagcctctctcaaacgacatacccgcagacgagacactatctcaacacactagcatcttactcaccaaatccacacgaacaccctaacacactatcctccagcacctgttccacgcttgctactaccgtacactgtacccactaaacgtcgtgtcggcgctgacgtctncctgtggntgtcngtgttggcnngnccngggnnnccgncctcntctnngtcgtacnannnncnctgnntgnggcgngccgggcggaggtggngntggggtggnnggcngnggcggtgcggccggggcgnggggccggggctgcgcgcggcggngcntggngggcgncgcggnnggnnggggngnngggtgggnnaaaaaaaanttttnnnnnnnnnnnnnnnnnnnnnnnnnnnnnnnnnnn

SEQ ID NO: 4 - DNA, 1516 bp, Glycine max
  misc_feature (1)..(1): n is a, c, g, or t
  misc_feature (105)..(105): n is a, c, g, or t
  misc_feature (454)..(454): n is a, c, g, or t
  misc_feature (513)..(513): n is a, c, g, or t
  misc_feature (704)..(704): n is a, c, g, or t
  misc_feature (1047)..(1047): n is a, c, g, or t
  misc_feature (1264)..(1264): n is a, c, g, or t
  Probeset Number=SeqID_9783
nctctcgtctctaactccttagagttagaagtacgtgtagacatctcatggccgctctatcgcttatcatcatgacgcgatcaactgcatgacgacagtcacatnatagttatgtctagacgtctgtcgcagagctggtgcgcgacgtcagacagcgcgctgacgagcatgtcatatcgttacagcgctagagctcatacggctgaagttcacatacgcgtcacgcgtcgcaccgcacgacgaagatgatgacagatatattgtggacgtggtcccgatcgcagcgcgcatcggtaggtcggtgctggatcaactggcgatcgaccaagagtgcatacccgtccggtcgtacgtcgtgatgggcctcacgcattcagcattgcaaataatatatacgctatcgcgtctctgcatcgacgttaggctcatctatgagacgacaacgaggacacgngatagtaacatacactatactctatataggatggcgagcacgtcgctagtacatgatanggtatgacgacacttatgacagaacatatctatcgcggatgcagatgtttaagtagttatcaggtacggcagtctccagccatagagcgtagtcataatggcggatacgtgagcggtggttataggccgatatagttcttcgccgaaataagactcaccagttctcgatacatgattgcagcgctgtttgncgtataagcggcgtataggataactaaccgtgatctgtatagcgctcgcaggttgcgcgcgtcgcatcggcactgcgttctactctacagtcgtcagaaagttataacatgagacttggtatatagattagatagctcaaagcgtcgtatcattgcgcgcgatacagatgcagtacatttctaaatccaatcacagacttcgcggtgacgacggagcatacagctcagacacaaccaactcagacgggccgcggactaagtgagagaccagcctcctaggcccctagggcagcggtacgttgtgggtagagctgcaggtacggggtgttaggcgggatgactnggtgtgacagaattatcactccatgcgatgagatgcgaccctctggcggcgtaatgctcgtactcgaagatcctgtcgcggtctctgacggcaggtaacacagccacaaggcgagctgaactctcacaccatatacacaagatatcagagaattatataactcgactatacatcatcaccacccagaaacgcgcgctgataccgcaagcgctaagtnctgcacatatcccggtccggcatgaggagcgggcggtgggagacagatgagaggaaagaagcgcaaggccagtagcggggggagcgcaggcatagcaggataagaggggtgaggggaggaggggagcacctctccctgccctgcactccagaggagggcgcggcctcgctcacccacagacacacagaaaacgcataattcacgtgtatctatgtgttataacgtccactccctgcgtcggcgggaggcgcg

SEQ ID NO: 5 - DNA, 689 bp, Glycine max
  misc_feature (1)..(33): n is a, c, g, or t
  misc_feature (636)..(689): n is a, c, g, or t
  Peptide Sequence Number=SeqID_6002
  Probeset Number=SeqID_9784
nnnnnnnnnnnnnnnnnnnnnnnnnnnnnnnnngtggttcttttgcagcacatggtttagggacaccaaacgaccggaaatgggtcgtggggtcagtgctggtggtggacagagttccttggattatctctttggcagcggggtacctgccagcagtgcaaatggtgctcgcactcagaatgcaagtgctccttcaccaccggctgatatgcaaagtccagcgaccagcaccagcaccagcgcctgcacctgcagcagcagcagcacctgctcctgctccagcaccagcaccaagcaccagctgttaagcgatttccagctggaattcctggaagtcgtcaaaagcaattaccagtcgcgctggtgggcaaaactgcggcaactttctcactgatcgagccatcttccaagtgttcatgctgccccgggtgggggatcgttccttgtcattaacctctttgggggtcctccagggaactgattcatacctaccatgtgatgtatcatgtgtaaaatggatagtgttgcattgtgtttagaccagtggactttgtttcttgttcaattgaatctcttgacaatgttggtgtggcttgatggccaacctaagctgattcataggtttgttgttctgtnnnnnnnnnnnnnnnnnnnnnnnnnnnnnnnnnnnnnnnnnnnnnnnnnnnnnn

SEQ ID NO: 6 - DNA, 1095 bp, Glycine max
  misc_feature (1)..(1): n is a, c, g, or t
  misc_feature (658)..(658): n is a, c, g, or t
  misc_feature (1013)..(1095): n is a, c, g, or t
  Probeset Number=SeqID_9785
ntcattattatatttttaattagaatgtgactctttttaacttgttcattggctcactcttagaatagtaattttgatccataagcaaattagacatgatatgctcatttacgttaatgataactgactattgctaactatgttttgctgtctaccttctcttccattcgggtgacacagtactgagatgcttactgggtaacactttattaagctcttaaaagaagggtggtcatggcctctagaattctttcaactctacattatgtgtgttcttcttctgcctcagccacaaaacgatgtttaggcctatatagtcattggcagagaagtataagtggaattgctgcgtctgttggtgctgatgtggagcctagcatagcaccagtgccaattgatcaaagtcagcttctaattgatgggaaatttgttgatgcagcttctggttaatatcttaccttcatgaaaaacttttccaacttttgatcctagactggagatgtaaatgccaatgttgctgaaggagatgctgaagatgtaaatcgcgctgtccatgctgctcgcaaggcttttgatgagggaccctggcccaagatgacagcttatgaaagaacacgtataattttgcgctttgctgatttattggagaaacccaatngatgaagttgccagcccattagaaaaccaggggattattgggccaagcccttctaacagacccttgccaaaggtttggaaattcacccacggggtaagtacgcaatggttcccgatattatgccggttgggccggataaaattcaccggctaacagttcccgctgatggaccataccctgtccaaactttgcatgaaccaattggtgtagcagggcagattgttccttggaatttccccttcttattttttcaggaaggtgcacctcataacctgggtaatccgttgtaagaaaatgcagaccaaaccctttcgcccttatgtgtcaaagctatttcttgaagccagaattctcnnnnnnnnnnnnnnnnnnnnnnnnnnnnnnnnnnnnnnnnnnnnnnnnnnnnnnnnnnnnnnnnnnnnnnnnnnnnnnnnnnn

SEQ ID NO: 7 - DNA, 520 bp, Glycine max
  Peptide Sequence Number=SeqID_6003
  Probeset Number=SeqID_9786
ggcagcagctacttccaaggatatctcatccccatcgggggctggcaaggccgagaaactgggaccatcatccccagaagtgggaagggagagcatgaggaacaccgtcaccaagcaggtctcctcaagaatcccatggtacggcccaaaccgagacaagtacttgggcccattctctggcgagcccgcgccctacctaagcggcgaattcccaagcgactacggctgggacactgttgggctgtccgcagacccagaaaccttcgccaagaaccgtgaactcaaagtgatccactccaagtgagccatgcacggaaccttgggctgcgtcttcccagaggtgctggaccgcaacggggcgaaggtccgagaaaccgggaaggccaagggcagaacccacaccttcagcgagggggggctcgactacgtgggcgaacccagactgatccacaaccagagcaacctcgccatctgggccaaacaaaaaagcctaatggctgccgatgaacgataccgccta

SEQ ID NO: 8 - DNA, 1849 bp, Glycine max
  misc_feature (7)..(7): n is a, c, g, or t
  misc_feature (27)..(27): n is a, c, g, or t
  misc_feature (30)..(31): n is a, c, g, or t
  misc_feature (41)..(41): n is a, c, g, or t
  misc_feature (103)..(103): n is a, c, g, or t
  misc_feature (105)..(105): n is a, c, g, or t
  misc_feature (108)..(108): n is a, c, g, or t
  misc_feature (119)..(119): n is a, c, g, or t
  misc_feature (121)..(121): n is a, c, g, or t
  misc_feature (127)..(127): n is a, c, g, or t
  misc_feature (177)..(177): n is a, c, g, or t
  misc_feature (184)..(184): n is a, c, g, or t
  misc_feature (186)..(186): n is a, c, g, or t
  misc_feature (193)..(194): n is a, c, g, or t
  misc_feature (307)..(307): n is a, c, g, or t
  misc_feature (323)..(323): n is a, c, g, or t
  misc_feature (404)..(404): n is a, c, g, or t
  misc_feature (409)..(409): n is a, c, g, or t
  misc_feature (585)..(585): n is a, c, g, or t
  misc_feature (647)..(647): n is a, c, g, or t
  misc_feature (658)..(658): n is a, c, g, or t
  misc_feature (729)..(729): n is a, c, g, or t
  misc_feature (756)..(756): n is a, c, g, or t
  misc_feature (758)..(758): n is a, c, g, or t
  misc_feature (834)..(834): n is a, c, g, or t
  misc_feature (923)..(923): n is a, c, g, or t
  misc_feature (946)..(946): n is a, c, g, or t
  misc_feature (1106)..(1106): n is a, c, g, or t
  misc_feature (1187)..(1187): n is a, c, g, or t
  misc_feature (1231)..(1231): n is a, c, g, or t
  misc_feature (1249)..(1249): n is a, c, g, or t
  misc_feature (1254)..(1254): n is a, c, g, or t
  misc_feature (1295)..(1295): n is a, c, g, or t
  misc_feature (1383)..(1383): n is a, c, g, or t
  misc_feature (1449)..(1449): n is a, c, g, or t
  misc_feature (1472)..(1473): n is a, c, g, or t
  misc_feature (1516)..(1516): n is a, c, g, or t
  misc_feature (1525)..(1525): n is a, c, g, or t
  misc_feature (1554)..(1554): n is a, c, g, or t
  misc_feature (1561)..(1561): n is a, c, g, or t
  misc_feature (1584)..(1584): n is a, c, g, or t
  misc_feature (1685)..(1685): n is a, c, g, or t
  misc_feature (1692)..(1692): n is a, c, g, or t
  misc_feature (1756)..(1756): n is a, c, g, or t
  misc_feature (1792)..(1792): n is a, c, g, or t
  misc_feature (1807)..(1807): n is a, c, g, or t
  misc_feature (1813)..(1813): n is a, c, g, or t
  misc_feature (1831)..(1831): n is a, c, g, or t
  misc_feature (1835)..(1835): n is a, c, g, or t
  misc_feature (1849)..(1849): n is a, c, g, or t
  Peptide Sequence Number=SeqID_6004
  Probeset Number=SeqID_9787
aatcggngctgcgagacctctgtgtgntgnngtagtcgtgnggtattagtgcatgtacgtagacagcaatcagtagcaggtgctgtagcagtcgagcttatanantantaaccaatatntntaatanagctctactcatcttctcagagatgttaatagtcattatatgtacaagangaacatntngcgaganntctgatacgagaggacggatagacatgtatgcagtaattaatacactaactatagtactatacacgtactcacgccacacgcgatcgaaatatatgaagtacgcgtactcgtncactgcgtcactgcanactctatgtccatgcactactcatctatcgtcaccgcagctccgtcctgactatcactcgacctcgtactcgtcgacactncggtngcatcaactcagtgatctctgtgccggcgcacgacatattacgtgaggttgcggcacgagcgtggcagctggcacggtagtgatgatagtatcgcacagcacgctcgtgagactcgtacgtgacgacatcacacagcgtatacacaaacactagcatacaactgaacaacacacancgacccaacacactagactagaatcacacatcatactaacactatgaattcatatgataaanctaccacatcnatacacagagagatagcaacatacaccccatagacccacacaacgacgcaccgcgacgctcacgtagatgngacagacacatgaacacgcacagcgcngnacagtcgtgggactgcgcgagagagagcaatcgaccacacgtcgacgagcaaggacggcatagtcgtgtgcacgangcacgcactgttcactgatcgactggcggctacgtgcatacacgatgatgtcgtctcgcgacttactaatatgacagcgcagtcgaacncagctgtctgctccacacgcgantctgccgtcatcgccagatctcgctgttcatatgactgcaacaatacctcgccatccacgagcgtacacgatctgcgtcgacatcgaacacgcgcgtcactcgtctgtctggtactcagcccgccacgcacgagacaccaacgactgccctgatgtcgcntgtagtgtacagcgtgcgcaggcgctctcgtgcgcagcatagtgctggatgacaataacatcgatactgcatatatagcanttgacttcatgcagcacatccacggcttcagctctataccagantgcgatgcgatacgcaanatganctaatcgacctcacatactctctatgcagcgtacgtctcangatccacgactgtgcgatctgctcaactgagtctcatatctagcctctaactcagatcgtacgaccagagcggatcgtgatgtcatcntcactcgatgtactgatgcacgagcgcgcactctatgagtaatcacgtgacacgagtcacacgacnagcgcacgcacacggcatcaaanncatcgacgcagcttagctactcgtacccatcagtactacgtgntacacgtanctctaacgcatatcatcgatcattctcgnagcgtcnctaataacacattcgcataccgnggaatgacactacgtatcccaagtctatctctgtttgtgatatctgttgttgctacagcagcaatgcacgtacacagacgtaataatgatgatgtcatcangcacgcnagcgagcacgtacctacgcacgagatgagtgtatgatggtgatgtcgacgatgtgtaatagtantctatcagacccacatctcctgtctcacatgagtcntaatacgcactgtgncggctntacctaatgcagcgtgtnacanctcgaccgagcagn

SEQ ID NO: 9 - DNA, 514 bp, Glycine max
  Probeset Number=SeqID_9788
gtctgggtatcacacacacgcttctgcctcttcaaacggctcaacacagcagaggtacaggttacgactatgaccgacgacacaacaaaggcttctgctgcttacttagtctgcacatatcaatggctctgattctgcagccgctcatgacagtgaccacaacacccctgccaccgccaccacgaacaccacgaaactaatacaaatcctcaacaaccgaccactcccgcacaccacaacgatcgcatctgccacatacaacaataacggcaaaaataactacgataaaccccaaaacgaaaccgaagaacacacgttgataaagatgacacacaactcataaagaaaacgacgataataaacctcaaaaataacaatagacgatactggagtctctactgctgctaagctagatataaccgagcacctgctgtactgtcaaggacaggagtggtgcaaatatgaccaaagacgcaaaccagagatgactgataacaccggctaaaaagatatt

SEQ ID NO: 10 - DNA, 226 bp, Glycine max
  Peptide Sequence Number=SeqID_6005
  Probeset Number=SeqID_9789
ttttttttttttttttctttttttttaatccatgcataaactgtcctaaagatcacactgtgatacacactcttgagttccatcgtccgaaatctggagggtcatggcagtatttttctcaccaaaccctttcgtttcagagtccagaatcctgatggctattcttgtaaacacaaagcgttttacaacaaaattctcccaagtttctcagggttgagaaacaaat

SEQ ID NO: 11 - DNA, 1783 bp, Glycine max
  misc_feature (14)..(16): n is a, c, g, or t
  misc_feature (19)..(22): n is a, c, g, or t
  misc_feature (25)..(25): n is a, c, g, or t
  misc_feature (34)..(43): n is a, c, g, or t
  misc_feature (45)..(46): n is a, c, g, or t
  misc_feature (51)..(52): n is a, c, g, or t
  misc_feature (54)..(56): n is a, c, g, or t
  misc_feature (61)..(64): n is a, c, g, or t
  misc_feature (74)..(74): n is a, c, g, or t
  misc_feature (225)..(225): n is a, c, g, or t
  misc_feature (235)..(235): n is a, c, g, or t
  misc_feature (237)..(237): n is a, c, g, or t
  misc_feature (245)..(245): n is a, c, g, or t
  misc_feature (257)..(257): n is a, c, g, or t
  misc_feature (265)..(265): n is a, c, g, or t
  misc_feature (294)..(294): n is a, c, g, or t
  misc_feature (296)..(296): n is a, c, g, or t
  misc_feature (298)..(298): n is a, c, g, or t
  misc_feature (300)..(300): n is a, c, g, or t
  misc_feature (319)..(319): n is a, c, g, or t
  misc_feature (352)..(352): n is a, c, g, or t
  misc_feature (369)..(369): n is a, c, g, or t
  misc_feature (374)..(374): n is a, c, g, or t
  misc_feature (378)..(378): n is a, c, g, or t
  misc_feature (393)..(393): n is a, c, g, or t
  misc_feature (395)..(395): n is a, c, g, or t
  misc_feature (404)..(404): n is a, c, g, or t
  misc_feature (408)..(408): n is a, c, g, or t
  misc_feature (414)..(414): n is a, c, g, or t
  misc_feature (425)..(425): n is a, c, g, or t
  misc_feature (432)..(432): n is a, c, g, or t
  misc_feature (496)..(496): n is a, c, g, or t
  misc_feature (535)..(535): n is a, c, g, or t
  misc_feature (544)..(544): n is a, c, g, or t
  misc_feature (557)..(557): n is a, c, g, or t
  misc_feature (583)..(583): n is a, c, g, or t
  misc_feature (600)..(600): n is a, c, g, or t
  misc_feature (630)..(630): n is a, c, g, or t
  misc_feature (643)..(643): n is a, c, g, or t
  misc_feature (669)..(669): n is a, c, g, or t
  misc_feature (707)..(707): n is a, c, g, or t
  misc_feature (709)..(709): n is a, c, g, or t
  misc_feature (738)..(738): n is a, c, g, or t
  misc_feature (775)..(775): n is a, c, g, or t
  misc_feature (802)..(802): n is a, c, g, or t
  misc_feature (822)..(822): n is a, c, g, or t
  misc_feature (828)..(828): n is a, c, g, or t
  misc_feature (838)..(838): n is a, c, g, or t
  misc_feature (862)..(862): n is a, c, g, or t
  misc_feature (984)..(984): n is a, c, g, or t
  misc_feature (1066)..(1066): n is a, c, g, or t
  misc_feature (1071)..(1071): n is a, c, g, or t
  misc_feature (1099)..(1099): n is a, c, g, or t
  misc_feature (1113)..(1113): n is a, c, g, or t
  misc_feature (1169)..(1169): n is a, c, g, or t
  misc_feature (1210)..(1210): n is a, c, g, or t
  misc_feature (1238)..(1238): n is a, c, g, or t
  misc_feature (1240)..(1240): n is a, c, g, or t
  misc_feature (1255)..(1255): n is a, c, g, or t
  misc_feature (1262)..(1262): n is a, c, g, or t
  misc_feature (1268)..(1268): n is a, c, g, or t
  misc_feature (1293)..(1293): n is a, c, g, or t
  misc_feature (1308)..(1308): n is a, c, g, or t
  misc_feature (1320)..(1320): n is a, c, g, or t
  misc_feature (1327)..(1327): n is a, c, g, or t
  misc_feature (1330)..(1330): n is a, c, g, or t
  misc_feature (1443)..(1443): n is a, c, g, or t
  misc_feature (1449)..(1449): n is a, c, g, or t
  misc_feature (1467)..(1467): n is a, c, g, or t
  misc_feature (1534)..(1534): n is a, c, g, or t
  misc_feature (1571)..(1571): n is a, c, g, or t
  misc_feature (1575)..(1575): n is a, c, g, or t
  misc_feature (1654)..(1654): n is a, c, g, or t
  misc_feature (1656)..(1656): n is a, c, g, or t
  misc_feature (1668)..(1670): n is a, c, g, or t
  misc_feature (1679)..(1679): n is a, c, g, or t
  misc_feature (1697)..(1697): n is a, c, g, or t
  misc_feature (1707)..(1707): n is a, c, g, or t
  misc_feature (1745)..(1745): n is a, c, g, or t
  misc_feature (1773)..(1773): n is a, c, g, or t
  misc_feature (1783)..(1783): n is a, c, g, or t
  Probeset Number=SeqID_9790
ttttggtccctccnnnccnnnncanccccccccnnnnnnnnnngnntggtnngnnngcggnnnnggggcgggcncacctagagcggagggaacgggctaagaggactcgggcaatcatcacaccacgaacgccaccgctgcagtatctcagcactacatatcgctcacctatgtatgacgcatccgcacgcacgcagcgagatgcacgagagaaatatatcactntgtctcactnanacgatatntctctctctctntcccagtntatctctcgtctatgtatgtgtctaggtngntntngtgagtatctgtatatctntactgtctctgtctcgctgtctatcatccctcnctctcagtacctctatntcacncgantatcagtattatgtntntctatttantctntatgtntcatatatctntacatangaaagaaggaccacacggtgtctgagtcctactcaatacgagataatatacacatcctctagcntcgatcgtgtacactgacgcgctctacactataccacancacacagangcacaccagaagnatagaataagagagacataccgcacncacacagacgctccacngctgcggcgcggcaccacatgccccatagngtcgcacctcacngatcgagcactatcatcatcctgctngctgtgcgtcatcataagtacagcgaccctgcatcatncnctgccgtcacgactcccgctgcgcgcgcngcggcgactcatcgctgccatatgacgctccacgcgntacacacaaacgagagcagactacaanatgtcatgcctctgctccgnatgtcngcgtgggcanagtggatctcacaacgaggatcangtccaaggcgatactcgtagctcgcaggccacgcgacacgctactccccaccactcgtacacgcactgcacacgagaatgatcaagagacacacacgtcccgcgcgccacgaccgccacgcnccataacataatcactctcgacccgcatcccgccgacgccagaccgggcacgaagtaaagtgctctcgccacacatcacacncagcncgtcgtctccacaccgatacactctcantcgtctaccacccnagactctcatcatgcaccgaggtggactgcgacagctaccacatcaccgtatcgcnactcgacgctcacatccacaccatagctcgcgccgcagccnaaccacgtcgcgagaccatcgactagcncncacaacgcccgccanactaccncacccnccccgcctgctcgctctcactaccntcacgcgtcgcagcnccatgctgacgngatcgcngcnactatctcacacgagcctgcagatctctgcttccttcccttctgtcccagcacgcactctccagctctcgcgctcccgactccgaccacacgtcgcaccgcgtatatcaccgngtagcnccatcgacgacagcgccnactacgtaagacgaaactaattgattataatacaacgagacgcgactgcactcgccgccgcgctccngcgcaacacgacacatctcgcacaagaagacagaagnagcnagactactactgatcatccaacgtatagctatcacacagacacgaccgactgatcgagagcacgacaccaactccactnancactaccacacnnncagcactancgtcatcatacgacatangtgagatcgnaggatctagtcctgacaatcacacgcacgactcacacnacatctcactatacagtacatattaccngtgatctacn

SEQ ID NO: 12 - DNA, 1671 bp, Glycine max
  misc_feature (1)..(47): n is a, c, g, or t
  misc_feature (61)..(61): n is a, c, g, or t
  misc_feature (71)..(71): n is a, c, g, or t
  misc_feature (76)..(76): n is a, c, g, or t
  misc_feature (81)..(81): n is a, c, g, or t
  misc_feature (84)..(84): n is a, c, g, or t
  misc_feature (88)..(88): n is a, c, g, or t
  misc_feature (92)..(92): n is a, c, g, or t
  misc_feature (95)..(98): n is a, c, g, or t
  misc_feature (101)..(101): n is a, c, g, or t
  misc_feature (104)..(105): n is a, c, g, or t
  misc_feature (110)..(111): n is a, c, g, or t
  misc_feature (117)..(117): n is a, c, g, or t
  misc_feature (167)..(167): n is a, c, g, or t
  misc_feature (177)..(177): n is a, c, g, or t
  misc_feature (179)..(179): n is a, c, g, or t
  misc_feature (215)..(215): n is a, c, g, or t
  misc_feature (223)..(223): n is a, c, g, or t
  misc_feature (246)..(247): n is a, c, g, or t
  misc_feature (254)..(254): n is a, c, g, or t
  misc_feature (268)..(268): n is a, c, g, or t
  misc_feature (339)..(339): n is a, c, g, or t
  misc_feature (350)..(351): n is a, c, g, or t
  misc_feature (357)..(357): n is a, c, g, or t
  misc_feature (379)..(379): n is a, c, g, or t
  misc_feature (397)..(398): n is a, c, g, or t
  misc_feature (433)..(433): n is a, c, g, or t
  misc_feature (522)..(522): n is a, c, g, or t
  misc_feature (537)..(537): n is a, c, g, or t
  misc_feature (751)..(751): n is a, c, g, or t
  misc_feature (881)..(881): n is a, c, g, or t
  misc_feature (1064)..(1064): n is a, c, g, or t
  misc_feature (1109)..(1109): n is a, c, g, or t
  misc_feature (1314)..(1314): n is a, c, g, or t
  misc_feature (1333)..(1333): n is a, c, g, or t
  misc_feature (1352)..(1352): n is a, c, g, or t
  misc_feature (1399)..(1399): n is a, c, g, or t
  misc_feature (1433)..(1433): n is a, c, g, or t
  misc_feature (1524)..(1524): n is a, c, g, or t
  misc_feature (1542)..(1542): n is a, c, g, or t
  misc_feature (1575)..(1575): n is a, c, g, or t
  misc_feature (1578)..(1578): n is a, c, g, or t
  misc_feature (1585)..(1585): n is a, c, g, or t
  misc_feature (1622)..(1622): n is a, c, g, or t
  misc_feature (1671)..(1671): n is a, c, g, or t
  Peptide Sequence Number=SeqID_6006
  Probeset Number=SeqID_9791
nnnnnnnnnnnnnnnnnnnnnnnnnnnnnnnnnnnnnnnnnnnnnnnggtgttggtagatntagtgttatntgggntttgnttnatangttntgnnnnccntcnntgttnncactcncacacattctatgcattcattttatatcgcggaaggtggcctggtacagnctgcttgctncngtctcaccctctcaagcgcatcctagtatctatacnccacctcnacacctcgcccgtgcacacacanntaaagantcagagggtatctnatgcaaaaattaatcacagaacagcgagacgtgtacgtctagtcgcgttgcgtctttttttctaatttctnaatatcttgcnncgattnctcttgttattggtgtcttatncatcttatattgaccganntcatatctgttatctataccatctataaaagaaanattgtagatacgccgacataaaacataaaacacacacaaccccatcgagacaacttcatatgctcctctcatctatagacttcttcttnttcttattatatatntaactcttactaactacaagtaataaattaccattaatacctacataccactcatacccaacatcaatatatctcaactcactatatcatctgttgagtgtctaatttcaattattcctacttattcactcatatataaatgacgaacactcatgtaagtaataacatatctctctcgtgtaattaacctaagctcaatcttctactctatgancttgtagtgcggtgagagaggatatctaacatgggtgccgggtgagtgtcacaggttggtgtgtcttgatcatttgtgaatgtctgtgatgtgtgggtgcgctcgtcgactctcattagagtaaatatanaatcgactttcacgtgctgtatcaccaactcactggcgcacaactatgcactctctcagacggtagttgacatgactgcgcgcggccgaccacagtagcgccgctgcgcgccagtggcaggtggtgctcctaggtatgatatacatatttcgctctgacatcgatcatcgagacagcttcgcngcatcctatgctactctgggtggagtactgactacacgaccgtgnagactatgtagtaccacgaaatcactgattccgcctctagaactcttgagcgtcggctcacacagcaagacggaggactagcgccgtgcacgctcactgccatcatatgatatgattttgcggctgcgcgcgccaccatactcatgtaccttgactgaacgagacatacgatatacaacgatacactatacaagagcgactctcnacattatagagattacaangtaacatgctgcgaatggnccgatcgtagtcataacggcacagacgctgactagcgccaccacagntcatgtgctattacacacgacgctatcgctagcnccacgacgcgctagagctcgctgagatcgcttgtggtcgcgagtgacgccacccgtgcgactagctaggtgtggtgtgcacggagaggtgngagtcgcggtgtagtttncgtgcgagtgctgtgtgtcgcgcgccatcatgntgncgatgcntgtgagctgcttataccatggtatttacgagagctgngcacgcacatctatcatcgcgatgttactgagatgctctctcagctgtn

SEQ ID NO: 13 - DNA, 610 bp, Glycine max
  misc_feature (1)..(1): n is a, c, g, or t
  misc_feature (435)..(435): n is a, c, g, or t
  Peptide Sequence Number=SeqID_6073
  Probeset Number=SeqID_9792
naacgtctcgtcttgcttttaaataaaattgatcttgtgcctaaagaagctttagagaagtggctcaagtaccttagagaagaattacctactgtggccttcaagtgcagcacacaacaacaaagatcaaacttaagtgattgtcttggtgctgatactctcatcaaattgttgaaaaattactcaagaagtcatgaggtagcagaactgttttggaacacaaataccccctgtaattcatgtagtttctcttctagtcttatgtgatatttgttgcttatccattaattttgttatttctgtaattgtctgtttgattctagatcattcattgaaggtcttcacattcattttgctgccttgtatcgagcgatcaagaagtcgatcactgtcggtttgatcgctttgtcctctgttggtgagacctgcctactngcttacttacatcggttacatcgttctcaagggcggctgcgtcgttggtcacgcctattcctgcgcgatgctcttctgtactccatgccttgcagcttgcgaccgccctctgccatcctgcgctcgggtaccgctcgcgtatgttcctcgtgcctgattcttcacttgttgtagt

SEQ ID NO: 14 - DNA, 2049 bp, Glycine max
  misc_feature (1)..(1): n is a, c, g, or t
  misc_feature (39)..(39): n is a, c, g, or t
  misc_feature (41)..(42): n is a, c, g, or t
  misc_feature (79)..(79): n is a, c, g, or t
  misc_feature (81)..(81): n is a, c, g, or t
  misc_feature (145)..(145): n is a, c, g, or t
  misc_feature (172)..(172): n is a, c, g, or t
  misc_feature (174)..(174): n is a, c, g, or t
  misc_feature (301)..(301): n is a, c, g, or t
  misc_feature (304)..(304): n is a, c, g, or t
  misc_feature (330)..(330): n is a, c, g, or t
  misc_feature (381)..(381): n is a, c, g, or t
  misc_feature (400)..(400): n is a, c, g, or t
  misc_feature (404)..(404): n is a, c, g, or t
  misc_feature (407)..(407): n is a, c, g, or t
  misc_feature (412)..(412): n is a, c, g, or t
  misc_feature (435)..(435): n is a, c, g, or t
  misc_feature (449)..(449): n is a, c, g, or t
  misc_feature (494)..(494): n is a, c, g, or t
  misc_feature (508)..(508): n is a, c, g, or t
  misc_feature (529)..(529): n is a, c, g, or t
  misc_feature (577)..(577): n is a, c, g, or t
  misc_feature (645)..(645): n is a, c, g, or t
  misc_feature (682)..(682): n is a, c, g, or t
  misc_feature (767)..(767): n is a, c, g, or t
  misc_feature (770)..(770): n is a, c, g, or t
  misc_feature (788)..(788): n is a, c, g, or t
  misc_feature (836)..(836): n is a, c, g, or t
  misc_feature (838)..(838): n is a, c, g, or t
  misc_feature (912)..(912): n is a, c, g, or t
  misc_feature (942)..(942): n is a, c, g, or t
  misc_feature (944)..(944): n is a, c, g, or t
  misc_feature (959)..(959): n is a, c, g, or t
  misc_feature (989)..(989): n is a, c, g, or t
  misc_feature (992)..(992): n is a, c, g, or t
  misc_feature (994)..(994): n is a, c, g, or t
  misc_feature (1042)..(1042): n is a, c, g, or t
  misc_feature (1120)..(1120): n is a, c, g, or t
  misc_feature (1175)..(1175): n is a, c, g, or t
  misc_feature (1179)..(1179): n is a, c, g, or t
  misc_feature (1193)..(1193): n is a, c, g, or t
  misc_feature (1284)..(1284): n is a, c, g, or t
  misc_feature (1291)..(1291): n is a, c, g, or t
  misc_feature (1300)..(1300): n is a, c, g, or t
  misc_feature (1413)..(1413): n is a, c, g, or t
  misc_feature (1430)..(1430): n is a, c, g, or t
  misc_feature (1491)..(1491): n is a, c, g, or t
  misc_feature (1501)..(1501): n is a, c, g, or t
  misc_feature (1528)..(1528): n is a, c, g, or t
  misc_feature (1706)..(1706): n is a, c, g, or t
  misc_feature (1743)..(1743): n is a, c, g, or t
  misc_feature (1754)..(1754): n is a, c, g, or t
  misc_feature (1826)..(1826): n is a, c, g, or t
  misc_feature (1852)..(1852): n is a, c, g, or t
  misc_feature (2012)..(2012): n is a, c, g, or t
  misc_feature (2023)..(2023): n is a, c, g, or t
  misc_feature (2034)..(2034): n is a, c, g, or t
  Peptide Sequence Number=SeqID_6074
  Probeset Number=SeqID_9793
nctgtcgactagttgctgagtcagagcgcgtatgcgacnanngacatactagacgtcgtctgacgctgctgcactcacncngtaatcagcgatccgctcgaacacgctcgtccagtgtactgctaggataagtgacagtcccgancgatatagcgatgacgctgatgcgtangncgtctatcgcatgcactcatctaagatgagatagtttatagctatgagacatcgactgagtacgatcatcgtgagctgcgatcgctgtcggtttgagtgactcgagctgcacgatgtatcggtgatngtngatagcagcgagtcagcagttatgtnagcacgtctgatcggtgatatatctggcactgtcgctgtgcgatagcatgncgtggattcgactctcatntctnctnatcanatatactacatcgtcagacatcncatcgtagagacgntcgctgcgcgcgaactgacactcacaagtgtaagagtagacggantaagtatgatcgangtcatcacacacgatcagacncgatgacgagatgagaatacactgtccagatgcgtatgtcgcgcttcntcttgcgagtccgattatatctacgagtagttgatgcaaagcgctgcgtcgtacgaactcgaatcganccgcagacacgtcgtccatgatcagtcgcgacgacanacgtacgactcagtctcagtgcgcagtgccgatgatgtctatagcgtagttgctgggtatcagcatgcgcgtagtcctcgacgancgngtctagcctatctatatntatctataatcagacgacgccgtcttcagtaacactacagagtcgtcngntgcggcgcccgtgcgtatgactgagaagtcgattacgatctcgtacgatgtcagcgtcacgtagctacgctgancatcagatatgagcgcagtacgtgcgatgntntcatacgctgaacgnaccggtcgcgatcgtacagttcacatagcntgnancgacgatgatactactatatcgcgcagttacagtcatcagctcacgcncggtacgctcatcagatgacataacgatacagagcgtgagcgctgagcacagtctacgcactatcgctatgactacgntagtatgtggcacacacgcatcgctacatcactcgagcgcgactattatcatcancacntaccagccagctcnccaccactgactcgatctgctattcatcatacctctcctctctgtcgtctactcgctgcgtctcacgcgatcagcactctatcactgactntgcgagntaatatgtnttagtacgtcgtcatagggttgtgatagatcatatgtgatgagtatatatatgtcgcgtagcacgagcagtagaacgccgacgacacagcgccgtccacacgacacaccgtcncgcacagctacgcgcancacgacgccgtccgagagagtcgcgagagtggaggagtacggcgagcgcagactgacgcanacgcacgcgncacgacaacgagactacctatcaacanccgatcgatctcacgcatcacacgcataaatgagcaagtacacgatacgactacccaattatcaggaggcgcgcacgcgcgcacgacgaggtcgcacgcagccggtagtgctcctgcacgcgagcgcacgctgggtgtagtcgcgtcacgtcgcatgactcagatacctgcttgccgncgacacgtagcgtcagagcgtccatgcgaccgtgacnacatgtgcganacaagcttgtagtgagtcgagatccactctgtatcagctatcattatcactatctattatattatatcatanaaaacattatacatgtgctcttgtgnacaatatagatgacggtcacagcgcggcgcatacaatgtgtacagctcaatcaacaatagagagtagatagtagcagagatgtagacatcacacagagtatccctcgcagcacgcactccgcccccaacacactatgacatacaaactacacacgacagnacataaaacgncgtcagaacanaaaaaaaataaagaa

SEQ ID NO: 15 - DNA, 1565 bp, Glycine max
  misc_feature (1)..(2): n is a, c, g, or t
  misc_feature (24)..(24): n is a, c, g, or t
  misc_feature (41)..(42): n is a, c, g, or t
  misc_feature (69)..(69): n is a, c, g, or t
  misc_feature (71)..(71): n is a, c, g, or t
  misc_feature (110)..(111): n is a, c, g, or t
  misc_feature (132)..(132): n is a, c, g, or t
  misc_feature (148)..(148): n is a, c, g, or t
  misc_feature (186)..(186): n is a, c, g, or t
  misc_feature (196)..(197): n is a, c, g, or t
  misc_feature (256)..(256): n is a, c, g, or t
  misc_feature (401)..(401): n is a, c, g, or t
  misc_feature (477)..(477): n is a, c, g, or t
  misc_feature (545)..(545): n is a, c, g, or t
  misc_feature (568)..(568): n is a, c, g, or t
  misc_feature (570)..(570): n is a, c, g, or t
  misc_feature (764)..(764): n is a, c, g, or t
  misc_feature (904)..(904): n is a, c, g, or t
  misc_feature (913)..(913): n is a, c, g, or t
  misc_feature (1107)..(1107): n is a, c, g, or t
  misc_feature (1238)..(1238): n is a, c, g, or t
  misc_feature (1240)..(1240): n is a, c, g, or t
  misc_feature (1310)..(1310): n is a, c, g, or t
  misc_feature (1426)..(1426): n is a, c, g, or t
  misc_feature (1546)..(1546): n is a, c, g, or t
  misc_feature (1565)..(1565): n is a, c, g, or t
  Probeset Number=SeqID_9794
nnttcacgcctacatctcccaccntccccctcctttcactnnttatatcgacatatatgctgttgtctncnctccggctcgatctcttatagcatctatctcgaccgcgnnacaacagatcatcgcgtgtgntatctgagtaaagccnctcccttcgcatactcagtcgtatgattatgaccgtgnctcgtgagannaagacacagagcgagtatacatgtcgatagctctctactcgcgcgactgcgccgggcgnagcctgcgtcgcgcggtgtgtgcaccatagactctccgcttactatcgtgctcgttatctcgtccgttgtgcgcctcgcctcacgcccgccgacgacctgcggagtgtccctctgtttcttatcactccatccaacacatgagancgactcattgtgactgctctgattctcctctacctagacagatacataccaaccctactatatacagtgttggccncacgtgcacgcgtgctgcctctctcatcgtaagtacccatcctccaacatctgatgtgtatgtaatanattaacttcagatggcgtgatgngncatacacatactccagcatctgtaatcaacgcttgtatatctaccgatacaccacaccataatactctacatatcagcgtactctcatctctctgcgcgcgtccttatgtcgtgagcgcctctcgctgctccgccgcgcgtctctctttatattattatcatcgataatgctatactctacactcatcgtcctngaacgatgctatatagtgtctcgatacatcatacgctcatctcatccacggctcggtccggcctcgtgaggtgtcttatgcatctttcatacataatcgtatattgagtaatggtcgtgctgacatgacaggcacacgcncgctctgtntctatcgtatagccacatgctcacttgcggatgactctacattcttgtcagacgaggatgcgcagcagctcgcgactggcgcctcgcactcgctctcgccagcgcgtcggcgtctgacgactgattacgttactaatcgtctatgtagcaatgttagtcgctcacaggctcgatcatgtagaagcagcacgcantcgagatgacaccccgcacgactcggataccgctagattgtatagacaacctaccggtagtcacagccgagggattgtacttagtgacgtgctactacggatcgcttatcctagtcaacaatgtgacacgncncgatagggagataatacactctcatactcacatctggttagactttatcgtgacatacgtcttgtgtcgnatgtgttagtcgatgatgtcgcttcatgacatacagctgcatgagcacttcgcgagcgcagattcgacgagagagtagaactgcgcgcttgagccgatatgatgtgtgtactgaangccactcgatatacatctagtggtaccgccctaccaccacatcgtgactgaggaagcgcgtactatgatatcctggttgtagctactcaatgtgcgcatcagagctgctgacacgatcanctgcgcgcactcaccattn

SEQ ID NO: 16 - DNA, 415 bp, Glycine max
  misc_feature (298)..(298): n is a, c, g, or t
  Peptide Sequence Number=SeqID_6075
  Probeset Number=SeqID_9795
gacaaatcgcacgggcggcgcgcggcttagctgtattgcactgtccaccaccgccagcatcaaatatctccggcgagagtttccgcgatatttgtttctttccagagagttttccgggaagggggaggaggaggagcggcggcatggtgttcttctgcttcctggtggaccagcggcggaaggtgcggagcagcaagccggcggcggggatctgctcgcggtgcggcggctgcgccagcgtggcggacatggagacggccacgcggctctgctacctcctcaccgtgcaccgcgtcancctggcgcgccatcatctgcaccttctgcggcgctatgctcaagtcctaccgccactacaggctctactaggccggcggccgacgctgattgatctgcgcgcgcgacggacggccgg

SEQ ID NO: 17 - DNA, 1662 bp, Glycine max
  misc_feature (1)..(1): n is a, c, g, or t
  misc_feature (12)..(16): n is a, c, g, or t
  misc_feature (19)..(27): n is a, c, g, or t
  misc_feature (29)..(32): n is a, c, g, or t
  misc_feature (36)..(43): n is a, c, g, or t
  misc_feature (45)..(46): n is a, c, g, or t
  misc_feature (55)..(55): n is a, c, g, or t
  misc_feature (59)..(59): n is a, c, g, or t
  misc_feature (63)..(64): n is a, c, g, or t
  misc_feature (70)..(70): n is a, c, g, or t
  misc_feature (72)..(72): n is a, c, g, or t
  misc_feature (93)..(93): n is a, c, g, or t
  misc_feature (95)..(96): n is a, c, g, or t
  misc_feature (99)..(99): n is a, c, g, or t
  misc_feature (107)..(107): n is a, c, g, or t
  misc_feature (112)..(112): n is a, c, g, or t
  misc_feature (114)..(114): n is a, c, g, or t
  misc_feature (116)..(116): n is a, c, g, or t
  misc_feature (123)..(123): n is a, c, g, or t
  misc_feature (125)..(125): n is a, c, g, or t
  misc_feature (132)..(132): n is a, c, g, or t
  misc_feature (139)..(139): n is a, c, g, or t
  misc_feature (149)..(149): n is a, c, g, or t
  misc_feature (163)..(163): n is a, c, g, or t
  misc_feature (176)..(177): n is a, c, g, or t
  misc_feature (194)..(194): n is a, c, g, or t
  misc_feature (198)..(198): n is a, c, g, or t
  misc_feature (206)..(206): n is a, c, g, or t
  misc_feature (215)..(215): n is a, c, g, or t
  misc_feature (230)..(234): n is a, c, g, or t
  misc_feature (241)..(245): n is a, c, g, or t
  misc_feature (248)..(250): n is a, c, g, or t
  misc_feature (253)..(254): n is a, c, g, or t
  misc_feature (256)..(256): n is a, c, g, or t
  misc_feature (261)..(266): n is a, c, g, or t
  misc_feature (268)..(270): n is a, c, g, or t
  misc_feature (272)..(273): n is a, c, g, or t
  misc_feature (360)..(360): n is a, c, g, or t
  misc_feature (366)..(366): n is a, c, g, or t
  misc_feature (371)..(371): n is a, c, g, or t
  misc_feature (391)..(391): n is a, c, g, or t
  misc_feature (478)..(478): n is a, c, g, or t
  misc_feature (502)..(502): n is a, c, g, or t
  misc_feature (504)..(505): n is a, c, g, or t
  misc_feature (639)..(639): n is a, c, g, or t
  misc_feature (659)..(659): n is a, c, g, or t
  misc_feature (690)..(690): n is a, c, g, or t
  misc_feature (727)..(727): n is a, c, g, or t
  misc_feature (1299)..(1299): n is a, c, g, or t
  misc_feature (1455)..(1455): n is a, c, g, or t
  misc_feature (1472)..(1472): n is a, c, g, or t
  misc_feature (1503)..(1503): n is a, c, g, or t
  misc_feature (1614)..(1614): n is a, c, g, or t
  Peptide Sequence Number=SeqID_6076
  Probeset Number=SeqID_9796
nttttttttttnnnnnttnnnnnnnnncnnnnttcnnnnnnnncnnctcttctcnctcncctnntccccncncccctccccctcccttttccncnnccnccccctcnctccncncnacctctncnctctccnactctcncccccctgcncctcctccctcccntcccccactcctnncccctctctccccaccncccnccctcttncccttttantcgcccgcgcgttannnnnctacccnnnnnacnnntcnntnctttnnnnnncnnntnntaactgtggagattctagcgactgcactgactatactcatgtaggtgagtgatatgagtctcagtattagttagcgtctacgtcagnagtcgnagcantgactctctattatatggtntataatgatgacgttgtgagatgctgatgatatcaactagacgatagtagagtcgaccgcgctgatgacgcgagtatcgtcactaanatttacgtatatgtattattattngnnatagaagtgtctgtagatcatcacgatatgtagtgatcgctcgtggatattatattatgctcactctcagtttattgtcatgtatgtatctgctgttgatatattatgatagtgcgaatattattatcgttgtnatgtgtgcatttaactgatntctcatttatatatgttggtatagttataantgtgtgtcatatcgacgtgagacgtgtcttgtgtagnatatatatgaagtatgatagacgatgtgcgtactgcacgatagatggcaacggcgatgacgtgagttacgtgcgatatgatgtcacattgagtgtcgcgcgctgtgacatacgctgagtgccaggcgggtgataggcaatagtataatacacacagcgcttatgtattggagacggttgtattgtatttactattatagtgacagatgccgtgatgaatagactattgttatactaataatgtagtacacacattattagagtaaactatccacgtatacactcaacacaatatatataatattgatagcacactgcgtgtcgcgtggagatatattactgtatgtgatacacgttggtgttactggctgtcggagcgtgcgtgtactattatatattactgcatgcaatgtaatgtaatctctgattgcatgatatactatatataacgatgcgactatagtatagtgatgtatagagtaagaagtctagtgtgttataggcgtgtagttatatgatacgctgcatttgaattatcatatatgtgaatatctggtgttgatagtgatatgngtagaggtcgggtgtgatagtattacgcgatctagtcgaactgaaatatatctcgtgtcgctcgcgaatcacatactgtatagttaatatattctatagttgtatgtgtgagtcgagtagtgtgtgtgatgaatgtagtcgtgtgtattgacggangttcgtattgtagagancgagttacggagatatagagatgctgacaanttgatgtgtcgatcgcgtctcagtagtgcacgctatagtatgaacatgtaagagtcgtcgtagtggtgtacatcggtatatagcgaacgaatatagtcgtcgtcgcactgngcgcgcatccgcggcgagcagcgtaatgcattcttatagaaacgcgag

SEQ ID NO: 18 - DNA, 1355 bp, Glycine max
  misc_feature (1066)..(1066): n is a, c, g, or t
  misc_feature (1335)..(1335): n is a, c, g, or t
  misc_feature (1355)..(1355): n is a, c, g, or t
  Probeset Number=SeqID_9797
tctattgaagtattatgcagcgcctcctgtgctcagacgatacgcggtatcgcgggacgcttttctattatacgctccgccgcaacaactactataggcaattatagaacgagatattcccccccgcccccgcgcccgctgtctccattattgtgccctcccctttaatttccaggatgtagtaaaggagaggtgatgcccgcgacgtacgccgccccggcttctcccgcccctatttttttaatgcaccctagggatagacaaggacccccggctgataaacccccggctttgccgccgttgtgttcccgtcgtgtttcatgttcttatccacgccggatgctttcgcgttgcgctttcgattattgacggttaagcacccacgggcctgaatacaatggacagtgacgctcgttacctcccgcgtaattttatagcgatcccactgcaacttactttactatctgaatcccatatactggatcgaatttgctcatgcgatgcgggcagatttctgacggttgccacatgtgtgacgcaagggcctggaccggtgagtcggcgcgtgggtgagtttatatgctgtccgcttctgatgcgctgctgcggccgatagtatacgtccgattaggcgcactcatctgctcgacggacaatctaatgccacgtcggacatgtcggacgaccgtagtcttggtatcggctcggaccgcatatacacggtacggcgtgtgtaacgatggccaggggtatctcgtcgcacttgatatgtagtaatagtgatgttacatcactagttacactgccactctctcctctgacttatcttcatatgagccgcggtcccagcgtggtttgttgtgtgcatagacggcggagagtgtgcacgagcaggagtgcgcacgtcaggtccacactttattataagcatgcgcgaccgctgtactccacaggcgctcgttatattattcatacctgccgagctactctcgcccggcctgccctagtctctcgcgagtacaccgccgcgccagctctactgcagcacatatcctatgatataaantctatccacatctaaaacgacagagcgtgttggtccgtcagcactgtggcggacgaggggtgtgttgttattgatactgctcgtgccgaatacgatagctggtgcactatatatatatactttctcgaacgatagtacagtacgcagcgccgtacaatgaactggacgctgctgcgctcgtctcttcaatgagactcgtgagtacgtggcggcgtgcgtcacgcggacgagtactcgcctgctcttcagttctctctgtacgagctcantgtatctagtgtgcactgtn

SEQ ID NO: 19 - DNA, 1747 bp, Glycine max
  misc_feature (77)..(77): n is a, c, g, or t
  misc_feature (94)..(96): n is a, c, g, or t
  misc_feature (135)..(135): n is a, c, g, or t
  misc_feature (416)..(416): n is a, c, g, or t
  misc_feature (418)..(418): n is a, c, g, or t
  misc_feature (432)..(432): n is a, c, g, or t
  misc_feature (974)..(974): n is a, c, g, or t
  misc_feature (1009)..(1009): n is a, c, g, or t
  misc_feature (1012)..(1012): n is a, c, g, or t
  misc_feature (1034)..(1035): n is a, c, g, or t
  misc_feature (1065)..(1065): n is a, c, g, or t
  misc_feature (1151)..(1151): n is a, c, g, or t
  misc_feature (1213)..(1213): n is a, c, g, or t
  misc_feature (1223)..(1223): n is a, c, g, or t
  misc_feature (1236)..(1236): n is a, c, g, or t
  misc_feature (1238)..(1238): n is a, c, g, or t
  misc_feature (1240)..(1240): n is a, c, g, or t
  misc_feature (1242)..(1242): n is a, c, g, or t
  misc_feature (1254)..(1254): n is a, c, g, or t
  misc_feature (1306)..(1306): n is a, c, g, or t
  misc_feature (1344)..(1344): n is a, c, g, or t
  misc_feature (1371)..(1371): n is a, c, g, or t
  misc_feature (1392)..(1392): n is a, c, g, or t
  misc_feature (1404)..(1404): n is a, c, g, or t
  misc_feature (1430)..(1430): n is a, c, g, or t
  misc_feature (1473)..(1473): n is a, c, g, or t
  misc_feature (1493)..(1494): n is a, c, g, or t
  misc_feature (1537)..(1537): n is a, c, g, or t
  misc_feature (1581)..(1581): n is a, c, g, or t
  misc_feature (1606)..(1606): n is a, c, g, or t
  misc_feature (1664)..(1664): n is a, c, g, or t
  misc_feature (1723)..(1723): n is a, c, g, or t
  misc_feature (1747)..(1747): n is a, c, g, or t
  Peptide Sequence Number=SeqID_6077
  Probeset Number=SeqID_9798
gaactagcgcgcgtacgcggtggtaagatgaggtcgtgtgctgggtctcgctgcgcgcttctcccacatacaggccntagatgctagaacgagnnngggaggctgtacaagaacggagcaagactgcgcacgcgncacgggctcgagtcgtgaggccggtcgtaactcaggagaacgtgagcgtagagaatacactcgctcgcagagacataggcgagaggcagatagagagatctctctctgctgtgtgtgtctctgtgtgtctgttgcactgtgcgtagtacgacatagctaggtgtgctgcgcgtgactgagtgaggaatgtgcatgcagatgtatgtatgtactcgtgtgagcatgggaggtatactatctcatgctgaagcgaccctgcacatcagttgcgcctcgaactntnccctcgtagagcgnacagctcggcggcgtctctgcggcgacaccaccagctgtggactgtgactgtcatctgatgtccagcagtggcacgtatctacgcagcttagagacgacggtaatctgtgacagtgtcgcctacatgctaattgtcgcgtctgtagcctcgagagggaacgccgtatcagatcaatcttctcttcgtctcctctctagtccagaagattagagaactagtcgtccccttctcgagcgcacacaagacggtagtacgacgagcatagcacacccagctcctacgattatcatcacctggcgaattcgagacggcagccgtcgactcagatataagcacatgtcgcgataagacattactcagctacacaggtacaactgtcgtcttcagtgcaacctctcctcacggtgtagctgacagtgcaatacgacgcacggagtgtatctctactcgcttgagctgtgcggtcatgagtggtcatgtcagagcggcagaggatcgatcctccacatcacagcagtcacatctgactataagatacgangtgaagagcatatatagatagagattattgttgtntantcaagatagttcttccccacanncccatacctcccactcgaccaccgataacnctataggcttctatgtgtatcatctataatctgactcgtctcacactcgctgagctacatcgacatacgaatcgcagcatcacggngcacatcgagcgcgcgccatactcgagcgtgcacactggctagagagcgcgacgcgagacantcacatcatnctggatgtgatcntntntntcgtaccgtctngtcactgcactcgatctctccagcaacgagtagagatacagaacgacagaanacacacacaacccctctcgatgcgatctactagaccgntcgcttgtcattccttgcgagaatgcncactatgcatgcgacagcggnttacttgtcacnatcagcgtaaattatcgatcactcantgactcggtgtgtactatatagacatcgatgtatcatgtagtngaatccagtataacatatcnnttctgctgactctaatcatatatacatctcatataccacactntgcagctactcacacaatactgcctaactactagacgttgctcnttacatacgatgagacagcatcacntacactatacatatagcgacatgactcatgcaacatacgggagcgagatgtgtatccngcgctctatcgagtgcgactactatgcgcacagaactgagtccccgtctcacgtacgcnctatcaccgatacgtatcgcgatn

SEQ ID NO: 20 - DNA, 1376 bp, Glycine max
  misc_feature (1357)..(1357): n is a, c, g, or t
  Probeset Number=SeqID_9799
accaccactttggtccacctttggaacgatggtcctgtgtcttcggctgcccccgctgtgctggcggtgtctgctgcccgctcccgccccaagggcagcgtggttcgtctggcgggctcctctccagcccctgctgggcattcacttcgtggaacatgccacgcccctgagtgcactgagtggtgggagctgggtgagggtgagtgccattgtaccctggaacgctggctgttcttaataggggtaattcctgcaccgcttgcgcggtaagccccttgtgtctcgtgggcctccgtaatctggtgaggctggtgtcgcctacgtggatgtcacatgtcgcaacttgccctgcatcctctgacattgacgggcgtggcgcccgccggcgccaccgtctcaacctcttcgcccgtgatatcgtttacctgcttccgatccttccgtatcgccctgctacaactgcaaaaactgcatgttttggatagccttgtaccacgctggaagagttgcaccacactagtgagtaggcatggttgtcgtcttccagcacgggcttggcgtttacccagccgagcgctgccgctccggccacctcgtcctcccacacatgcacctcctacacccacttggacggtgccatctgctctcactcccatgtctgctagaacccctaccatcacagaaacgaacgccactgacgacacaccctacaaccactggcattccccaactttccttcaacctccaaacgacattagtgaaccttcctgtcggaccgccggaccatttaggaaatcaccaaaccaaagctatgactttagcacaaaatactgtacgatgctcgttccatgcaacattccctatcataactttgcattgttcattcaagagaaggacccgaaactcgatgaacgaagcaattcgccttcttccattagtgaggtctgagacgggcagcacatagaaagaggagatgtagtcaccaggtattcttggatgtgattgcagtacccatctcaaccttggctccgctccttatgaggttccccgcacaacccaaaaactagctatatgaccaagagcagtttaaacaaagaacaaaagcaatcgcacatctacatttcgtgatacaagcttttcaactaaaaataggatcagacataaagcaaaataacagctttcaggagtacaaggctctcttcagccaatcaaccagttgcacatcgtgctagttagtgttattctggcctgtcatgcggggaaggggcgtgcacatcgcggagcctcctatgtacctctgttgtggcgcagttgcttgtgatgaacgcttgcgcggcgcagactcgaatcttggtgncaagtacccttttcaggat

SEQ ID NO: 21 - DNA, 1459 bp, Glycine max
  misc_feature (17)..(18): n is a, c, g, or t
  misc_feature (42)..(43): n is a, c, g, or t
  misc_feature (57)..(57): n is a, c, g, or t
  misc_feature (59)..(59): n is a, c, g, or t
  misc_feature (77)..(77): n is a, c, g, or t
  misc_feature (86)..(86): n is a, c, g, or t
  misc_feature (110)..(111): n is a, c, g, or t
  misc_feature (121)..(121): n is a, c, g, or t
  misc_feature (154)..(154): n is a, c, g, or t
  misc_feature (177)..(177): n is a, c, g, or t
  misc_feature (186)..(186): n is a, c, g, or t
  misc_feature (227)..(227): n is a, c, g, or t
  misc_feature (246)..(246): n is a, c, g, or t
  misc_feature (248)..(249): n is a, c, g, or t
  misc_feature (327)..(327): n is a, c, g, or t
  misc_feature (365)..(365): n is a, c, g, or t
  misc_feature (446)..(446): n is a, c, g, or t
  misc_feature (575)..(575): n is a, c, g, or t
  misc_feature (779)..(779): n is a, c, g, or t
  misc_feature (863)..(863): n is a, c, g, or t
  misc_feature (876)..(876): n is a, c, g, or t
  misc_feature (925)..(925): n is a, c, g, or t
  misc_feature (931)..(931): n is a, c, g, or t
  misc_feature (949)..(949): n is a, c, g, or t
  misc_feature (975)..(975): n is a, c, g, or t
  misc_feature (977)..(977): n is a, c, g, or t
  misc_feature (1124)..(1124): n is a, c, g, or t
  misc_feature (1325)..(1325): n is a, c, g, or t
  misc_feature (1346)..(1347): n is a, c, g, or t
  misc_feature (1409)..(1409): n is a, c, g, or t
  misc_feature (1431)..(1431): n is a, c, g, or t
  misc_feature (1456)..(1456): n is a, c, g, or t
  misc_feature (1459)..(1459): n is a, c, g, or t
  Peptide Sequence Number=SeqID_6078
  Probeset Number=SeqID_9800
atgatatatagtgtttnntagctattgtctctttctcgcganncataaacaaacggntncgaggacacgagagcttnttttcctcnctcctcacgcgctacgagtgtttnntgctcatatnttgccgcctcctccgcacttgcggggctatatngtagattttaacgccctcctttntatctctanttaatgacagagacaaagcagacgtcataataacagcgtgncggggttcatagcagtctncnntctactccccgcgtcgctgtatgattatatgaaggtatatgtggggtggtgcataatgtcgtcgtcactagcgcgtgnctatcctgcgcgattacttcatctcctttgtagtatcntactacgggcctgtctgtagatactatacacatcaccagagatcatcatcagagttatcaggtatatgaattaatatgaantactttagtgcatatgatctcgagacatatatattgatcgcgttctatgtgtgtctctatctctctcatactgaccgccgggcgccacacgggacgtcgtcacgaagcgagcagctgtcagccggccgngtttacgcggcgccgcgcgagcgagatgagcacgcccagactctgcaccgcagcacaatacagatcatacgtcgtcgtgagtagtgtctcacgcgcagcatacttatgatagatataagagatctatatatgtataatgtatggataatatattaagagatgtatagttaatatattggatatagtggagcaaaaacgataacnaaaccagcttcccccaccctcccacccaccactcctatattgttatttggtactcgctcgctcactcccctcctcgcagtggtngtgatgtgtgttnggtgtttgatggggtgtgtatataatgtagtagataggctgcagagacnattcanacgaggccggtacaaaanagatcagagacaatatcttcaccacncncactctcaaccacgcgcggtacaacgataagatgagagcgggggggcgggaggcgcggtcgcgcgtgtcactatacacatgtggagaaggccggctatatattactatatatatcgcgggggtgacggtgtggttgtgcaacagcancgtcacgtggtgaagaaggaatggggtgagatagacgcatgtcgtggctggccgcgtctatgtgtgttgtgtagttcgaatcatcagaatatatcacacatgacatccaccaacggagcgcgataagacacctcactactcttgcggactctacggtgccaacataagacatatacagatatactagacgactaggttgcncaccgtatgctctctgtactnntacataaaatatatacaccacaccaaatatatgatgcaagagatagagcgacgatgtggggnagcagaagcacgacaatagatnagtatataatctaccgacggatganttn

SEQ ID NO: 22 - DNA, 625 bp, Glycine max
  misc_feature (17)..(17): n is a, c, g, or t
  misc_feature (50)..(50): n is a, c, g, or t
  misc_feature (132)..(132): n is a, c, g, or t
  misc_feature (285)..(285): n is a, c, g, or t
  Probeset Number=SeqID_9801
gctattggaatgagggngcaagcttacttgtatgatggctactgagtagnaattggtacaattgaggctttctataatgcaaatctgggaattactttttagcctgtgcctgattttttttggggggatcgntcatttttttttctcacccaaccacgatatttgcctccctctaagaggcgggatgctgatgtcactgatagtggcattggtgaacgatgtgtgattaagaactgcaaaattcaccattctgagagagggctgagaacttgcatatctccctgngcaagggtggtggacacgccatcaatgggggcagattataacaacaccacaagctgataggaggatgctggctactaaatgcagtgttccaatggggataggcaggaactctcatatcaaaagggcaattatcgacaagaatgctcgaattggggaaaatgtcaagattattaacagtgacaatgtccaagatgctgcaagggaaacagatgggtatttcataaaaagtgggattgtcacactaatcaacgatgctttaattcctaagggaacagtcatctaaacaccaacaccaccccaaaaaaattgcttgtaccccaaatcctaatggggactgcaa

SEQ ID NO: 23 - DNA, 1610 bp, Glycine max
  misc_feature (25)..(25): n is a, c, g, or t
  misc_feature (29)..(29): n is a, c, g, or t
  misc_feature (128)..(128): n is a, c, g, or t
  misc_feature (177)..(177): n is a, c, g, or t
  misc_feature (203)..(203): n is a, c, g, or t
  misc_feature (395)..(395): n is a, c, g, or t
  misc_feature (417)..(417): n is a, c, g, or t
  misc_feature (539)..(539): n is a, c, g, or t
  misc_feature (592)..(592): n is a, c, g, or t
  misc_feature (776)..(776): n is a, c, g, or t
  misc_feature (862)..(862): n is a, c, g, or t
  misc_feature (865)..(865): n is a, c, g, or t
  misc_feature (867)..(867): n is a, c, g, or t
  misc_feature (870)..(870): n is a, c, g, or t
  misc_feature (873)..(873): n is a, c, g, or t
  misc_feature (875)..(875): n is a, c, g, or t
  misc_feature (891)..(891): n is a, c, g, or t
  misc_feature (1107)..(1107): n is a, c, g, or t
  misc_feature (1119)..(1119): n is a, c, g, or t
  misc_feature (1137)..(1137): n is a, c, g, or t
  misc_feature (1153)..(1153): n is a, c, g, or t
  misc_feature (1301)..(1301): n is a, c, g, or t
  misc_feature (1335)..(1335): n is a, c, g, or t
  misc_feature (1353)..(1353): n is a, c, g, or t
  misc_feature (1428)..(1428): n is a, c, g, or t
  misc_feature (1434)..(1434): n is a, c, g, or t
  misc_feature (1447)..(1447): n is a, c, g, or t
  misc_feature (1555)..(1555): n is a, c, g, or t
  misc_feature (1571)..(1571): n is a, c, g, or t
  Peptide Sequence Number=SeqID_6079
  Probeset Number=SeqID_9802
ctggtgtcgtatctacgggtacgcntgantaggttgtgtgagtcacgatagcactcgacgaggttgtgttgttcatctactgacgggctcgcgacgccacagcatgcgcatcgtgtgatgacgagcangacaagcacgcaggcacacgacacagacagtgagaggaagtgacacaanagcacagacaagcagcacagtattangatatagagcaagagatgatgttgttgtgatgtgcaccgcaagagtcacacagaacgcgcagatagtgagagagagagagtagatacagatcgtatatagtacgtgtgtagtagacaacgcaatgtatgtgtatatatgatttagatatatataacacgcacatgcgggtgcgtgtagactgaggatgtaangagtaggagagaggagagagtnatgtgacaggccgcatacaccacattagtatcatgatgtgtatagagatcatgacgagtgttgatagaacgatgacacgacagtcgctgatgtctcggtcgtgtggcctgggtgcgcgcgtntagtgacagattgtagtatgtataatagataggacgcgtacacgcactcggtntgtgttcgtgcgcgcgtgtgtgatggtgcgtcgtcgggtgagcacatatgtatattctattagtagtagctagagtatagtaataacactcgctcgctccgcggcgctgctagcgtgccgttaatttgtttctcacctgacagccgtgagtagtgtgagagtatgcagcggaggtgcagaaganggtggagtgtggagatgacgtgcggtgttctagtcgtacatattataatatcagtatttggtgtgggtacccacatttatttaagntanantanttnantaagattacgcacacnggtgtatatatcttccctcaatatgtgcgacatcataacacacccacgcacaccgcgcaggcgcacggcgagcgcacgcgtcgtgtgtcgcctgtgatatctgttgtgtgttatagatagtggtgtgtgtatccagaatatgcataatattgatgatctgcaccgagacgatattataatatatatgattgaatctagacacatatgccatgatanttattatataantatagatagtgataattncacacgatacatatanaaagaatgtgagtcaagagcgagtagaactggagagttatgtgaggagagagagcgcatggacgcccccagagatgtcttgactccgcgtgtgtgtcgccgcgcggtgtgcgccagcgcgcgacggaggaaggaagagaagaagacancgaaagagaggggagacatggtgcgccgcgcgtntggctgttgtgcaaggtnggtagagaaatgttaagatattaataaatcacaattatacacactctttatatacaggcacgagaagtatgttcnttatgnttcttcaccgagncaatatatgtataagataagctcgattgtacaacgtcaatctctcgacgcgagaacagcatgagtgagaacgtaggacagcacatcgtgtaggcgagggtgtagtgtntgtggctcctcccggnttcgacacaacccaacaaagaacaggaaacaaaaaccaa

SEQ ID NO: 24 - DNA, 469 bp, Glycine max
  misc_feature (5)..(5): n is a, c, g, or t
  Probeset Number=SeqID_9803
agctnggaattcggctcgagctcgagccgaatcggctcgagaaaaatgcaatctatgtccctgacgctgagcaagaggctctccaattcagggcctctcttcagaatctcttccagcctcgtcgctcacccatcctccgccacaacctctccgccgccaccttcgccgccagtcccctctccctccgccctcaacagcctcctcaccgctccgtggtccgccactcagtcacgcggaatcacgcttttccggattctgatattaagagtcgggaatcttcatttggaaaccgagggacgccccctcaacgagggttctcaaaactggtatttcgcccttcttgaagggaacccgggcaaagccaactctttgagggttcccgccttcaaagttggtagccaggtttattgcccacaagttggctacctatcaagaggaatggtgcccgaaagggaagggaaccgaaaca

SEQ ID NO: 25 - DNA, 539 bp, Glycine max
  misc_feature (77)..(77): n is a, c, g, or t
  misc_feature (117)..(117): n is a, c, g, or t
  misc_feature (161)..(161): n is a, c, g, or t
  misc_feature (164)..(164): n is a, c, g, or t
  misc_feature (200)..(200): n is a, c, g, or t
  misc_feature (472)..(472): n is a, c, g, or t
  Peptide Sequence Number=SeqID_6997
  Probeset Number=SeqID_9804
cggtggtggtgccggcgacgaccatcggtcctgccctgcagcagacgctcaacttcagcagtgaccacgtcgcccgntacctcacaggcgccaagccggcctaccagaacgtcgtcnccgcctacatcgatgtccgagacgtcgcccgcgcgcacgccctngtntacgagcaccctgacgcgcgcggcgatcgctacctntgcgtcagcgccgtgatgcaccgcgctcacttcgtccggctcctcaaggacctctacccgcagtaccccgtcaccgccaagcgcgaagacgacggcaagccgatggcgagggagtacaggttctcgaatcagaagctcggggatttgggcttggagttcactgacatgaggacaagtttgtacgacacggtgatttgcctgcagcacaggggccatgtccctgtcatcgtgccacgtcatcgtgcatgtttgtgaaaattataatgtgtacncaaattgaactcgattataagcaaataaatgaggataagtactctgttttcaaaaaaaaaaaaaaaa

SEQ ID NO: 26 - DNA, 1553 bp, Glycine max
  misc_feature (1)..(1): n is a, c, g, or t
  misc_feature (54)..(54): n is a, c, g, or t
  misc_feature (89)..(89): n is a, c, g, or t
  misc_feature (148)..(148): n is a, c, g, or t
  misc_feature (168)..(168): n is a, c, g, or t
  misc_feature (612)..(612): n is a, c, g, or t
  misc_feature (628)..(628): n is a, c, g, or t
  misc_feature (677)..(677): n is a, c, g, or t
  misc_feature (726)..(726): n is a, c, g, or t
  misc_feature (731)..(731): n is a, c, g, or t
  misc_feature (891)..(891): n is a, c, g, or t
  misc_feature (1054)..(1054): n is a, c, g, or t
  misc_feature (1089)..(1089): n is a, c, g, or t
  misc_feature (1139)..(1139): n is a, c, g, or t
  misc_feature (1161)..(1161): n is a, c, g, or t
  misc_feature (1165)..(1165): n is a, c, g, or t
  misc_feature (1217)..(1217): n is a, c, g, or t
  misc_feature (1222)..(1222): n is a, c, g, or t
  misc_feature (1231)..(1231): n is a, c, g, or t
  misc_feature (1255)..(1258): n is a, c, g, or t
  misc_feature (1282)..(1282): n is a, c, g, or t
  misc_feature (1365)..(1365): n is a, c, g, or t
  misc_feature (1369)..(1369): n is a, c, g, or t
  misc_feature (1430)..(1431): n is a, c, g, or t
  misc_feature (1438)..(1438): n is a, c, g, or t
  misc_feature (1443)..(1443): n is a, c, g, or t
  misc_feature (1501)..(1501): n is a, c, g, or t
  misc_feature (1504)..(1504): n is a, c, g, or t
  misc_feature (1507)..(1507): n is a, c, g, or t
  misc_feature (1509)..(1511): n is a, c, g, or t
  misc_feature (1514)..(1519): n is a, c, g, or t
  misc_feature (1521)..(1534): n is a, c, g, or t
  Peptide Sequence Number=SeqID_6998
  Probeset Number=SeqID_9805
ntagttgctcagacatatgactgtagacaataggccggtgtcgtacggagtggngtaacagcgagtgatgcgagactacgcgtacgcgncgcagccacatgacacggagagaacgccagtgaagagagcagagacacacggctgacgncctaggactgcgtctcgtgncgacgtcgccaataccccgcgccacgcgcgcacagccgcacatgccgcaggcgcgagtcccgtacaccggccgctggtcgtgctgagatgcgcaggacgatgtaccaaagcgataacacgtgcatcaatctcgtggtgtgtgtcgacgcgctcgccgtggcgctcgctacactcactcgtctcgagttcctgatgacgggtagttgtgaaccacatatgatagcaccatagtactgagcgacactcaaggacataacgcggttgtttgctatgcattatgccatactattcgcaagtgctccagtacgcggatcgcaccaggcagcagcgcgaggctcagtatacacgcagtagtgagcaccgacacatgccacgccatatcacatgatctatactcagggcatggtcgaggccaggagtatcgtatgtatggttacgcacatntctagtatcgataccntttattgtccatgcctaccactgtaatgatccacatcgatatttgtttnttataagctcatctcttgtacacacatttcatatatatcactatcctcncatangcgtggatgagtcttatcatcagtcctgctatgaatagcgtgaggctgcatgtccgtgctgtcgcctggtgctgtgttgttgttctactaatataaacatcattttatcttcacatccatccatcacagcgcgcccgtcagtcctactaaactatgtctntcacattaatacatctttatctatatgttagatgctgcaagattcgcactttctttcgtcgcctattcatgcctgtacttcattatccatcactgaatgtcacttcatgattaaggagagtttagtatatatactattataatgtcgtgcaatttttgtaatntattgtcggtaaattcattgaccaacaagcgcacnacgcaccagcgccaatgctcacacagcctccccttcaactccacgcacgncagttccacaccacaatgcacnaccnacaatcacaaccggggcggtagccaccacaccaccacaatactcacacacancctancgcgacagnaataagtcacatcttactttatannnntccataatgaagaaataagcacangcacacacgcatatgcttctttctggctcgctcacacagcgcgcgtgcgcgtctcactagcatctcatatagcgtagcatgtntatntacacaccatgaactcctgtccagttcgcctcgctgcctcgtagttgttattttcttattnntagacanatatntaaattaatgtgatgtggaagtgggcatgtggggttgataaaaagtaaaataataatntanaanannnaannnnnnannnnnnnnnnnnnnggggccacaccacactaca

SEQ ID NO: 27 - DNA, 748 bp, Glycine max
  misc_feature (1)..(82): n is a, c, g, or t
  misc_feature (748)..(748): n is a, c, g, or t
  Probeset Number=SeqID_9806
nnnnnnnnnnnnnnnnnnnnnnnnnnnnnnnnnnnnnnnnnnnnnnnnnnnnnnnnnnnnnnnnnnnnnnnnnnnnnnnnnntagccactcgatcgacatggcctgcaagtcggcgtccctgctgatcctcgcggcgctggtggcggccgcggcgtgcgcgggctcggcaacggcgcgcgacgtcccggccgggaaggaggatgcggtgaagcggccggagacgttccaggaggggacggtgctgatcccggggatcgggcggtacgagctgggcagccactacaggccggacatcggcgggctggaccacagcatcccggtcgccgccagggcgcagttcatccccggcgccgacgacacctgggtgcccaaccccggcttcgaggtgcccaaccccttccgccccgcagccaccacggagtccccctgatgcatggatcgagtcggccggccaacgcgtccacgttacgcctatcgatcaatgggtagctagcctgctacaattcaatttccgctagcttttggttgctacaataaaatagctgctatgcataggcaaggcatgcgtatgcatgtatcagcgactgcgtgcgagcgcgctgtcgacgttttttgtgtgtgattggagagtgtacctgtatggggtatgcatggatgcgtaggaaggaagcatccatcgcatatctcgctttgctttgttgttgccaagtaatgtgtagttcaatgtatttttctttttagttcggn

SEQ ID NO: 28 - DNA, 288 bp, Glycine max
  Peptide Sequence Number=SeqID_6999
  Probeset Number=SeqID_9807
ctgcaggtcttattgactaacgcgcgtgacatgagagctcctatatggctactgtcaaacatgagataacaagagatggaaggacacagttgtacgcttatgagcactacttgacaggagatggcaaacaactcacactaactctacgaatactacggtcaactaaaggatacccattcgaaatctacagatcatgcgaagattgtaaatgctaaaccttatatgactgagatacaggccagaggagctactttggttggatcaagaacagagataactgcacggatg

SEQ ID NO: 29 - DNA, 413 bp, Glycine max
  Probeset Number=SeqID_9808
aatccggcgtcgaggaatctcttcgaaaggaccattctttatatcgttttttaagggcatcgcgtggtcgtctcggcgcgtgtgtggattccatatagcatggctactgataatggctggaggaactcttagtgcttgtgggagcttcacaggttcagtcactgtgccccaagggcttaattctgacgtatatgatgatctggctccttctggctttctatcctctccaaccgatgcttttaatacagagattcatgtcaacaaattctacatggatcattatgagagtggagaggtttcacagatccacactgatctttcccttcgtaacatggatggcaaagaagtaatgatgaacacaatcagcgaatgatcctatatgacatcgtggtatcaccatatatcagacaaat

SEQ ID NO: 30 - DNA, 1560 bp, Glycine max
  misc_feature (1)..(1): n is a, c, g, or t
  misc_feature (49)..(49): n is a, c, g, or t
  misc_feature (62)..(62): n is a, c, g, or t
  misc_feature (121)..(121): n is a, c, g, or t
  misc_feature (293)..(293): n is a, c, g, or t
  misc_feature (468)..(468): n is a, c, g, or t
  misc_feature (934)..(934): n is a, c, g, or t
  misc_feature (1427)..(1427): n is a, c, g, or t
  Peptide Sequence Number=SeqID_7000
  Probeset Number=SeqID_9809
ntgtagtcgcgatcgactcgcacgaaaaatcgaggcttgagaactggtntacaacatcagcntcgtttcagacacaagatgagtccgagggcgagtctcgcacaatagcgacactatacanattatagagtatagaagcataatatggcgcgtcgagtgaagtccaacaggattgacaactgacgagtgttatataatgatgatatatagaaggcgcgctgtacgcgcattactaacattacagattacaggcaacgcgcgcggagagatataatatagagtagctgcagagnatgacaatgcacgcgcacatcatataaggacaggtcgcgcggataactgtgtagaagttagtggcgaacaaaaagtgatcgtgtgatcaatgtcgtgctctcccacccgccgtgtatagtgtgcattatatgcggatgcggtggtgtgtcataagagatgagagttgtagatagnggcaagactggggaagagaacaatcaagaggttctatatagagagtcgtgcagaacgcttatcacgcgtgaaattcgtgagtaggtgtatatgggcgagagtttgcgcgaccaggcattatatgtagctagtaggtagacgatgtgttttttcataagtttgtatagggcatcggggcaacataggcgccacacgcgcgagcatataatcacagtatcatacatatataatggagacggcgtagaataggggcggcgggggacgcgacgcgccaataggggaaggaatataccgctaagtcggaggtataaatggtgagatacgtataaaaaagagaccgcgagcccactcaatccgtggatgttagcgggggataaataaacacaagattgacagcggctggccgcacacctgcagatataaatataaaataatgagggcgtggtatgtgaatgagagaagcgtngaagataagttggtacaagttcgggtgaggaagcaggctgttataataccggactatacgcatcggcggggggcttgcggtgcagctggttctctatagtaataatccgttaggccggtgggaagaaagtagataaagaggagcggggggggacgagggaatgtagcgatatataataacataacgggccatatagtgaggaatgttggagatgggagtgggtgtggtaatgaattatataaaacataaaataccctgctagcacgtgcagcagccggcgccaggcgctaaatatttacatcgtagtgaggtgactcgtgtgtgtgttaagcgcggcgaggccactcgccggtatataggcggacgggcacgtgccagtgagcgatgacgcagacacacggactagtgtatgtcaagatgtctgtacaccgcgctcccaatatcagtagagaaggattgtaagagaactgttgttacggaaataataactcgngcggggagcagcacacggcggggcaagtgaaggttggtgagacaaggtagaagaagaaaacataatgagtatgagagcaaaaaaactaataaaagacagagacagtaagttttatattgtgggggtacataat

SEQ ID NO: 31 - DNA, 1557 bp, Glycine max
  misc_feature (17)..(18): n is a, c, g, or t
  misc_feature (28)..(30): n is a, c, g, or t
  misc_feature (33)..(34): n is a, c, g, or t
  misc_feature (36)..(41): n is a, c, g, or t
  misc_feature (55)..(55): n is a, c, g, or t
  misc_feature (72)..(72): n is a, c, g, or t
  misc_feature (74)..(74): n is a, c, g, or t
  misc_feature (80)..(80): n is a, c, g, or t
  misc_feature (85)..(85): n is a, c, g, or t
  misc_feature (90)..(90): n is a, c, g, or t
  misc_feature (92)..(93): n is a, c, g, or t
  misc_feature (96)..(96): n is a, c, g, or t
  misc_feature (99)..(100): n is a, c, g, or t
  misc_feature (104)..(104): n is a, c, g, or t
  misc_feature (113)..(115): n is a, c, g, or t
  misc_feature (120)..(121): n is a, c, g, or t
  misc_feature (123)..(125): n is a, c, g, or t
  misc_feature (132)..(133): n is a, c, g, or t
  misc_feature (143)..(143): n is a, c, g, or t
  misc_feature (149)..(150): n is a, c, g, or t
  misc_feature (152)..(152): n is a, c, g, or t
  misc_feature (155)..(155): n is a, c, g, or t
  misc_feature (157)..(157): n is a, c, g, or t
  misc_feature (163)..(164): n is a, c, g, or t
  misc_feature (169)..(170): n is a, c, g, or t
  misc_feature (173)..(173): n is a, c, g, or t
  misc_feature (282)..(282): n is a, c, g, or t
  misc_feature (284)..(284): n is a, c, g, or t
  misc_feature (305)..(305): n is a, c, g, or t
  misc_feature (315)..(315): n is a, c, g, or t
  misc_feature (318)..(319): n is a, c, g, or t
  misc_feature (326)..(326): n is a, c, g, or t
  misc_feature (329)..(329): n is a, c, g, or t
  misc_feature (379)..(379): n is a, c, g, or t
  misc_feature (383)..(383): n is a, c, g, or t
  misc_feature (415)..(415): n is a, c, g, or t
  misc_feature (552)..(552): n is a, c, g, or t
  misc_feature (653)..(653): n is a, c, g, or t
  misc_feature (826)..(826): n is a, c, g, or t
  misc_feature (906)..(906): n is a, c, g, or t
  misc_feature (908)..(908): n is a, c, g, or t
  misc_feature (931)..(931): n is a, c, g, or t
  misc_feature (943)..(943): n is a, c, g, or t
  misc_feature (1030)..(1030): n is a, c, g, or t
  misc_feature (1129)..(1129): n is a, c, g, or t
  misc_feature (1185)..(1185): n is a, c, g, or t
  misc_feature (1218)..(1218): n is a, c, g, or t
  misc_feature (1316)..(1316): n is a, c, g, or t
  misc_feature (1320)..(1320): n is a, c, g, or t
  misc_feature (1524)..(1524): n is a, c, g, or t
  Probeset Number=SeqID_9810
gttggggggggtgtggnnggtggggtgnnnaannannnnnnatcacctcctcccngtcctaacaatctacancngcgtgncgtgncagantnngtnttnntctngtgtggagnnnttttnngnnntgttctnngttgtgtggngttatnngnggncngtacannccggnngcnctctccttccccaccatatatgactaactagccactgcggcatctcgcatagtgcgtgtgctagctctcgcggcgcgcgctatatactgatacgcgcgcgcgcgacagncncagatgatataatgcaaaganatacactatnagnnggcggcnggncgcacgcctctcggtctgcgcggcgtctcgattgagcgtaatgcgcgttngcgntcatgatgtattgtatgagatcactccacgtnacggagcatctcttctcattattgtctagtgttatactctagatagtgtggtaggcgcgagacgatgcgtggcgtggaacattatataatataatgatgcgcgtgagtgccgggtgatgcgcacgacacgaaactcncgatccacggctcacactcgccgagacacgctgagataggagattacttaacatacaaagaactcgacagtccacactactcaaatcggatagcgcgtgtnataataccaggcgtctagcacagcgtatatattgataggcgtggaggaagcaaaagatagcataatagagtagacgagcaagaccatcacagaacggagacgatcataaataatatatactatacgctgtaacacgctacgtgcactctcatacacatctaatgctcgtgagngccacgtctcagacatagatatagtggatatatttatatatatctcgtgaatgatatttaatgtggtgagtgtgtgcaanangcaaagacagcaaacacacaatnatatctcttctnctggcgacactggtcgcatctcgtttgtgggtggtttactgtgtttatgactgtacttaccacttatctaatataatcttatgtagncctcatacagtgtttgctctcatacaacacttgttgtcgtagaactccacataactgtctcgtggttctgataattcatgtatgttgtactgtgggggnacagccaccgcgggcgaggttcgtggtaatatacacgatggtgtgtggcgcacgtngtacacaggaaatggtgtctctgcgtgctgtgngctcagatgcgtagtgcgacttgagcgcccgcagcgatacgcgcgagctggctcgcgtcacgacagactagacgcggtcggcgcgcgcgtccacagcnaacntcactttgtctgtgctcctgtagatgagagatgtgaatggtcgatacatgtgtcgcgtggacagccacacaactattcgctacctatgacagcactcgtacaattatatcgtcgactgtgctcatacactgtgcgtaatacgagtatagtaggtatcagctacagcgccgagtacacacgatatatataccacaccacgatacncgctgatgtgtgtaaagatagcggctgtgggtg

SEQ ID NO: 32 - DNA, 875 bp, Glycine max
  Peptide Sequence Number=SeqID_7001
  Probeset Number=SeqID_9811
gcccgcgacgtcgacggctccatcatgccgccggggatgatcaacaccttcgatctgcccggcgaggctatgaaggacatggccgccgtgaagccgcgtcaagtcgcttacgtggcggcgcccgacgcgaggggcgacaaggtccttgcgccgcgcatcgagaacggggtcaaggtcttcgacatcaaggccgagatcatccgatggaacatccttccggacgtggcggtcgaggcctacgcgtacaatcgtcaggtcccgggaccgcggctgcaggtgacggagggggatcatgtccgcatcaacttccgtaatgcgcttccagaaagcaccacggttcattggcacggactgatcgtcccgaatgagatggacgggccggccaacgtcacccaagacccggtgccgccgggcggctcctacacctacgaattcgacgtgggccagagcggcacgtacttctaccacagccacgatcatccggaccgccagcaggcgctcgggctctacggggcgctgctgatcgcgccgaaggacccctcggccgaggtgaaggccgacctcgattacgcgatccagctacaggagtggctgaagcgcgaatggctgacctatccggcgatgctgatggaaggggcgcttccgaactacttcacgatcaacggcaaggcatacccctcgaccgacacggtcgccatgaaggtcggacagaccatcaaacttcgcttcatcgggacgaacaacaacttcgtgcatcccatgcatgtgcacggcggaccgttcgaagtcgtagccgtggacggggtgaacctcaaggaaagcgcgcgataccaggcggacacagtcaacgtcggtcccgggcagcgctacgacgt

SEQ ID NO: 33 - DNA, 650 bp, Glycine max
  misc_feature (580)..(580): n is a, c, g, or t
  misc_feature (601)..(650): n is a, c, g, or t
  Peptide Sequence Number=SeqID_7002
  Probeset Number=SeqID_9812
ttttttttttttttttttagttgcaatcatgtcatcttcctcaatatcatcatcatcttcaccttcatcatcttggaaacgctgtaggtcattatcactgtcatcttcctcttcagcttcttcatcaacaaaagccctaacagggtcaccatctggtgataaagtcaagtcaactgatacatgtacgtgtggctctatgttctccttgtcattgtcctcctcctcctcattggaagagacatcatcatcaggaggagcagaatcaagtttcaagttcattgcaagcattgacggggcaaacacttcttctgaagggttgttagacttgtcatttacagcctcatctttagtatcgcttctttcagaatcagtgtagagttcctagaaaatacagccagacaagcaataaatatagaatatctacagttaaggcaagcatcttggtaaatggctggcagaaaacctgagtatcaccaataggagctcgaaatgcatgctcagattctgaatcccttggcatgggagaaggaatgctctcagaagtagaattagctgcagcatcattagaattcttcaccantatgtgacgtggcaaaaatannnnnnnnnnnnnnnnnnnnnnnnnnnnnnnnnnnnnnnnnnnnnnnnnn

SEQ ID NO: 34 - DNA, 1535 bp, Glycine max
  misc_feature (1)..(2): n is a, c, g, or t
  misc_feature (55)..(55): n is a, c, g, or t
  misc_feature (86)..(86): n is a, c, g, or t
  misc_feature (92)..(92): n is a, c, g, or t
  misc_feature (137)..(137): n is a, c, g, or t
  misc_feature (139)..(139): n is a, c, g, or t
  misc_feature (198)..(198): n is a, c, g, or t
  misc_feature (204)..(204): n is a, c, g, or t
  misc_feature (206)..(206): n is a, c, g, or t
  misc_feature (222)..(222): n is a, c, g, or t
  misc_feature (344)..(344): n is a, c, g, or t
  misc_feature (349)..(349): n is a, c, g, or t
  misc_feature (439)..(439): n is a, c, g, or t
  misc_feature (450)..(450): n is a, c, g, or t
  misc_feature (471)..(471): n is a, c, g, or t
  misc_feature (559)..(559): n is a, c, g, or t
  misc_feature (1225)..(1225): n is a, c, g, or t
  misc_feature (1294)..(1294): n is a, c, g, or t
  misc_feature (1367)..(1368): n is a, c, g, or t
  misc_feature (1371)..(1371): n is a, c, g, or t
  misc_feature (1376)..(1376): n is a, c, g, or t
  misc_feature (1378)..(1378): n is a, c, g, or t
  misc_feature (1428)..(1428): n is a, c, g, or t
  misc_feature (1430)..(1430): n is a, c, g, or t
  misc_feature (1442)..(1442): n is a, c, g, or t
  misc_feature (1448)..(1448): n is a, c, g, or t
  misc_feature (1462)..(1462): n is a, c, g, or t
  misc_feature (1516)..(1516): n is a, c, g, or t
  misc_feature (1520)..(1520): n is a, c, g, or t
  misc_feature (1523)..(1525): n is a, c, g, or t
  Peptide Sequence Number=SeqID_7003
  Probeset Number=SeqID_9813
nnattatgtagtatgtgttgcgatagatgcacatagttagaacgacgtgcgtcanggagggccggcgcgagtgacatgtgtgaganatgatnggatagtgatgtatgcgagtcatatatgatgtcgcagtgtctctngntgttcactctatctgcggtagtcagatctgtctgatatagcagagtggagatagtacgnaatgtngntgaaggcgtatagccncgtggcacgcgtcgtgcgcgccatctcatcgcgtgtcgtactcctgcatctaatgtatgatattcttctaatattctgatagtatataatacatctataccactcgcgacgtgtactcctcncatancgcgctccctatctcgtgtagtggtagcgcgcggagcgaacggtactgttattttgttgtgtgtcttccatagttgttctctatatcatnaatacacatanttacagactatgtaaccagtnacataggcatcggacgtcgctactcagtcgatgagctcttcacgccgacggtcgtgcgctatctcaatctcactgcgtagtgtgtctnccttcagcgaggatcatcaccattcccgtctcctgcgccgctcgtgcgattatgctgttactctcaccgtgcgctgactctcgtcctagccacatctccgcgtcggcgccgccgtgcatgctgcgtctcactacacatggcgcctcacgctgcgacaataccagctctcttccaccttacattcacttctcaccaccatctgcgtcttgtacactagaaaatagtggcgccgtcgacatcacaaatatggtgagccgttgttcgatagactacagtgcgtgccaccagcggccgccatcacgccgctccactgcgttatgtcctcctggtgtgtctcgatgttcaactagagtaggagtgtgcgagagatgtagatagtgtgtcgggagtgatagatagaggttgtgtaaatgagtagctctgatgatattatggatgatgtatggtgggtagtggctaggtatcatattaggacatcatttactagcgaagacagtgtgcggtgaagcctatacatagacaactatacatggatacaggtgatgtagagatgagtgtgtggtgttcttgtgcgtgcgtgcttgataggcgtcatctgcgtactgccaagtgcgtgttgtgtgtgagattgaggatgtagcgagggacggcagacacaggtgatgnattcgtaggatgactatagtagagagacgtagagaatatatagagtcaatgcatagactgtgtatctantggtagcgtttgtccgactatatagttgcgcatcgagtgcttacgtatagcgatgcgtgtgatgtgtctaaannaancaagnanagagttgattaattcaacttgatatacgactgcacgaacgtagaggatangnagagtgcggtgntctagngagcgcgtcgccgnggtgggtagaaggagaaggatgaaggaaaggaagagaggggagggagaaaaaangggngannnggggagggag

SEQ ID NO: 35 - DNA, 752 bp, Glycine max
  misc_feature (33)..(35): n is a, c, g, or t
  misc_feature (77)..(77): n is a, c, g, or t
  misc_feature (335)..(335): n is a, c, g, or t
  misc_feature (377)..(377): n is a, c, g, or t
  misc_feature (382)..(382): n is a, c, g, or t
  misc_feature (388)..(388): n is a, c, g, or t
  misc_feature (404)..(404): n is a, c, g, or t
  misc_feature (408)..(408): n is a, c, g, or t
  misc_feature (417)..(417): n is a, c, g, or t
  misc_feature (422)..(422): n is a, c, g, or t
  misc_feature (428)..(428): n is a, c, g, or t
  misc_feature (431)..(431): n is a, c, g, or t
  misc_feature (451)..(452): n is a, c, g, or t
  misc_feature (459)..(459): n is a, c, g, or t
  misc_feature (461)..(462): n is a, c, g, or t
  misc_feature (473)..(474): n is a, c, g, or t
  misc_feature (480)..(480): n is a, c, g, or t
  misc_feature (484)..(484): n is a, c, g, or t
  misc_feature (490)..(491): n is a, c, g, or t
  misc_feature (493)..(493): n is a, c, g, or t
  misc_feature (508)..(508): n is a, c, g, or t
  misc_feature (518)..(518): n is a, c, g, or t
  misc_feature (521)..(521): n is a, c, g, or t
  misc_feature (525)..(526): n is a, c, g, or t
  misc_feature (530)..(531): n is a, c, g, or t
  misc_feature (536)..(536): n is a, c, g, or t
  misc_feature (544)..(544): n is a, c, g, or t
  misc_feature (547)..(547): n is a, c, g, or t
  misc_feature (549)..(551): n is a, c, g, or t
  misc_feature (554)..(554): n is a, c, g, or t
  misc_feature (558)..(559): n is a, c, g, or t
  misc_feature (561)..(561): n is a, c, g, or t
  misc_feature (563)..(563): n is a, c, g, or t
  misc_feature (565)..(566): n is a, c, g, or t
  misc_feature (568)..(568): n is a, c, g, or t
  misc_feature (576)..(576): n is a, c, g, or t
  misc_feature (581)..(581): n is a, c, g, or t
  misc_feature (592)..(592): n is a, c, g, or t
  misc_feature (594)..(594): n is a, c, g, or t
  misc_feature (597)..(597): n is a, c, g, or t
  misc_feature (601)..(752): n is a, c, g, or t
  Probeset Number=SeqID_9814
tcgaaccaaactatgtctttgaatctcctgtcnnntgatgggaataactcatctgtcaacacctgtaaaaatctcanacatccttatctacctaccatcacaccagaaactcttgtcgaacttatgcataacaacgaaggcaaaagattcctcattattgactgccgcttcgaatatgaatataaaggtggacatataagagatgcaataaatattaccagaccagatgatttagacgaagtccttattaaaaatagacatctcttgtttaaagaagagtcacttcaattcgtcaaacaggattggagacaagctattcaccaatcaagagttanacctggttggatgttggaagatcaatctaactttgaaccccnatccntgtctntcatttgcgagttctntcanaaaagaggnccttnagcttnaanggcccttcaaatttagatcnnactcttntnngcgctaattgnnccactntatnttgtcnngngttttaatcttgaanatggttcccnagnttcnntctnnttacngtttttgngancnnnggntctnntntntnncngccgttgncatanatttttttttnangcntagnnnnnnnnnnnnnnnnnnnnnnnnnnnnnnnnnnnnnnnnnnnnnnnnnnnnnnnnnnnnnnnnnnnnnnnnnnnnnnnnnnnnnnnnnnnnnnnnnnnnnnnnnnnnnnnnnnnnnnnnnnnnnnnnnnnnnnnnnnnnnnnnnnnnnnnn

SEQ ID NO: 36 - DNA, 1452 bp, Glycine max
  misc_feature (1)..(1): n is a, c, g, or t
  misc_feature (16)..(16): n is a, c, g, or t
  misc_feature (101)..(102): n is a, c, g, or t
  misc_feature (110)..(110): n is a, c, g, or t
  misc_feature (119)..(119): n is a, c, g, or t
  misc_feature (164)..(164): n is a, c, g, or t
  misc_feature (194)..(194): n is a, c, g, or t
  misc_feature (254)..(254): n is a, c, g, or t
  misc_feature (532)..(532): n is a, c, g, or t
  misc_feature (611)..(611): n is a, c, g, or t
  misc_feature (920)..(920): n is a, c, g, or t
  misc_feature (1172)..(1172): n is a, c, g, or t
  misc_feature (1192)..(1192): n is a, c, g, or t
  misc_feature (1200)..(1200): n is a, c, g, or t
  misc_feature (1424)..(1424): n is a, c, g, or t
  misc_feature (1452)..(1452): n is a, c, g, or t
  Peptide Sequence Number=SeqID_7004
  Probeset Number=SeqID_9815
naaaaaatatagacanaataagaagatataaaaataaataaatattattataatataaaataagaatataagaataaaaattagataagaagatgggagannaagatggngatattatngtgtggatataagatgagatttactatcccacttttctatgatgntgtactttcacttttctttgtgtgcctgtnttagtttatgagatgtaggttattgtcgtgtgtgtgtgttgtatgattataaatacgatnatcgcgcgaggtgggagttatatttgtgtgtatactcctattaatacgtataggcgcactcatcgctgcagaccataagttttaatatgcagatgatgagattgcagtgcctgctcacctccgtacggagtctctctttatatactctgtatttgatgtacgtgtatcgtatcgtgttgaggttatctatacatacgcatgattgacaaattgtctgtctatcgtctcgcacccacgaagctctcatacataaatattagacattcaatactactcancatatcttataaatatcctattaataatgtcatataccacacaccgagcatatatacagatcctcacgaacctcgaatncatagagtgtagatgctctaggaacagacattgacagagcacagatagtagataacgataacaaagacacacagacataccacgacaagaaaagtataattatatcttgcaagtaacataccaatcatatactcagagatagacacgatcatgatatacggtctacatcgaactgaaggcagacgacggagaaatctgtgctggacgcatccacgagcgtagtctggcgccatgtccaggtgagtgagagtgcataaatgatgagatgagagccacacactgcaatactaccgtcacagaacgcgtatncgtcatatgtctagtgattgaataagccttaatattgtgcacatatctcgtcacgagattagattatataaatctacatcttcactgatcctataggtggtttgacaggtcatcatcacgccgccgctcgcgaccacgccacctcactgatcatcttactacactgcctcgtctcagtgctcattcactctgtcttatgcctaaactccgtactccactcctgtcacaccgtcataagtgctcatatagtanagaaacgatgctagtgaatncacacagnagactccgtcacctatccacacacgctatagtatagactgtagtagagcgacgcgtgatgtaacaacgaaatacgattcgtatatacatagatatagatcgtactacacacaactgtatattacggcgcatgatattgactaagacatctacccacgatgcgcctagtatatacgtacacacgacgtacgacgtattcttcatctgcgacatatactgtgactnccataccatgcgacgcagtcactactan

SEQ ID NO: 37 - DNA, 1109 bp, Glycine max
  Peptide Sequence Number=SeqID_7935
  Probeset Number=SeqID_9816
attttgaggttatacatatatatatatatatgttggacttgatataatatattgaattagtggggataatattcctatatgttgattttaattagttgagggtcagatccaagagggttaataattgtttgtaatttttcacagatgcattttagagcttatttcttgatatgttatagtttgttatggaccatgatacttcctttctgacacttttttttttaaattctctttaccattagttagaatttattaaaatcattattttttaaaattttacttcttatttaatataaatcagaaaaaataatcattaaataagaaataaaacatataaaaataatatttttttaataaattttaattaattataaaaaaagtcttaaaaagaaaatgtcagatagatatattcatgtatcatttctcgatgttctatataatacctaaaaaatatgcattatgcatggagcatatgctcctgatgattaatttgttgttgcgcaggaaaagtgcggtgtcatggtccatactctcatgcaccacggatgataatcatgtatggaggaagtatggacaaaagggagttctgaattctgaatttcctaggagttacttcaggtgtggtcataagtatgatcaaggttgccttgcaaaaaaacaggtgcagcgggatcaagagaattcaaatatgtaccgaactacctacattggaattcacacatgcaatgccaccaccaaggctacacattctgccacagatcttctgaattctgatcatgactccgaggtacctaatgttcaggatcaccacattagccctccaagcttaaatataaaacaaacatttcccaaagaaaacacaccaagtgatgttacagatcacatgttgaatcctagcatgtggtcagctttgaaggattttgaaccatccaataagcctaccattgtgcccttaatgatggaaactgatactaataatgtagataatgtgtattcatctcaacgtctggacatggattttcgggtgccatctgttcattttggcactgattttccctttgacgaaggtcactttctaatttaatactagttgttggtttcctaggctt

SEQ ID NO: 38 - DNA, 1383 bp, Glycine max
  misc_feature (59)..(59): n is a, c, g, or t
  misc_feature (97)..(97): n is a, c, g, or t
  misc_feature (1042)..(1042): n is a, c, g, or t
  misc_feature (1077)..(1077): n is a, c, g, or t
  misc_feature (1169)..(1170): n is a, c, g, or t
  misc_feature (1200)..(1200): n is a, c, g, or t
  misc_feature (1315)..(1315): n is a, c, g, or t
  misc_feature (1319)..(1319): n is a, c, g, or t
  misc_feature (1329)..(1329): n is a, c, g, or t
  misc_feature (1352)..(1352): n is a, c, g, or t
  misc_feature (1354)..(1357): n is a, c, g, or t
  misc_feature (1360)..(1360): n is a, c, g, or t
  misc_feature (1362)..(1362): n is a, c, g, or t
  misc_feature (1364)..(1367): n is a, c, g, or t
  misc_feature (1369)..(1369): n is a, c, g, or t
  misc_feature (1375)..(1377): n is a, c, g, or t
  Peptide Sequence Number=SeqID_7936
  Probeset Number=SeqID_9817
cgactgttatcatgcgtcatagggtatatctgattgcacaagggtgtggtcgatgcatncgggcgcgatacatgagatgacacagatgcgcgaacanctcatcaccgcttctcacccacgacttctacctctacaatccctcacacactgcagcgcgagccgcgttgagcgcacctatgggccgcgctcctctctcgcctgttgctgctgcggcacactagcgagttattgtcgtgtgtcttctcgagtctgttagcaccaactcatagaagaggttcctactaccgaaccaggatgctgaggcgctatctagctatgatgagttatcgacggttcagcgcgcccgctagtatatactgtagaatacatctcgacagggggaaccaataaaacagaagggagagcgaaacacaagaaaatagaagagaagcgagcgcaggtgccagacatgcggaaacatttgctgagtagggagaagggcagttgctgcgattctatacacgatataactcatcgttcggtacgcactgttcattttcttttctactatttattgattagctatgctcacacacgctaagggaggtgtgggggcgggttgaactaaccatcggtcactgtattgctgacggcaccgtccgcatactatatattctctcgttgagactgcctcttcctcctccaacactaccctcatttacacggagtgtttcaacataactatcaaatacccgcccagtgcgcaatatgaccaagcaaagaaccctagaactacaagaaaccgggacgatgcggaccggcgaatcatgtgtgccggtggtagtgtgtgtggggggaacacgtcggcgacaggggcgggcatgtacaacagactctatccctgcccaccgaccttaacttatttcgctttatataatcttatctgtgaatattttaattaattacgtatactataaactacatcgattacaacatgcacgacatcaccagtctcgcctctcgcccgctcccgtgcgagtggaggcggcacacggatagcgtngagatgtcatagaggggaggtgacagggaggaganaaggcagatggaggaggtggtatagcggcgtacagaaaggcagcctgaaaaattagcattgacaactgaactaccgtcgtctcttccaattnnacacggggggggccgtgggggtaggggaangaaccactagcaatacaggatttggtatgggcgatggagaacaagcgaagactctagcaccaagcggagtggtgaatcccatgcgaataggagtgtgtgtatctgcggcatgcancatnaccgcgacgnccattcaggagtccggcggcggngnnnnggngngnnnngngaaaannnggaaaa

SEQ ID NO: 39 - DNA, 898 bp, Glycine max
  Probeset Number=SeqID_9818
tattattatgagaaatcaaggactgttgaaaagaaatctttggctggttgtcgctgaatttctcagtaagagaataattgagtatgaagcaaccaaggtgatgctggccctaagcatcaatccgtgtgttccgactctatgagtttacatacggctacatgcaagccaagatgagtgctctacgcttacggctcatgctaactgaactggtgatgtttctttcttcaccttgattgacgccacatgttccccctggttgccacgtcgtcctcgtcttcggcttgcaagggactggatctggtgtgattgattcttcctctcgcaaggttatgatggccgacaaacagctccaagttcacgggtcgccaggctcgccgagtgacgctggctccaacggtggtctgtgagcacttgcccaggtcaattgatatttgtggtggcccttctctgtttttacttggaaaaatttagtccgtatgtgcctcagtgaattttaaaatcaaaggaaatgctctgtgcagaaaaatacatatctaatytagggggtatatgtaatagcggtagataaataataatgtttagattcaggcagtatactacaatctgccttbtggagaggggcctatgcttgctaagttctttgtacggtgccttcagggaggctgtgtggtgccgaccggatgtacggcgaggtcttcataatggcatcaagtcacccttgccatatggatcatatgtaagctyttcctgctaacctacaggagtacattttgatgcttcaagtctgaacctatgtaacttgtgaactaatgcctccctgagtgtgtgtgtgtgcacgtgcgctatgttaaatcaaacttyttcaractactgtgaagtaatgccacttgtcatattg

SEQ ID NO: 40 - DNA, 442 bp, Glycine max
  misc_feature (422)..(422): n is a, c, g, or t
  misc_feature (437)..(437): n is a, c, g, or t
  Peptide Sequence Number=SeqID_7937
  Probeset Number=SeqID_9819
gttaagcaaagaaaggatgttaacaatgaaacttcttcaccctctccatcactctctctcttcctcccttcctttaccatcaagaagaaggcaatccaaaccttaccggtgctcgttaccgtctccaggcggcgaaagggtcatcagatcagagaccgtggtttctccggtgatggtgagccagagcttcgaaggaagaagggtgttacttggatgtctcctctccgccgcgggtgggattctgttacctgattcatccgaggccgtaagcaccagcagaagagctctacgtgcatctaagataccggacagcgaattcaccactctccccaatggtctcaagtactatgatataaaagttgggaatggagcagaggctgtgaaaggatctcgggtcgcagttcactatgttgcaaaatggnaagggataacgttcntgaca

SEQ ID NO: 41 - DNA, 471 bp, Glycine max
  Peptide Sequence Number=SeqID_7938
  Probeset Number=SeqID_9820
aagaagagaccgtctcttgtgattcttcttcctccctcttcaccttctccagaacttcatcccacttctcctctagattcaaaccttctcgaaaccgcagcagaggccgagcaaaaggtctgttcctactgatttcattgtgatcgtgttaaaataatccgccgtcgccgtccttggtctccaaagctagaaccgctttcaattccgccgctgctaaagcggagcgcgtcctcactggtttagaaaggctgggaagcctcttggttacaaagaatgtcagtttcacagagtcatcaaggacttcatgattcaaagtggtgattttcttaagcatttgaacaactcatggctccctctcacaacattccacttcgtagtctcacctccactgatgaatccaaacttgacttaaatgctctgtctttgagcgtttccttccatgggtgagagaggcgaactcagctttcaagt

SEQ ID NO: 42 - DNA, 1470 bp, Glycine max
  Peptide Sequence Number=SeqID_7939
  Probeset Number=SeqID_9821
tgcgcacgcgccgtcgcaacttcgctggtttaatatgcggtgggagctggcacagatgtgatcagcactacggcgcgccgcgcccgactcgcattccctacaatagtcctctcatgtgcgcgcggggccgcggccgctgattaatagctcagtctctcgatatatgacgctgcgcagaaatctgacggcgcgtcgcgatatatatattatctatacagctaatacgcccgcccacagagggccgactattcataatgcatgatactatcacgcgccgctacatacgtttgtatcaacaacactacattgtattatactatattgccgcgcgcgcgaggcctggcgcgcatgtatttcctccacaccttataacccccgcgccgcgcgcttatttaatctatcggcccgcccgttattttatatacccaacatccatccgacgacacgcacacataggtcgcggctctaataaactcgtgcgaaggcagaggggaggaccgtatatcgtcccgacatcctgtctcggcggtcttttcgcgcacgcccagcatgttttcttcttacagcaatatagtagatcctacttattacttgtacggccaggctggcagtcgaaactaacaccaagttacgtttacaacacacacgatacgccgggtagttggcgataacaaaacggcggcgtagacgtattcacacacacatatgtgtttgtacgaaaaccgagttattcttacccctcgcggcccttttaatatgttattatggggaggcagcaggtttctctcatacaaacaccttctatctcacataatacccccccttaattttatcatgctcccgcccgcctgcggtgtttgttatcgcggtgcgcgctacgcttatttcgcattaaatccgcgcaattaatacagacggggggcgagagcgattcaaacagtattcgttcttcgggctcattcgcgattttcttcgccgcgcgtctatatactacataatacactcgcagcccgccgattcataaacggttgtaagtttctccccaccgcggactcgtaaaccacatttctccggttttttttgtggggcgggggtggcgaacaccctccgcggtattttaatcgtccccggataaacaattaatacatattggcggatgggaatatatatacgcggggggtgagacacattattgtcaaataccgggggatataccagcgacggcgcggccttaattaagatatagcccgacctataccattacgcggaggaatatggttaaaccatcggggctgtcaatgaggaatgaggggtggggggacacagggtgacaaataattaaacaacatgccccgcgcggggaaggttataaacacggtttacaccgccaaagtgaaaataaaaaaagacaaacagaggcgggatacggtccacatatccccgcccatacgacccccaggggggggccac

SEQ ID NO: 43 - DNA, 485 bp, Glycine max
  Probeset Number=SeqID_9822
agtgtcagagccgaaacaaacgtagcaaaaagaagaaaaaaacatagaaaatgtctgtcttcttacgcggaggaatcgccggaggatttcatctccgtagtcgtgactcctcagccgtcatcacaaaacgacgaatctcatccgttggagccgtaacaggacgaagcgtcaatccagcagcagccattgaacaacgtgccacatggctacctggtctcgaacctcctccttacctcgacggaaagttagctggagattacgggtttgacccgctcggtttaggagaggatccgaaaagtttgaaatggtatgttcaagcagagcttgtccacgctcgtttcgccatgctcggtgttgccggaatactcttaaccgacctacttcgtaccacagggattagcaacttacctgtttggtacgaagctggagcaacgaaatttgattttgccagcacaaagactctcattgttgtacagtttctactc

SEQ ID NO: 44 - DNA, 545 bp, Glycine max
  Peptide Sequence Number=SeqID_7940
  Probeset Number=SeqID_9823
agcggacgcgtgggcggacgcgtgggcggacgcgtgggcggacgcgtgggcggacgcgtgggcggacgcgtgggtgcaagtggaagcccttttgaaaatgtagatcttggaaatggagaagttggccatgtaaatcaagccaacaacatgtacctgtttccagggtaggcatgcctttgtggcttatattttttcacggatcatgccactcagtggaaacattggcataatttctaccgcaacatttcatttcaggattggtttggggacacttttatcaggtgctcgtcatataacagatggaatgttgcgagcagcagccgaatgctcagtaatgcatgtgtgcaaaatgtgaggatttttatgttaactgttaagtagtaaatgttaacatacatgatagtcctctgcactctccataagctctcgactacttttcatcttcagcacatttcttctaaaaccttgcttcatacatgacagaagatgatgtccggaaaggaatcttgtatccatccattgactgtatacgagatgttacagca

SEQ ID NO: 45 - DNA, 1595 bp, Glycine max
  misc_feature (1)..(1): n is a, c, g, or t
  misc_feature (33)..(33): n is a, c, g, or t
  misc_feature (45)..(45): n is a, c, g, or t
  misc_feature (100)..(100): n is a, c, g, or t
  misc_feature (115)..(115): n is a, c, g, or t
  misc_feature (119)..(119): n is a, c, g, or t
  misc_feature (154)..(154): n is a, c, g, or t
  misc_feature (194)..(194): n is a, c, g, or t
  misc_feature (203)..(203): n is a, c, g, or t
  misc_feature (206)..(206): n is a, c, g, or t
  misc_feature (264)..(264): n is a, c, g, or t
  misc_feature (322)..(322): n is a, c, g, or t
  misc_feature (324)..(324): n is a, c, g, or t
  misc_feature (336)..(336): n is a, c, g, or t
  misc_feature (427)..(427): n is a, c, g, or t
  misc_feature (757)..(757): n is a, c, g, or t
  misc_feature (761)..(761): n is a, c, g, or t
  misc_feature (822)..(822): n is a, c, g, or t
  misc_feature (923)..(923): n is a, c, g, or t
  misc_feature (955)..(955): n is a, c, g, or t
  misc_feature (1131)..(1131): n is a, c, g, or t
  misc_feature (1134)..(1134): n is a, c, g, or t
  misc_feature (1240)..(1240): n is a, c, g, or t
  misc_feature (1271)..(1271): n is a, c, g, or t
  misc_feature (1351)..(1351): n is a, c, g, or t
  misc_feature (1443)..(1443): n is a, c, g, or t
  misc_feature (1454)..(1454): n is a, c, g, or t
  misc_feature (1480)..(1480): n is a, c, g, or t
  misc_feature (1485)..(1487): n is a, c, g, or t
  misc_feature (1490)..(1490): n is a, c, g, or t
  misc_feature (1494)..(1495): n is a, c, g, or t
  misc_feature (1504)..(1504): n is a, c, g, or t
  misc_feature (1507)..(1507): n is a, c, g, or t
  Peptide Sequence Number=SeqID_7941
  Probeset Number=SeqID_9824
ngtcagcaggacacgacgttgatgcgttgtgtnatagtatcaatntctcaccactcgcctgtgttcacactcacttctctcctcagtctatgtctccacnacaactctattatantatnagatcgacacgagccacatgtgtaccagccactanagagttgcgcatatatttttgtctgtgtcgtctcactctnatgttattngtntagtcatctcacactctgcgtcgcgacgtgagctagtgctgtgtgtgtgtatccacgncgcagtgatctatgtatgttgctgttgtgtagacagatgatgacacgaagattcactncngagcgcaatacngatggatgtcttgatgcatatcgagggtgtcatgtgcctccgccgcacgtgatggtgtacgtgtcgttgacagtttgtgtctgcctcatgncgcgacagatgtacctatattatcgcccgccatgcactgttgtatgagtgagttgtgtaggtgtgtctgtgttggtgtatagttgtcacacgctagccacagccaggtgtgtgtgtgatgcgcgcttgtggtgtgtcgcattaatgttgttatttgtctattattattagaccaccacacatcactcacatctctgaatctatagagtacacgtattattgtattgtacgcgctgtgacaccgtgtgtgatgttacaagtactggatccacagtttgtgcattccgattcctgtgtggtcgcgtggcttcaccgcgcgaccatgtgtacnagantcgtccaagacgtccagactccacttcatgctgtctgcgctgtaaggtaatacagcagatnatacgaacatgtagttaatgagtagttagaagtagagaagatgcgtagtacgcatataagaagtgcgacggtggtcacatgattagacagacactcatagnatgtcacctcatttgtatgtcgtagttttgtngtcagtcatcaggatatataagcattgttatgagtgtgttgacatcttgttgatggtgttcttgttacaatcttttcctctctttgtttctcattgtctatcttggtgcggtctggcgcgtcgcggcgtggcgtcactacgtcattaacttatactaccgacacataaatcactcntanccttcgtgtggcgtgatgatcgatagacgtaatgtggatgatataggaataattatgaggtgatatggagcgggagcacgagggaggtggaaggaatgagatgagncgtagtagtggagagtagagtgtctgtgatntatatagagagagagaacggcgaagacagggagaagaatgagacgtagcgagtgacagacgctcggctgtgttgtctgtnttctatctatggttctattatggtttggttgtggatgatatgtctctgtccgacgggagaatgtggtgtgcgtgatatgtttgtcgtgcgtnaatgtggtagngtctctcgtactgttttctatacacntctcnnnttntgtnntttgtgttntanagagagagagaatacggtgacgataagtcggcgagtggcgggcggtgggaagacgcaaggaaagcgaaaagagaaggagacacaacca

SEQ ID NO: 46 - DNA, 1950 bp, Glycine max
  misc_feature (1)..(1): n is a, c, g, or t
  misc_feature (24)..(24): n is a, c, g, or t
  misc_feature (28)..(28): n is a, c, g, or t
  misc_feature (42)..(42): n is a, c, g, or t
  misc_feature (73)..(73): n is a, c, g, or t
  misc_feature (82)..(82): n is a, c, g, or t
  misc_feature (87)..(87): n is a, c, g, or t
  misc_feature (93)..(93): n is a, c, g, or t
  misc_feature (123)..(123): n is a, c, g, or t
  misc_feature (285)..(285): n is a, c, g, or t
  misc_feature (490)..(490): n is a, c, g, or t
  misc_feature (543)..(543): n is a, c, g, or t
  misc_feature (569)..(569): n is a, c, g, or t
  misc_feature (576)..(576): n is a, c, g, or t
  misc_feature (646)..(646): n is a, c, g, or t
  misc_feature (950)..(950): n is a, c, g, or t
  misc_feature (962)..(962): n is a, c, g, or t
  misc_feature (1037)..(1037): n is a, c, g, or t
  misc_feature (1118)..(1118): n is a, c, g, or t
  misc_feature (1120)..(1121): n is a, c, g, or t
  misc_feature (1123)..(1125): n is a, c, g, or t
  misc_feature (1127)..(1127): n is a, c, g, or t
  misc_feature (1131)..(1131): n is a, c, g, or t
  misc_feature (1145)..(1145): n is a, c, g, or t
  misc_feature (1194)..(1194): n is a, c, g, or t
  misc_feature (1208)..(1208): n is a, c, g, or t
  misc_feature (1234)..(1234): n is a, c, g, or t
  misc_feature (1237)..(1237): n is a, c, g, or t
  misc_feature (1242)..(1242): n is a, c, g, or t
  misc_feature (1244)..(1245): n is a, c, g, or t
  misc_feature (1249)..(1249): n is a, c, g, or t
  misc_feature (1251)..(1252): n is a, c, g, or t
  misc_feature (1257)..(1258): n is a, c, g, or t
  misc_feature (1266)..(1266): n is a, c, g, or t
  misc_feature (1336)..(1336): n is a, c, g, or t
  misc_feature (1349)..(1349): n is a, c, g, or t
  misc_feature (1390)..(1390): n is a, c, g, or t
  misc_feature (1478)..(1478): n is a, c, g, or t
  misc_feature (1539)..(1539): n is a, c, g, or t
  misc_feature (1548)..(1548): n is a, c, g, or t
  misc_feature (1572)..(1572): n is a, c, g, or t
  misc_feature (1574)..(1574): n is a, c, g, or t
  misc_feature (1576)..(1576): n is a, c, g, or t
  misc_feature (1587)..(1587): n is a, c, g, or t
  misc_feature (1591)..(1592): n is a, c, g, or t
  misc_feature (1604)..(1604): n is a, c, g, or t
  misc_feature (1606)..(1606): n is a, c, g, or t
  misc_feature (1608)..(1608): n is a, c, g, or t
  misc_feature (1627)..(1627): n is a, c, g, or t
  misc_feature (1657)..(1657): n is a, c, g, or t
  misc_feature (1659)..(1659): n is a, c, g, or t
  misc_feature (1668)..(1669): n is a, c, g, or t
  misc_feature (1674)..(1674): n is a, c, g, or t
  misc_feature (1683)..(1683): n is a, c, g, or t
  misc_feature (1694)..(1694): n is a, c, g, or t
  misc_feature (1714)..(1714): n is a, c, g, or t
  misc_feature (1733)..(1734): n is a, c, g, or t
  misc_feature (1763)..(1763): n is a, c, g, or t
  misc_feature (1769)..(1769): n is a, c, g, or t
  misc_feature (1778)..(1778): n is a, c, g, or t
  misc_feature (1783)..(1783): n is a, c, g, or t
  misc_feature (1785)..(1785): n is a, c, g, or t
  misc_feature (1826)..(1827): n is a, c, g, or t
  misc_feature (1829)..(1831): n is a, c, g, or t
  misc_feature (1857)..(1859): n is a, c, g, or t
  misc_feature (1862)..(1862): n is a, c, g, or t
  misc_feature (1867)..(1868): n is a, c, g, or t
  misc_feature (1874)..(1875): n is a, c, g, or t
  misc_feature (1877)..(1880): n is a, c, g, or t
  misc_feature (1882)..(1886): n is a, c, g, or t
  misc_feature (1888)..(1888): n is a, c, g, or t
  misc_feature (1923)..(1924): n is a, c, g, or t
  misc_feature (1927)..(1931): n is a, c, g, or t
  misc_feature (1936)..(1937): n is a, c, g, or t
  Probeset Number=SeqID_9825
nagtagatgtggatgatacatcgnaaanacatcacagacacncacatcgagctgtgggtagagatagtagtantatacgagnctcgncgcatnaacacgtgtgcatgatgaagcggtagagantctatatagtgttgacgctcgtgtggtggtgtgtgagggagtaggtctgtcggtgctggtccgcgctatgatcgtatttattgtatatgcattacagtgaattagaatagtggtgctcagtaagtatatagacatagatattataatatatatgatacgtanagcgtgttgaggtacgtgctacacgctagcgcgcgggcacacacgcgcgtgggtcgttcgaatatcttttgttttgtattaagtgcgcgcgcacagaatatagaacacaataacatgttagtaatatagagcttatgttgtattaatatgatgtgttatatgtagatgatgcagaggtgatgtatgtgagagggaggtgatatanataattttagtatatatcacggcgatgtagtggcagacgcgagagaatagtgngtagcgggcgcatctctttaatgatntgatgancagaagaggtcaacacacactacattatatcttatatatgttatttgtgtgccgtgtgatataggtagantataaagagagtatagagcatatactagcatatagtgatatcagtatagtggagggagggtgggtgggatgtcaagacacaatagagatattagtcatatcatatatatacatccgtgttctggtagatgttgtgagtcgcgtgtgtacaagagagttattatatatatacgtacagacaatatactagtagagcggttgcgggccgcagccatctagctgtccatgtgtgtgatgatatgtatagaataatatattgtctatagagaacacgacacacaaataatatcatacagcagtgaatnagtaagagacgncgagacgtgcagcgtggacagtaatttgcgttatgtagatttcggaaggctgtcgatgatgagtcaatgtgagtngggaggcgtctgtggtgatttcagcatcccatccggcgcgcgcgcccgcgcggacggatgtgcagcgatgcgcggagagananntnnngntgcnccggacacacgcgnaagaggtgtgaggtagggaagagagacgagtgtggaggcgcaagtagcngctcagatagtatnttagtctgttgcattagagtactganttnttgantnnaggngnnatacnnccccccantgtgctcggcagtgcttgtgagctctgcgtatatgatacatcacccgtgacacctcctcgcataaatatnagcagcgtagtgnatgtgttacacagttgttttactctaatgttatatcgtcgntgtcatcctgcaccgtgtctggagtgttgtgtgtctcggctgctcaataatagattgtgattgggatgtataaggtaataatataaanatatttatcgacacgcatgcacgcactcggcgtattcactctgccgctggcccgcgcgttntagtccccnctagcgcatgatctgtatctttananancacacaacaanaccnnatagaacgtgtngnanacaaagtacagagaaggcnagcagtataatagatgtagccaagacagtngngagtgggtnncgcgnagggctgcntgcatgagtanggtgaggatattggtatgtnagagcctgtctggtgtgcnnctctttggtgttgttatgtggtggtatgntgtgangctatagantatgngngggagaagtgattgtaagatgtgtatcatgttgccatccanncnnntgttgagcgtgacactctctctacannnttntggtnntcttcnncnnnnannnnncntatattataaacacaaccaacaaacaataaaaaannttnnnnnaaaannaaaaaaataaaaa

SEQ ID NO: 47 - DNA, 316 bp, Glycine max
  Peptide Sequence Number=SeqID_7942
  Probeset Number=SeqID_9826
gtatgtgatatcagtgcgtggatgcttaacaaacctgatgaagctcttttttgctgtttcaagagtaggaagtggatcttcaagcaatgtagttctgtttttgtctgatataatgggaatgtattttgtatcttctattcttttgatcacgagaagctgagcgactgaatacatgattattataacagaggtatggagtggctgtatccagtgtgactcttataaggggagtgtgatgcaatttttggggcgtagagcattactttcactgctgttactttctgcacattatacatctcgccaaattgacgaacat

SEQ ID NO: 48 - DNA, 1499 bp, Glycine max
  misc_feature (45)..(46): n is a, c, g, or t
  misc_feature (222)..(223): n is a, c, g, or t
  misc_feature (227)..(227): n is a, c, g, or t
  misc_feature (232)..(232): n is a, c, g, or t
  misc_feature (518)..(518): n is a, c, g, or t
  misc_feature (550)..(550): n is a, c, g, or t
  misc_feature (784)..(784): n is a, c, g, or t
  misc_feature (937)..(940): n is a, c, g, or t
  misc_feature (1065)..(1065): n is a, c, g, or t
  misc_feature (1132)..(1132): n is a, c, g, or t
  misc_feature (1296)..(1296): n is a, c, g, or t
  misc_feature (1390)..(1390): n is a, c, g, or t
  misc_feature (1416)..(1416): n is a, c, g, or t
  misc_feature (1470)..(1470): n is a, c, g, or t
  misc_feature (1497)..(1497): n is a, c, g, or t
  misc_feature (1499)..(1499): n is a, c, g, or t
  Peptide Sequence Number=SeqID_7943
  Probeset Number=SeqID_9827
agaaaagagaaagagaatgattgttgttagtaggagggagtaganngggggtgagactacaaccgcgtgtgttatcgcacccgcgcgaagaccacgccgccgccccacgctcacggtactccctcgtcgccaactgtatactacctccgcccccgccccacccaccctccctctctctacccctccccacgccacgggcggcgtgcgctacgagccctcgcnnaaantgtgntaattcgttatataaagaggtgtataatacaagcgcagtaaaacatagtatgtaatattccctaatatatatcttgcgagagaagagagattgcggatgaacagatataataagtggggcatggtagaatagatgaatatagggcgcgtgatagtaatatgtgcggagaatatatggtgagatatggagtggtaaaatggatacactatactagtaatactctatgtttttaactacgcttgtgtagttatgaaataaccgcgcggccacccgcgggggtgcgcgngagcgccaagaatataatacatcagcggcggngaagcagtagtctctccacccccgcgcgcctatccttcatgtgttcgaggggttgatatatatagacagcggcatattccgctgccgagcgcgcttggcgctccgctccgcgtcgcgccgtcgcgcgtcccacggctactttggcgcttatgtgctctccataactcccactatcgcacatccctcctgtccactaccataattcactcgcacaccacacacgtgctggcacanaaagccggcggtggttttggtgtaatagtgtgtgggtggcggcctataaataactccgcggcgcacaccaccgccgcggcgctctaccggcgtgctcgtcttcgtatatcgctctgttggttgctcgtattgctgcatatttcaattgcgggnnnnaccgacgacgtccgcgaaataccgcgcggcgcgtgtggtgtggtggagtattattaatgtcactatatatttatctccctctccaccactcgtttatatattgttgtattcctgctccccacccnccctgttcgtctcgtctctcctcacgccctccactacaaacaccgcgtcgcgaagacgcatttgtgntcttctctgccgcgcacatatattatcttgcgcaatactccactcagcctctatgttaattgagagagctgattgtatgtgcgcgtcaatattactatcgcgcgacgctccaaacactcgggcgcggaacacacaaccaccgacgcgtggtgtggcctcactangttacgtgtcgcggcgtcgtacattgagttgttctggcgctgtgtgtctgttccgtctctatatatctctatctattatattaactctgcgcgncgcgagctcgcgtgcgtcgatcaccnggcgataaaacacagcgcctcgacacctatatacactcatcactcccctacatncttcgcgcgctgtgtcgcgcgctactnan

SEQ ID NO: 49 - DNA, 630 bp, Glycine max
  misc_feature (168)..(168): n is a, c, g, or t
  misc_feature (309)..(309): n is a, c, g, or t
  misc_feature (342)..(342): n is a, c, g, or t
  misc_feature (350)..(350): n is a, c, g, or t
  misc_feature (377)..(377): n is a, c, g, or t
  misc_feature (383)..(383): n is a, c, g, or t
  misc_feature (391)..(392): n is a, c, g, or t
  misc_feature (397)..(399): n is a, c, g, or t
  misc_feature (408)..(411): n is a, c, g, or t
  misc_feature (413)..(417): n is a, c, g, or t
  misc_feature (431)..(437): n is a, c, g, or t
  misc_feature (440)..(441): n is a, c, g, or t
  misc_feature (444)..(445): n is a, c, g, or t
  misc_feature (447)..(448): n is a, c, g, or t
  misc_feature (451)..(451): n is a, c, g, or t
  misc_feature (456)..(459): n is a, c, g, or t
  misc_feature (461)..(463): n is a, c, g, or t
  misc_feature (465)..(468): n is a, c, g, or t
  misc_feature (472)..(473): n is a, c, g, or t
  misc_feature (481)..(482): n is a, c, g, or t
  misc_feature (484)..(486): n is a, c, g, or t
  misc_feature (490)..(492): n is a, c, g, or t
  misc_feature (494)..(496): n is a, c, g, or t
  misc_feature (498)..(498): n is a, c, g, or t
  misc_feature (501)..(509): n is a, c, g, or t
  misc_feature (511)..(516): n is a, c, g, or t
  misc_feature (518)..(518): n is a, c, g, or t
  misc_feature (521)..(524): n is a, c, g, or t
  misc_feature (526)..(532): n is a, c, g, or t
  misc_feature (536)..(538): n is a, c, g, or t
  misc_feature (540)..(541): n is a, c, g, or t
  misc_feature (544)..(544): n is a, c, g, or t
  misc_feature (546)..(553): n is a, c, g, or t
  misc_feature (555)..(557): n is a, c, g, or t
  misc_feature (559)..(581): n is a, c, g, or t
  misc_feature (583)..(590): n is a, c, g, or t
  misc_feature (592)..(609): n is a, c, g, or t
  misc_feature (611)..(611): n is a, c, g, or t
  misc_feature (613)..(630): n is a, c, g, or t
  Peptide Sequence Number=SeqID_8875
  Probeset Number=SeqID_9828
ctcccaacatccttaaggagcatcatctctgaatatggtgaacaaattgttaagctaggaggaaggatacttgagataatgtcaataaatcttggccttagagaggattttctcctaaatgcatttggtggggaaaatgaccttggtgcttgcttgagggtgaatttnttcccttagtgcccacatcctgaccttactctgaaagcttccttttactcagatactagtggtatgaccatgcgtgtccctgatgataatgtgataggacgtgaagtcgccataggtgatactggtcactgttaagccatnctccaatgctccatcatcaacatgggtgaccanatcctgtnctgaacaatgcgacgtacacgatttanacccanggtgatcnngcctnnnaccggatcnnnngnnnnngctttttctctgtnnnnnnnccnnttnncnntcncgggnnnngnnntnnnncttnngttggggnntnnntccnnncnnngnttnnnnnnnnntnnnnnncnctnnnncnnnnnnncgcnnntnnggntnnnnnnnngnnntnnnnnnnnnnnnnnnnnnnnnnngnnnnnnnncnnnnnnnnnnnnnnnnnngntnnnnnnnnnnnnnnnnnn

SEQ ID NO: 50 - DNA, 1451 bp, Glycine max
  misc_feature (7)..(8): n is a, c, g, or t
  misc_feature (31)..(36): n is a, c, g, or t
  misc_feature (65)..(66): n is a, c, g, or t
  misc_feature (77)..(77): n is a, c, g, or t
  misc_feature (326)..(326): n is a, c, g, or t
  misc_feature (487)..(488): n is a, c, g, or t
  misc_feature (699)..(699): n is a, c, g, or t
  misc_feature (924)..(924): n is a, c, g, or t
  misc_feature (1208)..(1208): n is a, c, g, or t
  misc_feature (1211)..(1211): n is a, c, g, or t
  misc_feature (1243)..(1243): n is a, c, g, or t
  misc_feature (1271)..(1271): n is a, c, g, or t
  misc_feature (1348)..(1348): n is a, c, g, or t
  misc_feature (1371)..(1371): n is a, c, g, or t
  misc_feature (1375)..(1375): n is a, c, g, or t
  misc_feature (1435)..(1435): n is a, c, g, or t
  Peptide Sequence Number=SeqID_8876
  Probeset Number=SeqID_9829
gaaaaannaaaagggggtatgtgagaagggnnnnnntgatagcacactgattatcttttctcttnnccctcgtcccntgttgtaccgaaatgatagggggagggccgacgcgcacgcccgccggggctggagcggggtgtatgtcgcgggccgccgctccccgcccggattctgacgacacgtagagcgagggtgatactcttacgatgtgttgggatcgtctccttcgccctttcgccgcatgtggtgtggcctagcctctctccaaccaccataatacatatatgtagatatgggtgcatactgctctctatctgccgcgtggngcgttgatggtggtatgtggatgagttgtgttgtgtctttatagatctcattaatattcgccgtgtaggaacagctctgatatctctgccgtcggagatgtatgatactcaccgcgcgtcttaatctcttctccttctcaatctagcaataagacatcatnncacctaatttaatgccacactacatcaacactatcattcccacacatcaggagggcgcgctctcttcatctctatcgttaattttcgtgtcttatatacttaataggaagcttggagtgtgactacaatatcgaaaattgattggagagtgtgtgatatgaataaatggtaaagcgggtgagagatggatgtgctgtgtagtggtagcagnttatgtatatgtagagagggacgtatatggagatgtgcttatgacatgtctgcggtgcaatgcgtgtgctcgcttgtttctcgtgtcgttgttggcgtgcgctgtcgtactggtgcatttagtgaggctgggtggcgcgtcaacatcatatagtatggtcgcatcgcgcgccccgtgccgcacatcgacgctggcgtgtgagacccgagtgctacttctaccctnctactacgcctcggcgcgctcccggcccggacacacgacaacacacgacgcggttgcctagcacgtcccggtcgcatacggctgaagacgtgcatatcatgtaggtgatcgaatcagtgtcgcgtacctctgtgtgatgttgacccgctcactatactttcctatcataatctactgctcaccctatacataaagacggcgtagataatatgtgccgatgacgtcttccgctattctgttcagctccataatatactgatgcatacatgctctactcgtcgcgnctntgcgtctttcgcgctctgtttgttctaatgancgatggtccgctgctaacgttcttgcgncatacatcgatcatcgaattatacacatcgcgatactaggacatgcaacggtgtacagtcgcacgtagactatatgntggtgcgccgcactcagatccangctntacgcgcgacacagcatggcgacggacttagtagagcgcttctatgctgcgttattatgngtgctactgtactaag

SEQ ID NO: 51 - DNA, 1531 bp, Glycine max
  misc_feature (1)..(1): n is a, c, g, or t
  misc_feature (147)..(147): n is a, c, g, or t
  misc_feature (149)..(149): n is a, c, g, or t
  misc_feature (151)..(151): n is a, c, g, or t
  misc_feature (154)..(158): n is a, c, g, or t
  misc_feature (163)..(164): n is a, c, g, or t
  misc_feature (170)..(172): n is a, c, g, or t
  misc_feature (175)..(176): n is a, c, g, or t
  misc_feature (181)..(184): n is a, c, g, or t
  misc_feature (192)..(193): n is a, c, g, or t
  misc_feature (195)..(195): n is a, c, g, or t
  misc_feature (404)..(404): n is a, c, g, or t
  misc_feature (525)..(525): n is a, c, g, or t
  misc_feature (564)..(564): n is a, c, g, or t
  misc_feature (640)..(640): n is a, c, g, or t
  misc_feature (789)..(789): n is a, c, g, or t
  misc_feature (793)..(793): n is a, c, g, or t
  misc_feature (902)..(902): n is a, c, g, or t
  misc_feature (951)..(951): n is a, c, g, or t
  misc_feature (985)..(985): n is a, c, g, or t
  misc_feature (1114)..(1114): n is a, c, g, or t
  misc_feature (1146)..(1146): n is a, c, g, or t
  misc_feature (1257)..(1257): n is a, c, g, or t
  misc_feature (1265)..(1265): n is a, c, g, or t
  misc_feature (1276)..(1276): n is a, c, g, or t
  misc_feature (1286)..(1286): n is a, c, g, or t
  misc_feature (1332)..(1332): n is a, c, g, or t
  misc_feature (1370)..(1370): n is a, c, g, or t
  misc_feature (1380)..(1380): n is a, c, g, or t
  misc_feature (1402)..(1402): n is a, c, g, or t
  misc_feature (1408)..(1408): n is a, c, g, or t
  misc_feature (1410)..(1410): n is a, c, g, or t
  misc_feature (1412)..(1413): n is a, c, g, or t
  misc_feature (1458)..(1458): n is a, c, g, or t
  misc_feature (1489)..(1490): n is a, c, g, or t
  misc_feature (1506)..(1506): n is a, c, g, or t
  Probeset Number=SeqID_9830
ncaagacgagagacgagatgcgtagagaagtacgacacatcaacgacgacaagagactatgagtcgcacacagtacacaccgaagagtggtgagaggccgcggaggtgcatacaaacatacacacacacccacaccacttctttttntntnttnnnnnccctnngttaannnccnnagggnnnnacccaatnncncacacccacatatcatatacaacacctcacaacatagatataaagaacaggacaagcgacaccaccgacacgcaacagcgtcaggcacaacagaaagatatgtatacgttaaatcacaacaagacacgccagcatgaaatattatatcacaataatatcagctattcatcaccacacacacacaacacaatatagtaacatacagaagnggagagacgcagagaattatattaaacaatcaccacccaacaccacgcacttacgcgaggggggggggtggtggtgaggataataaaagcaaacaccccacaacataacataataacacgncacacaagttgatgacacaccacacagattagttgcggncacacacaacacacaacaatacggagaacaacgagactatatataataataaagaagagaataacgcacgagtgtnggagatgaggtgcgaaggagaacacaaagaacagatctaagaacccagatagttacactcagttcacccatgcaagcatattataaggcgtgggaatagctactagagataatatgattagaatgatccaaactaagtgtcacaacacngatngttgacagcacccaatatcataaccccttacatcagaataacataaagacggaggtgtatgagataaaatagagagcatatgtggtgtgatcagtgtagtagaaatatnaacagaaacacgagtactgccccatcacgaagcgcccacaaacacgagnataaaccagtgtagcaggcgaggagtcggtgtgnggagcgagacggaacgccatgagaaaatttaatcatgccagacgtcatccctcccctccctcccacaaaataatgtaaatctgcgagcgggcggttgagagagaatggacataagattggtgctgtatnatgaaattgaagaaggcgacagagagcatatngatcttagagtcgaacggcgaggaggtatgtgttgttgtttagttattgatggagagtagaggttgggtgatagggattgtgtgaggagtggtcggagtgagaagtattgngatttggngggagtatgtntttcttagtntggttgtgggtattagtcgggtcgtgggtgggttggtatgtattangttgtttatggtggggttgtgtgtttggatttttgttntcggtggttntgtgttggtttggttggttgtngtggtntntnngtgtgagaaggtagatgtggtggtgtttctgtgttttgttgtttngtgtttttgtggtgtttttttgttgtttgtnntgtttgttttgttttnttatttggttggttatataagtggt

SEQ ID NO: 52 - DNA, 1599 bp, Glycine max
  misc_feature (871)..(871): n is a, c, g, or t
  misc_feature (878)..(878): n is a, c, g, or t
  misc_feature (1017)..(1017): n is a, c, g, or t
  misc_feature (1101)..(1101): n is a, c, g, or t
  misc_feature (1154)..(1155): n is a, c, g, or t
  misc_feature (1185)..(1185): n is a, c, g, or t
  misc_feature (1207)..(1207): n is a, c, g, or t
  misc_feature (1234)..(1234): n is a, c, g, or t
  misc_feature (1312)..(1312): n is a, c, g, or t
  misc_feature (1404)..(1404): n is a, c, g, or t
  misc_feature (1413)..(1413): n is a, c, g, or t
  misc_feature (1415)..(1415): n is a, c, g, or t
  misc_feature (1420)..(1420): n is a, c, g, or t
  misc_feature (1467)..(1467): n is a, c, g, or t
  misc_feature (1513)..(1513): n is a, c, g, or t
  misc_feature (1517)..(1517): n is a, c, g, or t
  misc_feature (1584)..(1584): n is a, c, g, or t
  Peptide Sequence Number=SeqID_8877
  Probeset Number=SeqID_9831
tgtcaccaaactagacatagccatcattaataaattagtatcacgcgaggcgcctggacggagcgtgcgcaatcctcgccctgcgatcagacgcacagtcgctatagcgatgtagcgctaccgtatgctccccgtccgctcacccacgcacggcccgcatgcatctcctgctcttttcagctgctcttactgtttcgtgttcttcatcaccattactcctgctcttcattcgtaacgactactcgttatatctcgcatattttatcatcgtcattctccggcgctaccctcggatggtaccgctattttatatatcagcggagttgtttataggtgcagttcagttggatagcggcgcggcgctcggggcgtgatgtgcgtgcaagttgatcggcaccatataacgcacgacgatgcagctacgtacaattaaccatggtactagtagattatatgataattagtgacccgacaatagtgagtccgcgtcgcaattaacttccccagtccagcacgcggctccgcggcatggcgtgagcgctcggtgggacgatgcaggttacgatcgcctatggtatatataacttagtccagtcctcgcttattgtgctgatctagaacagcagctcgcatcggtataattaacttatcgcacaatgatgctgccatccgcacgtagttcatatatatttgtgtgtgcgtctcgcgtgtatattgcgtcgtatctaatccaactcgttacaatgtcattgagacgacgctaccataattataccgctgctactcataccaccgcggcctagcgcgatgcgatactacatctctccgtacgacgcagccgcgccaattattatcaacgtcgccacacgcncgccagntggtatagacatgtatcgctactgcgtgacctgtcatattatatttgcaggctatgctcacgatgtatatcgcatcaattcgacgcgtcacacgactgatcagatagatgttgtatgatagatgccgatgtatactgcnacgactggagtttagtcatctaacaatgaatatcacagtagtgcgtgaatatcgcacgatcgatatctgcgatgactgcgtcantcgtgtcctcacatgatacgatcgtcgaccgcgtgtaagtatgcggattttanntgtacacattctactagtgaacatgacatntgaacatattcacgcatctacnactatgccttcgacagtctcctactcngtatataagagcacgagttcatctggacgcgcatacgagcactgtgtatgtggatatatatcgtgtgatgagatatcncaaggagactgctcggcgttcagctcggacagcgatgaggtatgctattcgatattcgacttcgatcgtggatattcacatgttcagagcgngtcacgagncngttgnacactctcgcaagttctcgatatcttaatgtatgtgccttcgacggntgcgagtgggaggtagctctcgctgtcgcgctgcgctctggtcgancagntgcatctgtgttctatagataatagtatagtgtcagcgcagtatcatgtgcgcgagtctagatacantgactcataatcgtg

SEQ ID NO: 53 - DNA, 1583 bp, Glycine max
  misc_feature (31)..(32): n is a, c, g, or t
  misc_feature (82)..(83): n is a, c, g, or t
  misc_feature (565)..(565): n is a, c, g, or t
  misc_feature (608)..(608): n is a, c, g, or t
  misc_feature (613)..(613): n is a, c, g, or t
  misc_feature (643)..(643): n is a, c, g, or t
  misc_feature (654)..(655): n is a, c, g, or t
  misc_feature (659)..(659): n is a, c, g, or t
  misc_feature (666)..(666): n is a, c, g, or t
  misc_feature (677)..(677): n is a, c, g, or t
  misc_feature (696)..(696): n is a, c, g, or t
  misc_feature (701)..(704): n is a, c, g, or t
  misc_feature (726)..(726): n is a, c, g, or t
  misc_feature (785)..(785): n is a, c, g, or t
  misc_feature (787)..(787): n is a, c, g, or t
  misc_feature (791)..(791): n is a, c, g, or t
  misc_feature (819)..(820): n is a, c, g, or t
  misc_feature (842)..(842): n is a, c, g, or t
  misc_feature (882)..(882): n is a, c, g, or t
  misc_feature (884)..(884): n is a, c, g, or t
  misc_feature (913)..(913): n is a, c, g, or t
  misc_feature (926)..(927): n is a, c, g, or t
  misc_feature (937)..(937): n is a, c, g, or t
  misc_feature (939)..(939): n is a, c, g, or t
  misc_feature (942)..(943): n is a, c, g, or t
  misc_feature (947)..(950): n is a, c, g, or t
  misc_feature (954)..(955): n is a, c, g, or t
  misc_feature (957)..(957): n is a, c, g, or t
  misc_feature (960)..(960): n is a, c, g, or t
  misc_feature (963)..(964): n is a, c, g, or t
  misc_feature (966)..(969): n is a, c, g, or t
  misc_feature (977)..(977): n is a, c, g, or t
  misc_feature (980)..(980): n is a, c, g, or t
  misc_feature (1004)..(1004): n is a, c, g, or t
  misc_feature (1024)..(1025): n is a, c, g, or t
  misc_feature (1030)..(1030): n is a, c, g, or t
  misc_feature (1037)..(1037): n is a, c, g, or t
  misc_feature (1046)..(1046): n is a, c, g, or t
  misc_feature (1048)..(1048): n is a, c, g, or t
  misc_feature (1056)..(1056): n is a, c, g, or t
  misc_feature (1071)..(1071): n is a, c, g, or t
  misc_feature (1080)..(1080): n is a, c, g, or t
  misc_feature (1101)..(1101): n is a, c, g, or t
  misc_feature (1104)..(1104): n is a, c, g, or t
  misc_feature (1114)..(1114): n is a, c, g, or t
  misc_feature (1123)..(1123): n is a, c, g, or t
  misc_feature (1132)..(1132): n is a, c, g, or t
  misc_feature (1134)..(1134): n is a, c, g, or t
  misc_feature (1150)..(1150): n is a, c, g, or t
  misc_feature (1158)..(1158): n is a, c, g, or t
  misc_feature (1176)..(1179): n is a, c, g, or t
  misc_feature (1189)..(1189): n is a, c, g, or t
  misc_feature (1201)..(1201): n is a, c, g, or t
  misc_feature (1208)..(1208): n is a, c, g, or t
  misc_feature (1220)..(1220): n is a, c, g, or t
  misc_feature (1230)..(1230): n is a, c, g, or t
  misc_feature (1233)..(1233): n is a, c, g, or t
  misc_feature (1235)..(1235): n is a, c, g, or t
  misc_feature (1237)..(1237): n is a, c, g, or t
  misc_feature (1257)..(1257): n is a, c, g, or t
  misc_feature (1260)..(1260): n is a, c, g, or t
  misc_feature (1263)..(1264): n is a, c, g, or t
  misc_feature (1271)..(1271): n is a, c, g, or t
  misc_feature (1277)..(1278): n is a, c, g, or t
  misc_feature (1288)..(1288): n is a, c, g, or t
  misc_feature (1292)..(1293): n is a, c, g, or t
  misc_feature (1295)..(1295): n is a, c, g, or t
  misc_feature (1323)..(1323): n is a, c, g, or t
  misc_feature (1370)..(1370): n is a, c, g, or t
  misc_feature (1380)..(1380): n is a, c, g, or t
  misc_feature (1385)..(1385): n is a, c, g, or t
  misc_feature (1393)..(1394): n is a, c, g, or t
  misc_feature (1421)..(1421): n is a, c, g, or t
  misc_feature (1493)..(1493): n is a, c, g, or t
  misc_feature (1519)..(1519): n is a, c, g, or t
  misc_feature (1523)..(1523): n is a, c, g, or t
  misc_feature (1527)..(1527): n is a, c, g, or t
  misc_feature (1549)..(1549): n is a, c, g, or t
  misc_feature (1559)..(1559): n is a, c, g, or t
  misc_feature (1569)..(1569): n is a, c, g, or t
  misc_feature (1583)..(1583): n is a, c, g, or t
  Probeset Number=SeqID_9832
gttttctccctctctccgccgtgccccctanntcgtatgtagtgtgtttcatggtcctcctcaccataatagagaaattggnntcgaaatatggagatagaacgaagccgccccgccgcctccgaagggtcagacacgatgttatgcgaactaacagcgtctcacctcaccacgtctctcttgtcttatgtaccccagcaccgacatctgtcaatcaactatgtcgattgatggaaatattttcgtatacaccactactcgtgtgtcagcagcgaagcgcagacgtgtaaatctacgcattccatccgaatttgcggatgattacttataccatccaccatagcatcaaaaccctcatgtactgaacacggaaggtagatactcaacgagaagtcgtggaagctgtctacgcaacgtgtacatagactactgtagatccttcctaagcgcctacacataagtgtgtgtgtagcctatgtacataggagtggactaggtgtgtctagaagagggttggtgtgagtgacttttggatagtcatgagtctagttgtaagtaatgatanattatccgtagtcctgccctacgtgagtacagccgtgtataanatccntactcatatgggtggtaagaggtaagagtncctcatatatnnatcnaattttntatgaggtgtnatgtaagtaattatagtangtagnnnntatatggatatattataggtgngtagtagcagagcgagggagtgtgcgataagtaggatatatgagtatgagagttttgananaaanaaactgaatattatgtatcctaaaaaannaaaaaataaccgtaggatagantggtctgttgtgtggggttgagtgatttgagagagatatntntctgtgatgtgtgtgtgtatgataatganacaccccccccgnnccagtgctcncnccnncccnnnnacanntntgngcnncnnnncttgccgngangatgatgagatgatagatggtccncgtacaactatgagaccatnntgagngtgtttntatcgagtntntcaatganagaatgtgtgtatgnaggggaggntagagggaagactaataatcngcntctcagctcntcggtcctncccccaatncntgtgctcagatttaanagcggtgntacgagacagatacattnnnncgaatagatnatgagatgatanaaggcanagacgacacacnacttgtgtgnatngnanagagaatgattgactaacgntanagnnccactanataganngtacgacgancccnntntatcagttcgacacacattgtagtcgtnttcgattattatgtggataggatgaggtgtgcggatttgcgatacgncacctacgancaacngagagagnngagtggaagcgcgagcaggcttcgcgnagtacatgctctcgcgtgctacccatcgtgcgctagcacgactagcgagagacagacaacacgcgctcacgnggcctgagagtgtgcagtccgtacgnacanatgncgtccctaccacgctcaccganagcacacagnccgagcgaanatcctcaccacgcn

SEQ ID NO: 54 - DNA, 842 bp, Glycine max
  misc_feature (1)..(142): n is a, c, g, or t
  misc_feature (743)..(842): n is a, c, g, or t
  Peptide Sequence Number=SeqID_8878
  Probeset Number=SeqID_9833
nnnnnnnnnnnnnnnnnnnnnnnnnnnnnnnnnnnnnnnnnnnnnnnnnnnnnnnnnnnnnnnnnnnnnnnnnnnnnnnnnnnnnnnnnnnnnnnnnnnnnnnnnnnnnnnnnnnnnnnnnnnnnnnnnnnnnnnnnnnnnntatcacgcgaatgtccgattcgggcgcataatatgtcgagccgctcgaaattgaacaacggaagctctcgagaaattcaaatggtcataccttttcactcggataaccgattcaggcgcataatatatcgaggcgctagaaattacccccgagagctctcgacccattcaaatggtcataacttttcactcaagggtccgatacatggtgcataatatatcgagacgctcgaaattcaacaatggaagctcttgggcaattcgaatggtcataactttgcactcggagattcggttcgggtgcaaaatatatcgagacgatcgaaattgaacaatggatgctctcgagacattcaaatggtcatgacatttcactcgcatttccgattcaggcgcataatatatcgaggcgctcgaaattgaacaatggaagctattgagcaattcaaatgatcataacgtttcacaaagaggtccgatttaggcgcataatatatcgagacgctcgaaattgaacaatggaagctcttgagcaattcaaatggtcataacttttcacacggaggtccgattcaggcgcataatatatcgagacgctcgannnnnnnnnnnnnnnnnnnnnnnnnnnnnnnnnnnnnnnnnnnnnnnnnnnnnnnnnnnnnnnnnnnnnnnnnnnnnnnnnnnnnnnnnnnnnnnnnnnn

SEQ ID NO: 55 - DNA, 1440 bp, Glycine max
  misc_feature (18)..(18): n is a, c, g, or t
  misc_feature (22)..(23): n is a, c, g, or t
  misc_feature (26)..(26): n is a, c, g, or t
  misc_feature (31)..(32): n is a, c, g, or t
  misc_feature (36)..(36): n is a, c, g, or t
  misc_feature (59)..(59): n is a, c, g, or t
  misc_feature (61)..(61): n is a, c, g, or t
  misc_feature (65)..(66): n is a, c, g, or t
  misc_feature (70)..(71): n is a, c, g, or t
  misc_feature (77)..(78): n is a, c, g, or t
  misc_feature (100)..(101): n is a, c, g, or t
  misc_feature (105)..(106): n is a, c, g, or t
  misc_feature (110)..(110): n is a, c, g, or t
  misc_feature (173)..(173): n is a, c, g, or t
  misc_feature (177)..(177): n is a, c, g, or t
  misc_feature (180)..(180): n is a, c, g, or t
  misc_feature (443)..(443): n is a, c, g, or t
  misc_feature (641)..(641): n is a, c, g, or t
  misc_feature (739)..(739): n is a, c, g, or t
  misc_feature (761)..(761): n is a, c, g, or t
  misc_feature (778)..(779): n is a, c, g, or t
  misc_feature (798)..(798): n is a, c, g, or t
  misc_feature (907)..(907): n is a, c, g, or t
  misc_feature (1213)..(1213): n is a, c, g, or t
  misc_feature (1260)..(1260): n is a, c, g, or t
  Probeset Number=SeqID_9834
tggtgtgtggttgtggcntctnntcnttctnncccntgcagttccccgcgtgatctctnanaatnnaacnnaaaganngaggaaagaagggagaaattcnncccnnctcnacaagaacacaaacgccttgtctggggttcctaatactattgtgatgatagttcgtcccccanatanctnattaactaatgaaagtataataattgttttgtgtgcagagggcccgggcgtcacacaaattagagaaatatattctgacttatttatctgctagagggacctcacacgccgaccaagaccacaacacctgcagcgagctcgagtagtaggataatagttactttataatccccaacatctagtctgatgttacttcagtctacataagaaagaacaatagtttatgtgtgtctccatacatgcctatagatcgcgcggcacanaacacaccaagaattagtctgaagtgtagtaaaaggaaggaaggataggaccacataaacaaaaaacagaaagggataattttaatttataatcactgcatgggagtgcgtagatagcgattagtgattagatggaggtgggtgtgtggtgggtgagggaagtgtgtggtcgtgttagtttaggtgttgaatgaggantataatagcgggtgtggaaatggggtgagtgggtgtaggtgcatgtcaagttgagaggagagaggagtgtgagtgaagtgagtggtggtaagtggtgntgggtaagtatacgtatgagantgaggagagaggaattnnaaacacccccccacgcacncatccttcaaccgtcgcgttaatggtcgttatatgtgttgaggggtgtggttgtgttgttttggcgacgccactaccaccacaacccagagccagtgtgtgagtgcggntgggtgtgagagtgtgtatgtgacgcgatctatcactaccccaccttatgccgtgccacgacactagctatcatattgttttagtgttcaattgactatcaagtgcaagtgtagtttctctgacgaggacagccacaagacttgacgtggtgttgtgggtgcgagagagtgtcccttgttatgacgtataccctactagtagtatatacaagaccgcagtgatgcttatgctagtggtaagtatattgtatgtgatgataaaatttcataatcttagtatgagtcaacagtaatcatcttatacanacaacattcatcattaatattacactgcagcgcgcactcacatcgtncactccaacatacttgtgtcagcgctgataactcgagactatataggtagagagagcgtcgtacgtgtttttgtgtagtgttttgttgaggtgtatagagcagtatagtatggagactatacatgcttaagcttcactgttcgtgtgtactatgtgtatgtgtgcgatgagatgtgtttg

SEQ ID NO: 56 - DNA, 1631 bp, Glycine max
  misc_feature (126)..(126): n is a, c, g, or t
  misc_feature (400)..(400): n is a, c, g, or t
  misc_feature (1123)..(1123): n is a, c, g, or t
  misc_feature (1133)..(1133): n is a, c, g, or t
  misc_feature (1305)..(1305): n is a, c, g, or t
  misc_feature (1333)..(1333): n is a, c, g, or t
  misc_feature (1371)..(1371): n is a, c, g, or t
  misc_feature (1390)..(1390): n is a, c, g, or t
  misc_feature (1402)..(1402): n is a, c, g, or t
  misc_feature (1404)..(1404): n is a, c, g, or t
  misc_feature (1461)..(1461): n is a, c, g, or t
  misc_feature (1473)..(1473): n is a, c, g, or t
  misc_feature (1480)..(1480): n is a, c, g, or t
  misc_feature (1488)..(1488): n is a, c, g, or t
  misc_feature (1541)..(1541): n is a, c, g, or t
  misc_feature (1631)..(1631): n is a, c, g, or t
  Peptide Sequence Number=SeqID_8879
  Probeset Number=SeqID_9835
gcccgctcacgtcaacacggcgcgaccgcgcgagcggcacgacctctacaaaattaagaattggaagacagctagcgaatactccacggctaacaacgactatccctcataacggtgatcgcgggntgaataacacattttctccgggaaaccgagcacaagtacgcgatgcgcaaattgattcgtagaataacaaatagagaagttcgctattcttatacccgctagaacacggagcaatgtgacgagctatgttttaatgttagtctctcaaatgaggacataacagatgtgccgatacggcgcggcgggtaatattaacagacttctcaagtacgacccgcctaaaagcttcacttacgagctccttgttaatgtatctgatagcgaccgcgcctgnggtcctgagcggggacagagtacgactgctctcgacataccatctcgacacgcgagcataccccaattagctccaatataaattatgtagcaataaaggactgcatcccacacatcacaccgtactgcagatatattaaatctgactatatattaataacccgcactagacaatacatcaacgaagctccgactactcacttttatatcgagatgcaagataagatgcaactaaacttgcgacacttcgtctcagcctccgccgcatctgagcccatcaacgcagagcgcaatacgtcgcactcgcagcggaagcgcggcggcctgtgatgtcatcctctagatagtcatacgaacgaagagggtacatatcacctcacgtaccagcgcggacacgtgtgaacgagaagcgttatgcgaccgtatacctcgctacgctcgcacacgcgatgcgacagcgccgtagatatgcatccgcagacgcggcgcgcggtagtccaccgtactgatgcacctcgacggcatctccacacggcacagcatgcagtgtgctcgtacaatgaatagagatctagtgtgcgctctaacgtatccgtccgtgagtcgtgttgctcaggcggagcgtctacgtgtatatgctacgcgctctcgcaaccacaactatccaactacgtcatacatttatgtaacatgtctggagacgtttgatactacgcgtctcacnacgactgatngatcaacggaatgcataacatcttgcgtatcattaacacaagcacgatacgtacgatagaaatatacaggagcagtgacggcggatcgccgctcacatatgtgcagtgacgcaggcgtggacgcgatagtgagcagcacgagcagatgtgtaaattctacgtatcaatactnactagatcatgcacgcgtgccgctgagnaggggcagtgcgactcttaactcgagacgtatatgtgntgatcgttgctgtatatanatatcatatctngncctcatatctgcgtacaacgaagctcatctcggtacatgtgcatcgcgatatcccangatgctgacatngacatcngctacgtnctacgatgcactacacgatacgtcatacgctcgatatgcgtgacgtgcgacgntcgcagcgcgagcgtcagcgtgtagtatcgcgtcgctgcgctgcgcagcagcagtatcatgtgtgctctgtcgatagtacgatctcgacn

SEQ ID NO: 57 - DNA, 513 bp, Glycine max
  Probeset Number=SeqID_9836
acgtattctgctcgaggctaaaccttataccctaattttgcttttttagagcgaatagaagagtttaggtggtggggtctttataagaacaacaggatcaacattcattgctcctcaagcaaggaagacgctgacatgaatttcctacggtctataatttcaaaaagcgttcgaggatttttactatagttgtaatctagacgcaattcatgtgcgacattgaataatccgatgatataaccagcgccgactattacttcgattcctactctcatttcggaattcacgaagaaatgttgaaggacagtgtgagaaccaagacatatcaaaatgttatatatcagtacagatttttattcaagaataaagttactcttgatgttggtgctgggactgagattttattactattttgtgccaaagccagggcagaacacgtctatgcggttgagtgctcctatatggcttaaatggccaaggaaattgtttcaactaacggatactctaatgttg

SEQ ID NO: 58 - DNA, 1485 bp, Glycine max
  misc_feature (1)..(1): n is a, c, g, or t
  misc_feature (14)..(14): n is a, c, g, or t
  misc_feature (16)..(16): n is a, c, g, or t
  misc_feature (20)..(20): n is a, c, g, or t
  misc_feature (25)..(26): n is a, c, g, or t
  misc_feature (29)..(29): n is a, c, g, or t
  misc_feature (203)..(203): n is a, c, g, or t
  misc_feature (415)..(415): n is a, c, g, or t
  misc_feature (440)..(440): n is a, c, g, or t
  misc_feature (771)..(771): n is a, c, g, or t
  misc_feature (1105)..(1105): n is a, c, g, or t
  misc_feature (1431)..(1431): n is a, c, g, or t
  Peptide Sequence Number=SeqID_8880
  Probeset Number=SeqID_9837
ntaaaccaaccccnanaaancaatnnttntttttctctcttttttctttctccgccaccccctcagcaaaaaaattgctagtctcccgcgaccgctgcgggcgaggggaggcgtattaactagcggcggctcgcgagggggggcgtgccagcggagtctctgtgttgtttccgcttgtaccccttcgaaatataataacaaancaattgttcatttaatgataaattattgtacagctagtatatcgcagctcagcgcgcacactccgacctaacataactctcagccaggtcgcctctgtgggtgcacgccccgacgactgccctcaccctcgcactctcctacccttcgtgcaaaccccgcctcgtctctgcgccgctcactactagtactatcgccaacctatctctcctcnttagtttctattgggagaaagaganaataacacatactgatgcaactgaattatattattattattatgtcttctttttatctaatacctcatcgcctaccagcctatatcgatttatcctgtttatattctctactctcgtctaatgaattccgcgattattagtcctgggctcggcggttatggtgtgcggctctcccacgcgctagtttgcttacctgaaaaaacacagcgagagcgatgcccggggatctatataagagagggtcgtgcccctgagtgcgctctaatagcagcaactctccacgaaaacgaggggcctctgtgcactcgcgctgttcatatgattgggacantacgcgaagccgcaccagcgacgtcctctgcgagtgcagctctacttaagaggatgtagagaacgcatcaaataacaaactgaggggccatatcggatagggcctcacatatcgtctggcagtggcgctgtcgtgggttccctgcccccccacctctcggccttcacccctgcgctcgcagacacgctcagggaacactcacgtactaactaatatacaaaataataatatgttactacgagtagacttaccaaataaattcttattttaacatctcgccctctccgactccatgacacgcagcgcgttcgctctcgcccacacatttttcatnatcgcctaccctgttctatagcgacctcgtgctgtgatgcccgaccaccgcttccggtctgatgaactgcggatctgagctcacactctgtcgcctactggcgcatcgccaccgcacccactcacgccgacccgaggaacagggcccgccctcgggcgagccactcgcgttatgagcttgttcatgtctatatgactgctgccccgtccacgctcttcttggcctatcctgtctacggccttacgcgcgtaatgttcgccacgagatgaggaacagggcgagctatagaatgtggtgagggatgaagcgcgtccgcgacggtgagnagccagaggtagactatatcccctacccctctgatcacacatgcgcacgcggcg

SEQ ID NO: 59 - DNA, 1550 bp, Glycine max
  misc_feature (792)..(792): n is a, c, g, or t
  misc_feature (1239)..(1239): n is a, c, g, or t
  misc_feature (1325)..(1325): n is a, c, g, or t
  Probeset Number=SeqID_9838
ggcgtgttggagagaggcgcccccctcctaatctttcgcccctcttacactctcatcacaacaaggcaggataataatcacgcacgcagagagggctacatcgcctactgatatacgaaagaagaggttaggtcgatcggatatcgtctcggcaccgagagaggggttatatttttataacaccaaggagcacggtctctctttattcatctaacgttcaaacataaaccacacgtgtaccaagagaaaccttctgctcttcacaccaccatcccgctttatagacctgcgcacaatacgcatgtatgagagctctcgattatattttcttcgtctgtcatgcagcccccacctcacaccgaatactccgccacaatagatcacacccactacatctccacaacataagcgatcgcaaatacgaagcggccatacgcgcgctcgcctacgctatagtaaaataaaccaaccgcgcgcgtggctgtcgaattgtgaatttatgtgatgtaaaaaacagtatgtgaagatccgcgatggcgagacccgacgtggataagtagcaagacgcgtaaagatcctcacactgatttttcggcacttaaaaagagcaataaggttggacgagaaaacatatgagcgatagagaaggtgagataataagatagtatgggagactggttcgttctcgaaggaggacggaacataatgtcggtgcggcgctctcctaccaacccaatgtattgtaccccactcagcacaccagagattcatttcgaggtaagtgaagtaagngaggaatagttaacacccacaccctcccaattttagtagacaataagtaaactatttccacagcgtggagagtcctaataacacacgacaacataacacgcgcggacagcgctatgaccacatgatatcatatagcgttctgtctcagtacgtgagcacctgccgagtagttgtagatttatgagagagaatatacagccgacacttaggcccacagagggcaggttgctatacagaccggcgccaattctatcttctacaaaatcaccgcaaccacgaatcgagtttcatgtaatcacattgctgccacatattacccccgtcgcatattttatatttatactttgcgagctatataccgcggcgaagtactggagataatacattgtcactgattggctcgacactaatatcgcaggagttttggtatgccgccgcgcaccacanacttccgtgtcatattataggacaacaagcgaccgacctatacgcgagctcgtcgaccctagcgcgacgcgtctagctacactatncaaacatcatgaatatatcagaaagtacgaatagagaggggggttagtaagacagccgataaccatacatgactacgtcgtgtgcacggtacacagcgggacatatgtatctcttgtacagcgaccaggatgtctgtatattaatatcagtcacaggatcgtagtacgagcgcacctcgctatgtagattaacatcagttacatcagaacacgcgcgaatcggat

SEQ ID NO: 60 - DNA, 978 bp, Glycine max
  misc_feature (561)..(561): n is a, c, g, or t
  misc_feature (978)..(978): n is a, c, g, or t
  Peptide Sequence Number=SeqID_8881
  Probeset Number=SeqID_9839
gggctgcaggttcccagacgttcgcgttagggaagggtcgtgggccggggcgcccgccgtctattgtgcacgagaggtaacggtgcctcggcgagagggggcacctttgtcagaattttcccttcccgacaatcaaatcggccactgggtcccatgccgcgacgagtctgggtcccacattccacgtcagaaaagcaacatcataagcatctcccgcagtcactcggcggcccatttcgctgcgtcccatataccgtagttcatggcgatttcttaccgaaccagcactgcgatcccgctgcgaaagtataatatattgacccatggggaccccgcgtcccgattcgggatacttgcgtcgcccttactggacgcaccggatgcactgacgcggttgggtgccttcaggtatagagacccccggcttgggttctgtccttccggcttgccgccccacgaccctcaccattggctccatgtggcccgggcactaccgacgggcagcgatgtactcgactgtgcctgaacgacggtccgatggtagccccggaaacataggtnccgagacagaccacgcgtcggcggttaggcaccgtctcccggctcgtctatgccaccaacacatagagcctggtgcaccgcccacgagggcgatacgcgacatctgcggcgctcgtccacccaccccgcaccctacccgtagtgtcgtaagggcgacgcgggtctatgcgaccacgcggtcttgcaagacacgattgcacacctcccagcaacccgcgctggaggattgcaggcctgctgctccactactacgtgcactagcgtcgcatcgcgcgtgcgctgcccgaagtcatcggctactgacgtcttgcacgcctggaaagcacctgtctaagccctaatcgctgcacatccctcagctgctccgtgccctcccgcgtcctggggggtgaccggactgggttttaccgcggttan

SEQ ID NO: 61 - DNA, 192 bp, Glycine max
  misc_feature (191)..(191): n is a, c, g, or t
  Peptide Sequence Number=SeqID_8973
  Probeset Number=SeqID_9840
atattttttcacgtgtaaacgtgagagtaccctctcggcgaccaatattgtcatggatctttttttaacacagtgcaaatgtaaattggggggcttccgatatctcgatgtcgtttatgacctgcctgaacctgttcatggcacgcttatagatccgggcgttactttttgtaaaaaaaaaaaaaaaaaanc

SEQ ID NO: 62 - DNA, 1374 bp, Glycine max
  misc_feature (1107)..(1109): n is a, c, g, or t
  misc_feature (1175)..(1177): n is a, c, g, or t
  misc_feature (1281)..(1281): n is a, c, g, or t
  misc_feature (1361)..(1363): n is a, c, g, or t
  Probeset Number=SeqID_9841
aacacaacaacgtagagaggtgcgcaggatggggcgagggtcatagaatggagagacggcataagtatacaaaagagcggtggtgtagatgaaatgtagagggctgggttatttataatattgtaaccctccatccactctttttgtctgttggggatgatgacgggtagtgtggcaaggagtctatatacacttgtatattatcaaatcgtacgtagcgcatgtgtcaattgtgtatagtacgcgtgcgttggatgatggtgggtggcggggggcgtggcactgcagagaaaataaacgcgatgggcgggtagaggtgtggtgatagtgatattttatcacaaaacattaccaagtataatacactgcctcgctcgcagttgttgtaggagtatcttatatgaaagaaagcacaggacatgcggtgtgatattctatgtcgtgtgttcaatagtgattagagcttagccgcacgaaggaagagggtgtatggagtgaaaagagaggatactcgaggcggcgacgccatatacactgctacaatatcatgtggtaagtggttgtctgctcttgttaggtctgcacgcagcaggtgttgctgcgccgcgcggcgcgcgctgtgcaggtagtgagtgtggtgtgcgcggtgcgttgacgtgagcgctttattatctctcagtcttttattgacattactatcgtcatctctctctaattgactcgttatatatcgacgacataaaaataacctacacatcatccataatactgcctctctacatatacaaacatttactagataacagataaaacgcctaagcaattctaagaagcaaagtgcggaaaaaaatcaaacagactaaaaatactctttctatttagcattcgaatcgggctgtttgacgagagccgcgtgtatgctgtcgtatcccgcggaccgcacaatataataagagtattgtagtccgactatagagggtggagggggtggggagaggtgaggaggaggtgtatgatggtggtagatgttttatatctgcccatttagtgttttattatgaataatagtgaatttatggaggagcgagatatatatgagcagcgcannnggctacacactcgtccaccccagtcccctctctgaccgacccgctccaccggctccagagatcgannnggtacgtggtgttgttcctcgccttggtattaacttcttgttacctacctctcacgcctccgctcacatgcctaagaacgaccgcgcatccacaacgggcgagnaccacccactttccttgttgaccgttgatgatgggctagctggtggccctcggctttgcctcgttcccccccccctccgnnngtgtgcaaaaa

SEQ ID NO: 63 - DNA, 370 bp, Glycine max
  Peptide Sequence Number=SeqID_8974
  Probeset Number=SeqID_9842
ggattcatctcattctggggaacttgatgaataatttgacacattcccgacctcccggccaaatgacctcatgaggatgagatatgatcgacttagaagcatggttggtaggatccaaactgtacagggcgacttgaccactcaggatgaaaggctacagtctttgctgggttggcaggaacctagagatacatcactatgtctgatattctgtcaggcttctgctaccgtagctggtgtcactccattccaagttgtggccctctatactggaatttatggtcagacacattcaaggataccgtacatgctgactttcgtgccgatgaatagctcaaggtggctggctgcaagaacggattgcatggtt

SEQ ID NO: 64 - DNA, 817 bp, Glycine max
  Peptide Sequence Number=SeqID_8975
  Probeset Number=SeqID_9843
aagttagtcagacaacgggccactctctcgcgcctttagaaaccacgagtacgtagatcaatcttgattgatttctctctccgtcccggccggccatgaggagctcagtgcacgtgccagccgcggtagaggcgctgctgggccacccggtggcggcactgtcggagaggccggcgccgcggctaacgcggctgctggtgaacgtgacggtggagcggagcctgtggccggtgcacgtgctgctgggcgccgatgccacggtggccgacctggcgcgcgccgccgtcgacgcctatgccgccgaggggcgcaggccgccgctccccaccgatgacggcgccaccgacgcggccgcgcggttcgaagctgcacctctccaagtacgccctcgacgctcttgacccggaagagaaggtgcttgacctgggctctcgcaacttcttcctttgcgccgccaggtcgacgctgggatcagatcatcatctgcgacttcgctcatcactgacatgtcttgatgtctgaaggaaaaaagtgtgtgccatgtaaaacgagttggcatgtcggcctatatatgtggagtatatataactcatgttcgatccttctttggttgatcggtctgccagatcctctgcatcagtgtgtacgtagtgttagcttaggtatacatacagttcggccaagcaacgatacatacagatacatgtccggcgtatttacgagctcaagatatgtacgtggcgacgctgtatgtatacagctgcaagatgcaacgtttatgtatgtacctagtgccatgatgttacgtttctggact

SEQ ID NO: 65 - DNA, 338 bp, Glycine max
  Peptide Sequence Number=SeqID_8976
  Probeset Number=SeqID_9844
agtatattttgagaggggaccagcaagccttcccctatatggccttctctctgctcataccccttccaaaattgcacattacccaatacagccatcctggagtcactgaaccagggacatgttttgctggccgatctcgatgacatgatggcttcacgcttgggtgctgcttttatgccacatggtctggggcatttccttggtattgacacacatgaccctggaggctacttaaagggcctggaaagaagaaaggaacctggattaaaatctttgcggacaatcagagatctccgggaaggaatggtcagttatggattttctcagtaatcaaaagc

SEQ ID NO: 66 - DNA, 1549 bp, Glycine max
  misc_feature (1)..(1): n is a, c, g, or t
  misc_feature (26)..(26): n is a, c, g, or t
  misc_feature (30)..(30): n is a, c, g, or t
  misc_feature (32)..(32): n is a, c, g, or t
  misc_feature (68)..(68): n is a, c, g, or t
  misc_feature (196)..(196): n is a, c, g, or t
  misc_feature (314)..(314): n is a, c, g, or t
  misc_feature (575)..(575): n is a, c, g, or t
  misc_feature (1106)..(1106): n is a, c, g, or t
  Peptide Sequence Number=SeqID_8977
  Probeset Number=SeqID_9845
ngtatcggctggtgtgcgctgtacangtananttacgatgcgcgtgtcgttacgtatcagctgctcgngcgtcatggacggcatttttcatataccttcgctcgcgcccggtgcgcgactcctgtagcgcgtcgatgcactcgtctgtgcggcgtgcacctcctctcctctgcttcagcgcggcggtgctatctcngcgcacgctctctactagcgcctgcgtgcgtatataatacgcgcgcggcagggtggcgtatatatatataggatcttgttgatgctctcgcgcgtgactcgtcgacgaggttggcgantgtagtatctttctcccttcaccatcttagttaggctttatgctgaccgggcgggccgtgtctttcttcgcatgtatactaattctctcgctggcgcgtgcggcgtgatgctgccccacgtaggtcggctgtctgggtatactatctttcggacggtcttcctttcgtggtgttaattgcggcgcgtttatacctcttctccgtggtggcgctagtgtttcgcgcgttcgctgtctcctttacccgcgctcgttgtcgccntgcgtgagcgctctggactctactcgttgtagttacctgtctccgtgtcgcgtcaccgtcctctgcttgtgggcgccgtgggtatggtgtgctatttaattttctctttgattacttcggtcgctgcgcgtccgctttctgagtggaactccgcctggtccttgccggcgctcctttctcctctttcctctctatattttcgatctatatcggtgtcggtcgtcctttgcgcgggcctttatctggtgggtctactttatttagtgtctatatgggcgcttcggtttcacctgagcgtgtggctctccagtcgggtgtcttcttgcggggctcttatacaaaaaataaaagatcgacggcggctctccccgcgctttcgcccctccggccggggctctctcttttgcagcgccgcgttcatatctgtggatctgcccgtgtgttctgttcccttgcttgtatttttcgggtgtgtcctgttcgtataagcctagggcgcgcgcgtttggggctctcgttttgtctctgttntacgtctatgccttcgccgcccctccttcaagtcagtctcgcggttgcgcgtccggggttccggtcgtgtttgggtcggggcgttactggggcgcactgggaggcatgtgttggtggggagcgcccccctcctctctttctctttttttcatgcgtccctcctcctggctgccctcctccctctttatcaccgtgtggccgcgttggcgcggtttatggggcgtcttccgacttggtggtatgtggcgtcctcgtctgcctaggcgcggcgtctgtttcccgcttgcatatatatttttcttttttcttctttttcctccgtccttcccgggcggtcgccgctttctccgggtcttttacggcggcgcgggtggcctcggaggggcctctcgggcagggcgcgcccgtgcaaggttaacgcatcacctgcggccggcttgtag

SEQ ID NO: 67 - DNA, 398 bp, Glycine max
  Probeset Number=SeqID_9846
aaaaagctagatgtctcgagataggaattggacggtatcaatcattattcttgcccaagtctagggggagaagattgattctggctggtaccatcacatctgaggtgtcaagttctgtaggaggatcttctattgcatcaagagaagatgctatcttgtcacactggaaactacgcagcaagcatctgagggggagtgttggtgtgaagttgaccacgtcgcaaaccacttgacaccaacccagaacagcgctgcagacctatgtccgggtccagcggcggtggtgcagcacctcactccggcggactgcagaggggatgaagacagggacgcggacagaccacagcaccacacacgacagcaacgaccgcaagctccagactatggcgacacagcac

SEQ ID NO: 68 - DNA, 1574 bp, Glycine max
  misc_feature (1)..(1): n is a, c, g, or t
  misc_feature (39)..(39): n is a, c, g, or t
  misc_feature (97)..(97): n is a, c, g, or t
  misc_feature (260)..(260): n is a, c, g, or t
  misc_feature (279)..(279): n is a, c, g, or t
  misc_feature (322)..(322): n is a, c, g, or t
  misc_feature (371)..(371): n is a, c, g, or t
  misc_feature (518)..(518): n is a, c, g, or t
  misc_feature (730)..(730): n is a, c, g, or t
  misc_feature (733)..(733): n is a, c, g, or t
  misc_feature (736)..(736): n is a, c, g, or t
  misc_feature (819)..(820): n is a, c, g, or t
  misc_feature (837)..(837): n is a, c, g, or t
  misc_feature (855)..(855): n is a, c, g, or t
  misc_feature (876)..(876): n is a, c, g, or t
  misc_feature (914)..(914): n is a, c, g, or t
  misc_feature (925)..(925): n is a, c, g, or t
  misc_feature (1094)..(1094): n is a, c, g, or t
  misc_feature (1192)..(1192): n is a, c, g, or t
  misc_feature (1194)..(1195): n is a, c, g, or t
  misc_feature (1204)..(1204): n is a, c, g, or t
  misc_feature (1217)..(1217): n is a, c, g, or t
  misc_feature (1242)..(1242): n is a, c, g, or t
  misc_feature (1305)..(1305): n is a, c, g, or t
  misc_feature (1320)..(1320): n is a, c, g, or t
  misc_feature (1349)..(1349): n is a, c, g, or t
  misc_feature (1386)..(1386): n is a, c, g, or t
  misc_feature (1458)..(1458): n is a, c, g, or t
  misc_feature (1504)..(1504): n is a, c, g, or t
  misc_feature (1535)..(1535): n is a, c, g, or t
  misc_feature (1556)..(1556): n is a, c, g, or t
  misc_feature (1558)..(1558): n is a, c, g, or t
  misc_feature (1571)..(1574): n is a, c, g, or t
  Peptide Sequence Number=SeqID_8978
  Probeset Number=SeqID_9847
ncgtgcagcacgacagagcgctgtgacgtgatgtgggtncgtatctgtgtcagtatgtagcgtgtgatagagcagacgcactccagcgatcagctgngaagtcgtatagaactcgttagtactatatgctgttcgtgtattgagtgtatatagtaatgatcgtctgtcgcatgcgatatcgacacgtgtacgctgttagcgataggacgtaggttcactgtgtccgtgatgcgtcaatacagagtagcgtcgtacggtgngtaagcatcgtgcactgangcgagagagttcacggagatgtgctatgtgatatctggtcagntgtagagctaccagacacgacatgtgcgtatgagtgtcgtagctcatgnagatgtgtgagtgctctgtcgctacttatcacatagacagaggatacagcgtaagagtgagttgaggtgagtgtgagctacagcacatagcacaagaggatagcgtatacgcgactgtagcacatcagtgccgagacgtcttctcancatcctaaccatgcgcatcacccagcattgacgtcggtagtcaacgctagtagatgcgttgtcacatctactggatacagtagtgtcacacacgaaatattaaatgatgattgtgtcactcataaagtgatgttatatgtgtgtaggagggaagcgagtgtgtcagtatctagaaagtcatactgcgagagggataaagtgtctggtagttnttntanatctatcataatgtattgtgtctctatatttaaatcaagattaactaatatgcgacaatacaataaatactataaacacacgnnacaacgtgggacgagangactgtaggtagcgggtnggtgtgctcgtattatattantaataatgtaaaagcgtatattcagcacactcgcgtcnggattacgatnagtggtgtctgtcacatgatgtgtggtgtagctagagtaataaagaggggtagtggcggctgtgagagaagcgtgatgcgaagaacacgagagataacgactaacgattgtgcgtacagttgatgttgtagatgacctactatacaatatatcgtcgtaaagtggaganttgttaatatgtagagcatttcgtatattagtgagggtgtactcctacatactatatattaatatatctcgttctatacatcaatggtgagatgtagngnngagtttatngaagtatgggctnatacgctgtgtctggtgagtggtanagtatctatgtgtctaaatagtatatatattcaaactatatcatttctctatttttcatcctncattagtcttctctnattcactcttctccatcacactccccacnctacaccactacatacacaatcgcatagttgtgtgtnttgttggttgtttgatataatattatttgtagtgatgtttgttgatgatagtgtgtggtgtgtctatcaatngtccccctctatgtgtgtggtatatatcacatatcatcatcacatncgtgagtgtgatgtcaatatagacagtaatngcgtgggtgcgacgagcgcanantgcggcgccaccnnnn

SEQ ID NO: 69 - DNA, 1456 bp, Glycine max
  misc_feature (178)..(178): n is a, c, g, or t
  misc_feature (297)..(297): n is a, c, g, or t
  misc_feature (555)..(555): n is a, c, g, or t
  misc_feature (954)..(954): n is a, c, g, or t
  misc_feature (992)..(992): n is a, c, g, or t
  misc_feature (1024)..(1024): n is a, c, g, or t
  misc_feature (1300)..(1300): n is a, c, g, or t
  misc_feature (1319)..(1319): n is a, c, g, or t
  misc_feature (1321)..(1321): n is a, c, g, or t
  misc_feature (1391)..(1392): n is a, c, g, or t
  misc_feature (1395)..(1396): n is a, c, g, or t
  misc_feature (1398)..(1398): n is a, c, g, or t
  misc_feature (1410)..(1410): n is a, c, g, or t
  misc_feature (1413)..(1413): n is a, c, g, or t
  misc_feature (1420)..(1420): n is a, c, g, or t
  misc_feature (1425)..(1435): n is a, c, g, or t
  misc_feature (1437)..(1439): n is a, c, g, or t
  Probeset Number=SeqID_9848
cgacatatattacattatgtcatatcgcgatacgcattcagacatatacacacatgcagcgaactacgtcgtacagcgtagatgacaacaactaatgaatacaagatagatacgttatatatatatataaatatacgtcatgatattatacgtggtgagtaagagatataataagtantatcacgttatatatcggtgtaggcgtcacctacgcgcctcgcgtctggccgtgtagcttcgctccaaccttcatcgtactgtattctacatatacactcattgatcattctcatatanatttctctatataacatatacacacataggatcagcctcgtagcatagttcggtggtgtcagcgtcattcgagtcgtattgcctttctcgggcccgacatattacatacagtcctgatttacgataaatcctcatgaccaatccgaggaaatcacctctctagcggtctctgtatgtatctcgagcgtatagagcactcaagtgtgacgctattatctctagtcatcgtcccatcgagatgccgtcgtatcaaactantaataatattaggacatatacatatagcgactatcaatctagtgatgattgatgatagatagagtattggggaacgaccaagagtgtagtgataagatatgtagggtgtataccatgcgcgatctcacgctacgctgttcgcgctaacttcagagagacacttactctctatatcttcttctcctactacttctatcatatgttaatatcatttctatattacaaacaacacgaatcaagtagatgacagatcacagcacagtaaggcgtgagttaggtatgtatagtgagaatagtctttatagttaggttattagcttgattcgatgtagataatcacggcggtaggagcaggagtgggcaagaaccacacataagatggacgtcactccttcaacnactctcacggctctccttccgctgtgcgacctctcctnccccacatatatattctcttatatatccttcncctacgcgtccccttacctaccccaaccctgtcgaattttcagtagagaagaggaataagacacagagcacacacaacgcgccttactcacaccacacccaccctcgcgtgcagaaggacagctctgtcactctacgcatctgattcgtcgctggatgcgctccttcgcgcgcgtcagactgacgatggtacaccgtacatctagcgaaccgtcgcagataacaaaactaggatatagatcagtatcataaaatatattaatatatatgtatatgnagagacgacacgataacanancttctcacatcattaccgtccaccctgctacgttcgccgcagctatacctcctctgcaccccgccacagnncanncncctctttttgtnttnttatttngtttnnnnnnnnnnntnnnggtgggggtgggggggt

SEQ ID NO: 70 - DNA, 1362 bp, Glycine max
  misc_feature (1)..(1): n is a, c, g, or t
  Peptide Sequence Number=SeqID_8979
  Probeset Number=SeqID_9849
ncgtgtggcggatcatagcgtcgagacatacggacgactatagtacagacataactatgttgagcgatcacactacagccgctcgtcacgtctgctacatgtatacgtaacatatagtaatatcatacgatatatatacctcgcgcagcagcgaccaactacaatgatctacagagaatataatattagttgaccactcccattgtggcaggaataacactacacaaagacgcaccgagcgcgcacaagagtaataatttgtagtgtagagtcacaatcacgcacgagaaaacatacaccgtcggcgcgcaaatcgtcgatgttgtgcgaaacaattttctcatttatatgtgtttctcccccctgcgttacggtgtttatatagttgtcggcgcacatatagaagaacataacagtgttatatgtgaaataaattcgtcgctattatgattctaacacacaccataccgcgtcgttattaaggtggtattcgcgcatacatcccagcccacactactctggtcctaatctcttcttctctgtaatttatgcgaatgggtgtatggtgtactttgcgcttacatatcaaatcatataaaattactgcaacgggtaatatgtgtctgtgccgccagcgtcgaattaggtatgttatattcatgtatactgggagcacagtgtctggatatcaaagtgcgccgcgcacagctatgctgagtactcgcgagtatatacacgatcacatttactcgtcctgtcttgagcggtcaataatataataaaccaatccccgaatcgggtcgtcctaccccatccagttatccttcctaagtcagcgatgaacacacgatccatttatccccacatcatttcaccactgcgtagtttcgcgccctcactttcattactatctctacattatcactcacatatctataataaataagtgctgcctgcgcacgtcatgattataaatactagcatatgcccgaagcacatctaactcgcgtgtcgagtgccgtcctatttaattaatataaagaaaaccgcggccgccggcgtcagcgggtggcgagtatcatttctatcatgtacggttcataggagttatgaccccgtggatcctcgcattacatcgcacaacacggcagcgctcgctctccacccccaccattttattttattgtgccttcgatcccaatcattgatacgatatatatacattatatatcgtggttatttatcggccgcaagagtactcgcgcgcccaaatggttttcttcatacatcataggacaacaatccgttctgtctcacacccgcctactgccagaaaatatacttatgggtcgaggcctcaca

SEQ ID NO: 71 - DNA, 1097 bp, Glycine max
  misc_feature (1097)..(1097): n is a, c, g, or t
  Probeset Number=SeqID_9850
atccagaaataatcactttctccattcgattcttcctcttgctcttgcacccaatctcctcgctacgtagttagctaatctaaccatcagtccaccaaagccaatccactgagtgcgagagctccatctccatctcgatctcgaccaaggagaggaagctagctagctagcaacaggcagcagcaatggcgggcgtgggtcgtaacatggtggcgccgctgctggtgctgaacctcatcatgtacctcattgtcatcggcttcgcaagctggaacctcaaccacttcatcaacggcctcaccaaccgccccggcgtcggcggcaacggagccaccttctacttcctcgtctttgccatcctcgcgggcgtcgtcggcgccgcatccaagctcgccggcgtgcaccacgtccgcacatggcgcggtgacagcctcgccacctccgcctcgtcctcgctcgtggcatgggccatcaccgccttggcgttcgggctggcgtgcaaggagatccacatcggcgggtaccgcgggtggcgcctcagggtgctggaggcgttcgtcattatcctggccttcacgcagctgctttacgtgctggcgctgcactccggcctcttcgggaaccagttgggtggcaaccatgctggtgggtacccggcggagcatgcgtacggcgcaggcggcgacccgcacaacaagggcatgggcatgggcaccggcggcgtcgccagggtctgaatcgggtagagacctcgccgtgctccatcgcttggcggttgacagtgacgggcggataataaggtgtgtgtgtgtgtgtgtgtgtgtgtgtgtgttccgtcccgtatggtgtgagcgtacgttgtatgcagacatggtgtgcacggtaggcatgtagtgacggcgtgcgtgcgtacatgtgtagtactgcaggatgggcccttcttcttagtgtgttttgtgtttattatgtagtccgagatcaagatggagatcgatcagtccatgctatgcttcttcattctccgaccagacaattgcaatgcatgtctgggtgtggatgaatggctgcacttgtttaatttagtactactactctan

SEQ ID NO: 72 - DNA, 457 bp, Glycine max
  misc_feature (259)..(259): n is a, c, g, or t
  Peptide Sequence Number=SeqID_8980
  Probeset Number=SeqID_9851
aattgcaaatgtctcactcccaaaaatgcccagaaaaatatcactccatctcccaagactcttccttttcctcaagaaactcgtgaagcgccaggagttgaagctcctgaggcactatgactatggagagtaccagttctccgcttcgagcactcctctcattcatcgttaccatcgaaaagagttcaagaacagaggccaccgaggcttgtgttctttcttgtatctgtgttggtgcttggggaatttgaaagtgganggaagtggggaatgccagctggcggagggtctgccaaatgggaacttccaaattgaagatgggttcataggagcagaggatgaaggcgaagaagaatcggtggatgagaaggctgagcggttcattgagagtttctaccagcagatcagaatgcagaggcagaaatccctatagctcttctcttcacattcacatgtg

SEQ ID NO: 73 - DNA, 459 bp, Glycine max
  misc_feature (224)..(228): n is a, c, g, or t
  Peptide Sequence Number=SeqID_9068
  Probeset Number=SeqID_9852
tgctgaactgaggactgtgatgatcgaaacctgaagcaggcttatgctggtgttttttttcatcgagggtcttaagcacttgacttgctcccggtataacactggacctgatgataaggaacctccatggaatcctattacgcctgctgaaaaggatgagaaggcctgccttgtgactctatcagggttgttgaactttactgatgggagttggtcagtgtgcnnnnnagagaggatcgtaattttcacaacaaatttagtggagaagcttgatcctgctctcatcaggagagggaggatggacaagcacatagagatgtcatactgcggctatgaggctttcaaggtgctaaccaagaactacttgagaagttgttactgctgatgttgctgagaatctaatgcctaagtcaattcttgaagattccgagacttgcttgaagagtttgtttgagtctc

SEQ ID NO: 74 - DNA, 1842 bp, Glycine max
  misc_feature (13)..(13): n is a, c, g, or t
  misc_feature (17)..(20): n is a, c, g, or t
  misc_feature (40)..(40): n is a, c, g, or t
  misc_feature (42)..(42): n is a, c, g, or t
  misc_feature (44)..(44): n is a, c, g, or t
  misc_feature (46)..(46): n is a, c, g, or t
  misc_feature (48)..(48): n is a, c, g, or t
  misc_feature (50)..(50): n is a, c, g, or t
  misc_feature (68)..(68): n is a, c, g, or t
  misc_feature (71)..(71): n is a, c, g, or t
  misc_feature (80)..(80): n is a, c, g, or t
  misc_feature (83)..(84): n is a, c, g, or t
  misc_feature (88)..(88): n is a, c, g, or t
  misc_feature (94)..(95): n is a, c, g, or t
  misc_feature (98)..(99): n is a, c, g, or t
  misc_feature (101)..(101): n is a, c, g, or t
  misc_feature (116)..(116): n is a, c, g, or t
  misc_feature (135)..(135): n is a, c, g, or t
  misc_feature (154)..(154): n is a, c, g, or t
  misc_feature (158)..(158): n is a, c, g, or t
  misc_feature (161)..(166): n is a, c, g, or t
  misc_feature (175)..(176): n is a, c, g, or t
  misc_feature (179)..(179): n is a, c, g, or t
  misc_feature (205)..(205): n is a, c, g, or t
  misc_feature (560)..(560): n is a, c, g, or t
  misc_feature (598)..(598): n is a, c, g, or t
  misc_feature (934)..(934): n is a, c, g, or t
  misc_feature (1055)..(1055): n is a, c, g, or t
  misc_feature (1062)..(1062): n is a, c, g, or t
  misc_feature (1087)..(1087): n is a, c, g, or t
  misc_feature (1151)..(1151): n is a, c, g, or t
  misc_feature (1268)..(1268): n is a, c, g, or t
  misc_feature (1326)..(1326): n is a, c, g, or t
  misc_feature (1334)..(1335): n is a, c, g, or t
  misc_feature (1409)..(1409): n is a, c, g, or t
  misc_feature (1467)..(1467): n is a, c, g, or t
  misc_feature (1489)..(1489): n is a, c, g, or t
  misc_feature (1493)..(1493): n is a, c, g, or t
  misc_feature (1496)..(1496): n is a, c, g, or t
  misc_feature (1531)..(1531): n is a, c, g, or t
  misc_feature (1562)..(1562): n is a, c, g, or t
  misc_feature (1610)..(1610): n is a, c, g, or t
  misc_feature (1616)..(1616): n is a, c, g, or t
  misc_feature (1618)..(1618): n is a, c, g, or t
  misc_feature (1643)..(1643): n is a, c, g, or t
  misc_feature (1734)..(1734): n is a, c, g, or t
  misc_feature (1794)..(1794): n is a, c, g, or t
  misc_feature (1842)..(1842): n is a, c, g, or t
  Peptide Sequence Number=SeqID_9069
  Probeset Number=SeqID_9853
ggtatgttggtgntatnnnnttgttgttttattatgtttntntnantntntctctatcattctacatncanagagccctnacnncacnccactnntanntnatcctcggcccctcnctgcctccacgtcgtagancgggggttggttgtgtgtnaccnctnnnnnntctctctcnncanccacccacaaaagacaacaaacacgnagacgagaggacgcgcgtgcgccgcgccttcgccaccgtattgtgtactatctttgaatcagacgggcgctcgctctcgccacctgccgcctatcacctaatatactatattctgtgagatagtaaattaacacgtctctacacgcgctacttccaactaggactactctacacaccgcctgcccactacacaactgagtgtcacaatgaggtataagaaatactcagatcacatataatacaacaaacaaacttatgccatcgtatatgtcattatatgttgatgtatatctacttaatctccactaattaatacaatacctaatatgataaagacagaatcaattatgagagngagatctaacgcgagagatgacgcatctctatgaggcncatcacatcacgatgggtaatatcatatcatatcgtagtagacaccattatctatatatctagtgacgcaagcccagatcagagacatcacagactcgtataatgttgtctgactcatcggtcatctgcgtgtacatactctatatcactccctaccacatactaatcaagcattgttgtgcgatatttatcactcatcgatatcaaagtgcttatgacatgaagtaccatactaggttgatatactaatggactgtatgataacgcggcgtatctatcccttcactcacattcatggccctgctgccgctctctcttaccaacttctgtatcatnattacatcatcacgcattagttatgtgacacagattcacaatgccatgtatatcatatataatcctactcacatgcacttgcttgatcgatcagacatagatcgtttcaataattgagatnatctacnactactatctattatttatcacacnatacacatacaatatgtcatattgatagtgttacatactataatgcactgctattatgatttanagattagagactgctgtcttgacgcgcttagctacgtgtgctgatttatatgtgagtgtgtactgtcgcgtgctagtcctacgcacatacgcacacacacacaagtcgtcatccccntcgagttttgagcgaggagcgcaacatctcttgtatctgactccagtgagattcaatngatccccnncaatatactgacgtcgcgtgcagacaacctcctctgattatctttagactactcatatatgcaactattcatcncatagcgtgtgcgccgcgctgcatgttctgcgtctccaccatataggtcacgtcatgngtctccgctgtgtctgatgtgntctntgntattatacccgaccactgcattatacacatctcancccctgtctcctcgcgtcgttttcgcgcacngtatgatttagttggatgtctcgcgctcactgacctcatatagagttnatatangngagctgctggacgccgttttttcangagatcatacgaatgcggctggcaatgttctgcctcgagagcagcgacgccgctgccactatctttactcgctctgtctgattcatctcgnttgctccacacagctactgctcttgtacgacagaagtgattacgtatcgcgggatacacnagcgagattgactagaggtagaagcatgtcgacgttccgccgcatgan

SEQ ID NO: 75 - DNA, 1681 bp, Glycine max
  misc_feature (1)..(1): n is a, c, g, or t
  misc_feature (1443)..(1681): n is a, c, g, or t
  Probeset Number=SeqID_9854
nctttttctctccttggaagagaaaaaaaaggggggggtccccccggggggggggcgtcttttttttaatttattttaccccccgccgggggttaattttcccgccgcactccctaggacatcctaatcgaaaaaaccagtcaccgctctctttttcatttacagagatagccctaacttagtcactctctctcacacacactccagttcaaagttcaaacaatggctcctccacagaagctctttctcgccgccattgtcgctgccgtcattgtagccgccaccaccggatatgcacctaatagtgctgcggaagatattgtgcattcctcatgcgtgcacgcgagctatccatcgctatgcgtccgtacactctctacctactctggtccaaccatcacaaaccgtcgcgagctagctcaagccgccgtcaagataagcctctcccacgctcgagcagccgctaagaaactcgcggctgtgagagaaaccgtgggaaagaaacgggtgaaagcggcggttgtggactgcgtggagatgattggagactcggtggacgagctgagccgcacgctaggcgttttaaagcatctacacgtttcgggcgtttcggcgaacgagttcaggtggcagatgagcaacgcgcagacgtgggctagtgcggcgttgacggatgacgacacgtgtctcgatgggtttaaaggggtcgagggtaaggttaaaacggaggtgaagcattggatgacgaaagtggcgagggttacaagcaacgcgctttacatgatcaaccagctagatgaatcacgtggctagccccacgtagtacgttcttgatgttatgatgtgcttgtcctaatggacagttatgatttggtgttagtttttttcgtgtttgcttaattgcgagttatctactatttaaaaatgagaggcattgtccttttaagtagttctgataatggtatactaaataaatggtttatctcttttttcggacggtatgtcattgtatcgtattgtgttgttcccttcggattcgatagcatgtgattttgtctaaaaaaaaaaaaaaaaaggcttatcgacccgatcgtcctcaacggggggcccataaggcaatttgccctattctgagccggattatggccggcgcctgggcgggggttgggcaaactccctaattggaaacccccttggggggggccgaacttaattttttttgaaggcaaccccccccccctcccaaaaaaaaagggtgagtggaaagaaaagggagcccaaatggaaaaaaacccgggggggggagggtgctttttgagcccaggaaagggggaagaaggggagaaccccccgcggcgggtaataaaaaaaaaaaggtgaccgcagacggggcggaaaaaatgaaagtttgttaggggggggggggggcccaggcgccccctnnnnnnnnnnnnnnnnnnnnnnnnnnnnnnnnnnnnnnnnnnnnnnnnnnnnnnnnnnnnnnnnnnnnnnnnnnnnnnnnnnnnnnnnnnnnnnnnnnnnnnnnnnnnnnnnnnnnnnnnnnnnnnnnnnnnnnnnnnnnnnnnnnnnnnnnnnnnnnnnnnnnnnnnnnnnnnnnnnnnnnnnnnnnnnnnnnnnnnnnnnnnnnnnnnnnnnnnnnnnnnnnnnnnnnnnnnnnnnn

SEQ ID NO: 76 - DNA, 368 bp, Glycine max
  Peptide Sequence Number=SeqID_9070
  Probeset Number=SeqID_9855
aaaacaaaccaaaaaaattaaaaaaacaaaacaaaacaaaacaaaatatgggaagaatttcgtcggcggtatgtctattgttactagtagcactaagtacggtctatgaagtgcaagggacgtttttattaaggcacttcctgagaaaaattcccagaagatccagggggcttaggccgttcgcttgcaagggtatgctgaagtttgtgaacctgttggagtttaagagcccattgaagcctgagtacaagaacttatttggaaatttaaggtcttacgtaaacgcaataagttcggggtcgaatgttgacttgaaaggaaaagctgagggcgtccaaagtgctctgtctgcactgggtggtagcagc

SEQ ID NO: 77 - DNA, 1755 bp, Glycine max
  misc_feature (1)..(1): n is a, c, g, or t
  misc_feature (71)..(71): n is a, c, g, or t
  misc_feature (78)..(78): n is a, c, g, or t
  misc_feature (83)..(83): n is a, c, g, or t
  misc_feature (106)..(106): n is a, c, g, or t
  misc_feature (110)..(110): n is a, c, g, or t
  misc_feature (121)..(121): n is a, c, g, or t
  misc_feature (127)..(127): n is a, c, g, or t
  misc_feature (262)..(262): n is a, c, g, or t
  misc_feature (286)..(286): n is a, c, g, or t
  misc_feature (335)..(335): n is a, c, g, or t
  misc_feature (342)..(342): n is a, c, g, or t
  misc_feature (365)..(365): n is a, c, g, or t
  misc_feature (389)..(389): n is a, c, g, or t
  misc_feature (447)..(447): n is a, c, g, or t
  misc_feature (484)..(484): n is a, c, g, or t
  misc_feature (565)..(565): n is a, c, g, or t
  misc_feature (598)..(598): n is a, c, g, or t
  misc_feature (649)..(649): n is a, c, g, or t
  misc_feature (658)..(658): n is a, c, g, or t
  misc_feature (662)..(662): n is a, c, g, or t
  misc_feature (679)..(679): n is a, c, g, or t
  misc_feature (682)..(682): n is a, c, g, or t
  misc_feature (689)..(689): n is a, c, g, or t
  misc_feature (783)..(783): n is a, c, g, or t
  misc_feature (871)..(871): n is a, c, g, or t
  misc_feature (884)..(884): n is a, c, g, or t
  misc_feature (1039)..(1039): n is a, c, g, or t
  misc_feature (1046)..(1046): n is a, c, g, or t
  misc_feature (1080)..(1080): n is a, c, g, or t
  misc_feature (1252)..(1252): n is a, c, g, or t
  misc_feature (1342)..(1342): n is a, c, g, or t
  misc_feature (1446)..(1447): n is a, c, g, or t
  misc_feature (1507)..(1507): n is a, c, g, or t
  misc_feature (1623)..(1623): n is a, c, g, or t
  misc_feature (1649)..(1649): n is a, c, g, or t
  misc_feature (1713)..(1713): n is a, c, g, or t
  misc_feature (1715)..(1715): n is a, c, g, or t
  misc_feature (1734)..(1734): n is a, c, g, or t
  Peptide Sequence Number=SeqID_9071
  Probeset Number=SeqID_9856
ntgacgtcgcgactgcagtacagtcattcagataaacatgacgtagtgtagatgtacataggttatgtatntatgatnacatntgacatggggagcgacgtgtagntgtnctgagtcatgnttgtcngtgtcatcgctgcggccggctatcagtattatcgtcgacttcagtatactactgctagaatcgcacctgatactagtcggtatatcgcgtgtccgttgcactgtctgacatctcgacgtcaccgcacatagtganagtcgtcacatcatgatagtgacncagctcgatagagcagagtagcgtcgtcgtgcgtacccgtgttggaacngcgtcgncgcgcgagctgacggcgagtcgncgtatgtatagcaagtttagtggntacgagacgcaactggtgtgagcaggctctgatgcatggtctagcaatacacgtatcnttgcgcgcgcaagacttgcagagcacatgtatacgtntactattgatggtggtggtcgtcgatacgatgcttgtctgtgcacataggcgaacgtcatctatcgttatattatatcagncctgctcatactctagtatgtgtacaatcacgntcatcatacatccttgctagtgtctgtgagtggcatctcgtctcgtagagncgtacgtgnagangtctatctcatgatganctntatacanttggagcgcactctgtcgcacagcagcgccgccgagtcatcagttgcacgattcgcagcagatcactacgacgcgcgatctagtatgtataacnatgtgtatcatcgtatctggcgactgtctcatgtgagtatcgagtagtctactctatcgatcatccctactctagatatgtgcagtangagtagtatcacnctgctatataggagtgatgagtactagcactcataactgcttatctagacgttatctatcgtgtataatcaccgcagcatctcgtacatgtacgcgaacgcagatgagagaatagcgtgcagtgctcggctgtgcgagcgatatctcgtgctgcntattatnatttgtgctctatctcgtactctcatacgtgtangatagtattatatatgttagtctatcttatatctctgcgatcgcctactgtatgattcatcactacattcagtctttatttcgtatagtcgaacaagatacgtgcttaatcagcagagaggacatgatgttgtgtctgcgaggcagctgtgcgcgctcatgtgagggtcgtncgctcagtgagcgtcctaccgctacgtgctagttgctcgcgcccgctccagcttgacgcgattgtcgtagctatatagaatatcgagatngatagatcgcgctgacatcacacgtattactgaagtgactctcagagtagtacgtaagtctgtatccgactggttatatctacctgtgatgagcactattctgnntgacacacaccgacaaacataagactgagattaatactatagtcgctctgtcttgcgtantaggttcgtcgctctcccgcatctggtcctagcggcgcgagtgggcttccccgtcttatcacgcactaagtcatctcatcctctacatacgggggaggtgtattcagaccaatctncctctctacgctggcgcgcgtcagtncgcgcgtgtagcagcgcgccatccgcctcatcgcgcagcaccttgcgcgcgctgagagacgtgncngcgcgctccagccggccanccgccgcacaccagccgcata

SEQ ID NO: 78 - DNA, 1699 bp, Glycine max
  misc_feature (39)..(39): n is a, c, g, or t
  misc_feature (43)..(43): n is a, c, g, or t
  misc_feature (48)..(48): n is a, c, g, or t
  misc_feature (63)..(63): n is a, c, g, or t
  misc_feature (88)..(88): n is a, c, g, or t
  misc_feature (91)..(91): n is a, c, g, or t
  misc_feature (153)..(153): n is a, c, g, or t
  misc_feature (211)..(211): n is a, c, g, or t
  misc_feature (236)..(236): n is a, c, g, or t
  misc_feature (247)..(247): n is a, c, g, or t
  misc_feature (259)..(259): n is a, c, g, or t
  misc_feature (305)..(305): n is a, c, g, or t
  misc_feature (419)..(419): n is a, c, g, or t
  misc_feature (557)..(557): n is a, c, g, or t
  misc_feature (594)..(594): n is a, c, g, or t
  misc_feature (889)..(890): n is a, c, g, or t
  misc_feature (1000)..(1000): n is a, c, g, or t
  misc_feature (1241)..(1242): n is a, c, g, or t
  misc_feature (1618)..(1618): n is a, c, g, or t
  misc_feature (1677)..(1678): n is a, c, g, or t
  Probeset Number=SeqID_9857
cgcactctgagctatgtgtatacgcatgtccactctcgntgancatancatccctacatttancaggctcgcacgcggcacctacggnagnggtatagcgcgtagtctctgtgtcgtaaaccatggagactctcggcatcagagcaaaatcanataatactcatgcaagtgtgttctatctcactatagtactatatcatttgcaagcacnaccgaactacgcacgtcgcgcatgnccgcagcgcgnccgagcctatcnccggtcccgacgtctcgcgtgcgcgacgcactccacacctctcctnctcctcctctatatcacgctacctctctctgcgtctctctccactcactatcactctactactctcgtacgcatacagatcgctgacacacgcttcgcgtcgtctgcgtcgcgnacaggaccgcagcgcgtgcgcagagcgcgatgcatcatcactctaccacagtctcgtacgtcgctcgatgtccactcgacagtatacatatatatatagcggctcatacacaatatacatatcgtcaggtcaacctantctctctcgtctatattatccacttcgtctcacctcnataacaaacatatagcaatgacgcaagtgatctcctccccgacactctcgcatgcgtctcgcgtcacgtctcctcgcgtacccacatcacctcgctatcatcacatactatctcctacacacactccgcactccgacagcacacacagtgcgtgcgtcgcacacacggcgacctcgtcccgcgcaccagcttcacaactcgcagtcagcgtgcgtggtgtatattatagtgagctgcgtcgcgaccgcagctcataggcaatctcaacactcgatccttgatcgttctatcgagnngtatgctacaccagatacataacgcatatacaacaacactacccaatcgccgttgattgatgttgcgtgcttggcgtcattaacagctttatcatcagctgctaatccanatcactataactgatgttgagcggtagaagagtaataattattattctttgtatttatcggaatggttgtttgtaaaatatatattataagtagtttattttctgttgtatttgtctgctgatagtttatcttgactctagtttgtgtgatatattaatagtagataaaacatattggaaagagttagaaagaggatgaatactattgatcgacgcgcatgatgagggctaaaagcactanntcaacaaacgagatgagtctgacgagcgcgcgctgcagcgcgccggcacgtcgcgtcaggcaggccgcgccgccaccgtccggcgtcccagcacataacaatcaaacactcacacaaacatacaaccatccacgtcctaccatataccaccacacagacccactcccctaccgcgcgcgagagccccgacgacccacccccccaccttaatatctccttctactcccctacccacaccaacctggccttctgctcccctccctcccgcagccccaccacaccgcacaccctcttcatattaatagtgtcgtatgtctctttcatcgaacacgcaccccactcaaccgtatttgcatcgcctggccagtcgccttgngtcccccgcttcccgcctctctctccccccgctccctctctccttcctctcccctcctnncttttcggcgccgcaagccgc

SEQ ID NO: 79 - DNA, 471 bp, Glycine max
  misc_feature (231)..(231): n is a, c, g, or t
  misc_feature (259)..(259): n is a, c, g, or t
  Peptide Sequence Number=SeqID_9072
  Probeset Number=SeqID_9858
aggaggtgagtcggcgatagttactgttaattaggtaggggctgggtggctatctaaacgttggggacgtagcacgcattactcgcgtagcttgcggtaataggttgtattggaatgaaagaaggggagttgatcccgcggtttgaggcttaggtatggcataacagagagagaacgctggattttgatcaaaaagtgtagctgcggaatcgtgtggccgagaatgattanacgcatttccaaggtttgcgcgttgggnccaaagcaaggattaaccacaaacttgttggcaaaagggcggatacgggtaacggggccttcttcgggttttgattgccaaagtggagggaaacgggggaatgaatctgcaaagcggattaatgttggggtagccgcgaggggttttcacatttgtgggggggtataaacaacgatacagtgagcccgcgtaattggacgcgggatagggcg

SEQ ID NO: 80 - DNA, 565 bp, Glycine max
  misc_feature (330)..(330): n is a, c, g, or t
  misc_feature (341)..(342): n is a, c, g, or t
  misc_feature (345)..(345): n is a, c, g, or t
  misc_feature (349)..(349): n is a, c, g, or t
  misc_feature (360)..(360): n is a, c, g, or t
  misc_feature (369)..(369): n is a, c, g, or t
  misc_feature (379)..(379): n is a, c, g, or t
  misc_feature (390)..(390): n is a, c, g, or t
  misc_feature (399)..(399): n is a, c, g, or t
  misc_feature (406)..(406): n is a, c, g, or t
  misc_feature (418)..(418): n is a, c, g, or t
  misc_feature (429)..(429): n is a, c, g, or t
  misc_feature (436)..(437): n is a, c, g, or t
  misc_feature (440)..(440): n is a, c, g, or t
  misc_feature (445)..(445): n is a, c, g, or t
  misc_feature (463)..(463): n is a, c, g, or t
  misc_feature (470)..(470): n is a, c, g, or t
  misc_feature (475)..(475): n is a, c, g, or t
  misc_feature (482)..(482): n is a, c, g, or t
  misc_feature (511)..(511): n is a, c, g, or t
  misc_feature (522)..(522): n is a, c, g, or t
  misc_feature (525)..(525): n is a, c, g, or t
  misc_feature (529)..(530): n is a, c, g, or t
  misc_feature (542)..(542): n is a, c, g, or t
  misc_feature (563)..(563): n is a, c, g, or t
  misc_feature (565)..(565): n is a, c, g, or t
  Probeset Number=SeqID_9859
ataccaagggaaccatgagatttcagaagctaaacctcttgtggatgctgcaagaaaatggaaaatataaacagagccaaaaggaaaaataaaaagaatcacaaagacaaaaaattaataaaggaaagaagaaagaaacgaaaaaccttcaagatccagaagctaggaagtccagaaactcatggataaaagccctttgtcgcttagagtcaggatcagtcattactttgtcaacttgaccgtaacatatgcagagaagaatttcatataactctcaaagaaggtcctcgtgctggtgcgaagttggagtgctaccatttcttgcaaatnaataaacaacnngtncaanacccccttaanataaatatngcacaaaatnccataagaaanttgtgagtnccataangaaagtccagtnaagaagaacangaattcnnatnctatnagagtaaagaaaaatcangaaatgntaatntgcgaangagcgctgctcgtctttaaccaagtttcntaaacttggcntangtgnngcccttaatagncggaaagacctctataagaanan

SEQ ID NO: 81 - DNA, 1742 bp, Glycine max
  misc_feature (1)..(1): n is a, c, g, or t
  misc_feature (37)..(37): n is a, c, g, or t
  misc_feature (60)..(60): n is a, c, g, or t
  misc_feature (124)..(124): n is a, c, g, or t
  misc_feature (126)..(126): n is a, c, g, or t
  misc_feature (167)..(168): n is a, c, g, or t
  misc_feature (172)..(172): n is a, c, g, or t
  misc_feature (194)..(194): n is a, c, g, or t
  misc_feature (200)..(200): n is a, c, g, or t
  misc_feature (206)..(206): n is a, c, g, or t
  misc_feature (221)..(221): n is a, c, g, or t
  misc_feature (241)..(241): n is a, c, g, or t
  misc_feature (248)..(248): n is a, c, g, or t
  misc_feature (318)..(318): n is a, c, g, or t
  misc_feature (333)..(333): n is a, c, g, or t
  misc_feature (366)..(366): n is a, c, g, or t
  misc_feature (413)..(413): n is a, c, g, or t
  misc_feature (482)..(482): n is a, c, g, or t
  misc_feature (520)..(520): n is a, c, g, or t
  misc_feature (630)..(630): n is a, c, g, or t
  misc_feature (651)..(651): n is a, c, g, or t
  misc_feature (700)..(700): n is a, c, g, or t
  misc_feature (800)..(800): n is a, c, g, or t
  misc_feature (825)..(825): n is a, c, g, or t
  misc_feature (1020)..(1020): n is a, c, g, or t
  misc_feature (1180)..(1180): n is a, c, g, or t
  misc_feature (1276)..(1276): n is a, c, g, or t
  misc_feature (1377)..(1377): n is a, c, g, or t
  misc_feature (1397)..(1397): n is a, c, g, or t
  misc_feature (1426)..(1426): n is a, c, g, or t
  misc_feature (1535)..(1535): n is a, c, g, or t
  misc_feature (1558)..(1558): n is a, c, g, or t
  misc_feature (1575)..(1575): n is a, c, g, or t
  misc_feature (1613)..(1613): n is a, c, g, or t
  misc_feature (1673)..(1673): n is a, c, g, or t
  misc_feature (1687)..(1687): n is a, c, g, or t
  misc_feature (1702)..(1703): n is a, c, g, or t
  misc_feature (1707)..(1708): n is a, c, g, or t
  misc_feature (1710)..(1710): n is a, c, g, or t
  misc_feature (1718)..(1721): n is a, c, g, or t
  misc_feature (1726)..(1726): n is a, c, g, or t
  misc_feature (1729)..(1729): n is a, c, g, or t
  misc_feature (1742)..(1742): n is a, c, g, or t
  Peptide Sequence Number=SeqID_9073
  Probeset Number=SeqID_9860
ncggagcgtggctagtcagtgcagttagtatgacgtngcatatgcttattcgttagttantcatgtgatgtcgtctatagggatagacgacagtagatgcgtttgtaggttgctatcgtgactnanatattagtagttgatggtatatcaatatgatgtactatatnnatangtcgtatattgtcgtcgtctantgattngtaagntattcggtgatctangtggtatcgagtacatcatncagtcgntacgagtgctctctgcgagtcatcgtgcacggcgcttttgtcaccacgattatcgtgttgactgacgtantgcgaagtagtagtntcacatagtcatgtcatcgtgatatgatagatnagtgtgcacgtatatactgtgtgttcataaccgtgataggacgagtntggtgaactgtacctgtgtcgcgtgatcgttaacgtcgttcgacacacgtatatacgatcgagcggatnttgtgagtgagagtggtagtagagtgcatcacatcacnatatgatatatgtgggtatcacattctgctagttgttgggataggtatcgagagtcacgcttgtgtatatctatctaagcacacgtatgtatctgtgtactcaacatctnatacagtggtgcgctgtgtgngggtgtgtatatatcaatacatagatatgagtgagagatatacacattnacagataagattcgtcacttacgtgatctctatacaattatcgtatcgttgtcatgagtgagtgtgtgagatgtatggtgagagagatgaataggtatangtgatcacacaatatgatacattanaatatcaccaacatggcgttacatgtagagagattagtagctagtcgggtgatagtcactgtagcaagagtacgtatgacagtggtaagtacatgtctaggagtgatggggagagtgtgtggggttgatggtgagaagtagtgtgttgtgtgtatatgatatggagtacatgtagtatgactgtctttcatatanttatagcgttgtgtgtggtgtgcttatgaatggtcgagagactaagtagataaggtgaactaatatatgatcgtgtctatatagtgttatgagagagtgatagcgtgtaggagtgtacagttatcatataccaccacgtcgcgttcccagataagtatgnatgatagaggaagagtgttgtctgatattcgacgtaggttaaccatacactattacacgtgagccacaagtgatagtgtatagttggtatgtgctntctgcgaggtacaaggacagtgtatatattatatattattatgtattgatatgatctgtattagtcatctctatgctacgacgtcgtgttgttggagtacntttatgtgtcactatatatnatattgtgtaatagtatgacatatatagnagaagaacaaatcaatgtagctaatgtatactagcacaacccctgctcacgatcacaccaacactattcaacatacataatatcataaatacactgttagagtgagctnctagtggtcataattctatgtgntgctatttgtagttaantgtgaggtgggtggcgccggcgcggggcgcgcggcgcncggggggggtggggtgataatctatattaatattatgatatactatagtatattatatanattttattatctcntatatgggtgctgannaaannanaagaaaannnnctacncancccccacccaaan

SEQ ID NO: 82 - DNA, 1593 bp, Glycine max
  misc_feature (17)..(17): n is a, c, g, or t
  misc_feature (25)..(25): n is a, c, g, or t
  misc_feature (77)..(77): n is a, c, g, or t
  misc_feature (92)..(92): n is a, c, g, or t
  misc_feature (118)..(118): n is a, c, g, or t
  misc_feature (148)..(148): n is a, c, g, or t
  misc_feature (164)..(164): n is a, c, g, or t
  misc_feature (226)..(226): n is a, c, g, or t
  misc_feature (270)..(270): n is a, c, g, or t
  misc_feature (340)..(340): n is a, c, g, or t
  misc_feature (365)..(365): n is a, c, g, or t
  misc_feature (373)..(373): n is a, c, g, or t
  misc_feature (411)..(411): n is a, c, g, or t
  misc_feature (496)..(496): n is a, c, g, or t
  misc_feature (504)..(505): n is a, c, g, or t
  misc_feature (512)..(512): n is a, c, g, or t
  misc_feature (546)..(546): n is a, c, g, or t
  misc_feature (583)..(583): n is a, c, g, or t
  misc_feature (597)..(597): n is a, c, g, or t
  misc_feature (624)..(624): n is a, c, g, or t
  misc_feature (639)..(639): n is a, c, g, or t
  misc_feature (745)..(745): n is a, c, g, or t
  misc_feature (1117)..(1117): n is a, c, g, or t
  misc_feature (1220)..(1220): n is a, c, g, or t
  misc_feature (1347)..(1347): n is a, c, g, or t
  misc_feature (1353)..(1353): n is a, c, g, or t
  misc_feature (1504)..(1504): n is a, c, g, or t
  misc_feature (1507)..(1507): n is a, c, g, or t
  misc_feature (1523)..(1524): n is a, c, g, or t
  misc_feature (1526)..(1527): n is a, c, g, or t
  misc_feature (1540)..(1542): n is a, c, g, or t
  misc_feature (1557)..(1571): n is a, c, g, or t
  misc_feature (1576)..(1576): n is a, c, g, or t
  misc_feature (1582)..(1588): n is a, c, g, or t
  misc_feature (1593)..(1593): n is a, c, g, or t
  Probeset Number=SeqID_9861
catgagtaatacgtgancaccgtangcagtcagatcattgtcacatattgatgttcttatagctattaattctcatntactatgatcagaanatagagaggtcacgcgaattacgctnacgctcatatgacaagatctgtactcttcncacctcactctatcgncgtagagtgtattaacatggcgactatcataccgagctagtgatatacacgtctgcgctcanacatcacagttagcatggcatcatcgtcaagactacagcagatntcgatcacctatgacagacacagacatatatgcgcttctctagagtgtatgtatttctacaagatcattntacttaaacgacactaacagtgatntgccatantccttggcgatggaatgtggatgtcatgtgagtatctncagtagacgatgacgctcgtatcatacgacagcggaagaggttcgtcagagtcacaacgattgcatagagtgcgatcacaacatncttttatnncttcgtnatacgatctgcatagaatagctgtcgtagagagntcgacatatctcaccagtccagggacacaagtgcgcntcagtcctcgacantcagatgatgatgtatcacaccctcancacatgagacatagnagtcgctacatgtctagatttttgtgtgttgtgatgattccggcgcggtcgcctgcgctttgcgcgtgtatatagaagcacgcctagcgcagctactcatatatantatacacacactgtacacatgacgtctgaagtgttggttgttgtgtagagtactgtgcgtacatacataccagagcaagcagtacagacaagtagagcaagaagtatatacacactcatacaacgcgcaaggaggcgcacagacagcagccacacacactaatcagaacatataatgagctagaactgtgatatagtgcgcgccgcgtctccatgtcacagactcatgtataacaaatgaatagactggagtaatatgttgttaagtaagtactcttgcagtagagagtgatcggaggtgagtttcattgttgatgtggcgtgcgtcgcttgcgggtcggtatcgatttggttgaatgtatattgtttagtnaactcagaccacgatgagatgggactatgaggtatgatgtggtgtggtagtgtaagtaggcgtgagcgaccgcggtgctgacgtgcagcagtactgttatatnttatgtatgtgtgtgatgtagtatagtcttacaatacgatggtcatactaaattatatgctcgctcgttacactaagacacgtactattcattagtatagtgtttcactagtacctgtatcactcangtcgtnacaatcgcgtcccgttccttgctgtttatacatatctatcgcgatatgtgcgcgggtgagtgtatagctatcttacgatattaatagcacgacgtgctctctatagacacggagtaaggacgcatagactaaccatcgcatatgtgagagnagntatctcctatttccgnntnnttatagttaccgnnntggtcagaaactttnnnnnnnnnnnnnnnttttnttaaannnnnnnaaaan

SEQ ID NO: 83 - DNA, 1461 bp, Glycine max
  misc_feature (1)..(1): n is a, c, g, or t
  misc_feature (12)..(21): n is a, c, g, or t
  misc_feature (27)..(29): n is a, c, g, or t
  misc_feature (81)..(81): n is a, c, g, or t
  misc_feature (107)..(107): n is a, c, g, or t
  misc_feature (158)..(158): n is a, c, g, or t
  misc_feature (167)..(167): n is a, c, g, or t
  misc_feature (177)..(177): n is a, c, g, or t
  misc_feature (195)..(195): n is a, c, g, or t
  misc_feature (205)..(205): n is a, c, g, or t
  misc_feature (942)..(942): n is a, c, g, or t
  misc_feature (1219)..(1219): n is a, c, g, or t
  Peptide Sequence Number=SeqID_9074
  Probeset Number=SeqID_9862
ntttcccttacnnnnnnnnnnttcccnnnttccctcccttctttttttcctccttcttcttttctttgcttctcctttctnattcactcgcacaagcccacccactntagcctcacatgcgctctccagagactatatattatatatgcttactatgntatatcgtnaatattaatntttcatcgatacgttttntattattgtntcgcctatgacacttcgccacactattcgtcttacttcagctcgtacgttacttgcgaccatgctcttaagtgcatcacagcttaatcttccacatacaatagtataatgtcgatcttgatcaatgattatattatctgactaataatccccctctctcgctccttatacgttgcctatcgttcgtcacattatctaatacgacttccaacatgtcataatgtacctgcaatctctctctacatattatgcactgaccacacgccgtacgttcctctttacttcttctctactccctttttctatttcacctccttgcttcactcctcttctcctactcctctcccgcccgaacacccgccattcgcgccccttgtacctatcatatccctacccttctcgactctccactcccctttacctcctcactccgtctcctcctctccttccttaccccttctctctcctcccttcttctcttacgttcttctttctgtgtcatcctccttccccttcgcgttccctcgtcgctcgctcccgcctcccgccctcctgtcccccccccctctcctttcgcgcgcgtgggtcgtgttcctatctgtcgactctctacctttaaacgtgacaacgagatgagcggttgcagcacagacatatgaggcgcgagactcaacctctcctgcactcgatgacgaacacacactatcgacgtcaccaacacccaatatatacacaganagtctaggtgcagtctacaacctacccttcgtacgacgttcgtcacgttctactgcatgcttctattctgcgtgctaattccattcagtcgtcccgcttatgtaggacacgtcccgctcgcatgcttccagtcgtacatcacatctcgacatgtgtacctgtcacgagtgtcttcgttctctgctctatctctcgctcctcctctctctccaccgccctctgttatccccttctgtggcgcctccggatcgtcatatgatcatgtgtgcgtgtcagnctcgatgtcacacatccgtcctcgtcgcctgcactcgagcgcactggtttctctgtacgttgtcttctccgctgctctatgtacttcttgattgcgtcagccttcgattacagtgactctgtgtctctgtgtgctcgtactctttcgccaatactacgtggctccactctcgtgacctggggctgtgtgtctgtgtctttgccgtcgtgctgtacaatatcgctctgcagtgcccaggcgtg

SEQ ID NO: 84 - DNA, 1531 bp, Glycine max
  misc_feature (104)..(104): n is a, c, g, or t
  misc_feature (322)..(322): n is a, c, g, or t
  misc_feature (500)..(500): n is a, c, g, or t
  misc_feature (506)..(506): n is a, c, g, or t
  misc_feature (662)..(662): n is a, c, g, or t
  misc_feature (968)..(968): n is a, c, g, or t
  misc_feature (1053)..(1053): n is a, c, g, or t
  misc_feature (1078)..(1078): n is a, c, g, or t
  misc_feature (1101)..(1102): n is a, c, g, or t
  misc_feature (1225)..(1225): n is a, c, g, or t
  misc_feature (1228)..(1228): n is a, c, g, or t
  misc_feature (1230)..(1230): n is a, c, g, or t
  misc_feature (1238)..(1238): n is a, c, g, or t
  misc_feature (1241)..(1241): n is a, c, g, or t
  misc_feature (1397)..(1397): n is a, c, g, or t
  misc_feature (1426)..(1426): n is a, c, g, or t
  misc_feature (1439)..(1439): n is a, c, g, or t
  misc_feature (1445)..(1445): n is a, c, g, or t
  misc_feature (1450)..(1450): n is a, c, g, or t
  misc_feature (1456)..(1456): n is a, c, g, or t
  misc_feature (1469)..(1469): n is a, c, g, or t
  misc_feature (1504)..(1504): n is a, c, g, or t
  Probeset Number=SeqID_9863
gtgtgtggggccgcgcgcgtaggtatactcgtccgtctgtcggccgtgtgtccggtgattatcgtcgacgcatctaccctctttcactgtctcaccacggctantaataggcaatctatatattagtggagattagcgggataacatatcgaggtaggccaacgtcccgccgcgcgcgcagctctgtctggggtatttcttcattttaccgtgccggctgccgtatcgacgtgctgcgtggcggttgatatatgtctctttgtcgtaacgtatcaaactgcgtctgaacgcgtccatatgcgcctgttccaattactcactnccggtgcggctcgcgtgttaatcggcggtgtatatgcttacgcatcgcggactaagtgcccctgcgtactgaacgacgcacgtacgcttattatatcttgcatggttgcgggccgcaatatactgtgtacgcgatgatggcgtcgatgagcgcgcgagtgatctcgcgtgcttatatntctcgngcgtttagataaaaaaatgcttaacttccgctgtcgccgctctacgatatatctataaattctggcgctcggactgtggtcgcgcacgtcgctgtctcgcgccgcgtgtggagcggtgggtgtgtcgtaactacgcccgtcgacgcacgtcgcatnactcgcattgtttgtgtgcgctatatgttatcgacggctaacaatgcgagtcagtagtcgaggcgcggcgcttcacgccactattatcgccgtggttatatacgcgatcggtgtgtagtgtatgcgtacgtcgtaagaggcgagtagcggctctgagtagcgcgcgcgttgcgattgcggatagtcgtggtgtgtggtactggttgtggtgccacataatcaacacgaatgacgagtggctcgccagtctttgtgatgtgcctattatgcgtgctactctcgtccgtacgatatgtatagacgccnctgactatgtccaagtcattattacagtgtattcgcgagatagggaatgcgtgatatggcactgagtatgaatgatatgacagcngcgaccctctctctatgtcgcttgncggctggaataggtactggatgnngttccgacgacggcgcgagtgtcatcgtcgtaccacacggtgtgtgcggagtcgtatactcgttagttacatgcgcccgccacggatctctagtcgctcgatatttggcgaatacggtgtcgnacntnatgttgtngcnatctgccacgcgggcatgtgcgtgcactgctgtgcgtaattgtattatggtagaatggcagcgcgcacgaacgacgaaacactgtagacagtattccgttgtgattggctaagtatactcgctcgagcgcagagtgcagtagcatgagatatactntgatcgatagactcacgtaattcgatcgncgtgcgcgtaggngtattntctcncagcgntactacattatanatgttgagtcagcggcgatactcggatacgcgatnataggtcgtcgtcgagagagatagctg

SEQ ID NO: 85 - DNA, 422 bp, Glycine max
  Peptide Sequence Number=SeqID_9158
  Probeset Number=SeqID_9864
caacactacaagtggtgttttaattctagaaattgcgaaataagtaacaattacaaaaaccaaattggaaaataaaacaaacaattaaaattttaaaaaattacaactttgttcagagcccacaaacaagattcatgtgaaaatcgaagaacaacactttgtgggcaacgaggcgaggaaaacactgagcactgtagtggttcttcccatacggggttgcggacaaggttgaggcgtggagggaggaccaaatcctagatctaaggaaaaaaaaaaacgaaaaaggatgggagaaagaaaccgacgacggtcagttggtctccacggtggtcgtgttgcttcccatgccggacattaacgacggagaaaggaggttaggggtggtggtggtgggagttgccggcgagatcaaaacggaagag

SEQ ID NO: 86 - DNA, 600 bp, Glycine max
  Probeset Number=SeqID_9865
gagtcagctacgtaggcccccccccccgaagaagcagagaaagcgtgtgaagacctaaatggtaaagagatcaacaaaaagatcgtctatgtgggtcgtgcacagaagaagagtgaacgtcaggctgaattgaagaaaaaattcgaaaaaatcaaacaagaacgcctgaatcgttatcaaggcgtcaatttgtacgtaaagaatctggatgattcgattacggatgaagatttaaagaaagaattcattcagtacggtgaaatatcgtccgccaaggtgatgaccgattcgactggtcgtagtaaaggtttcggtttcgtgtgtttcacttgccaatcggatgcaacgaaagcagtcagtgaaatgaataatcgtataataggtgctaaacctttgtatgtggcactcgttcaacgtaaagatgaacgtaaaatgcatctcatctcacagcatatgtcaagaaacacatccgaaatgcgtattccaatgggtaccgaacatccacagcaacttcatggcatgcattcggcagccatgttcgccaacaatgcagttgctttcccaatgaatcaaggtccacaaggccaatcaagctggaca

SEQ ID NO: 87 - DNA, 1567 bp, Glycine max
  misc_feature (20)..(20): n is a, c, g, or t
  misc_feature (26)..(26): n is a, c, g, or t
  misc_feature (31)..(32): n is a, c, g, or t
  misc_feature (51)..(51): n is a, c, g, or t
  misc_feature (58)..(58): n is a, c, g, or t
  misc_feature (60)..(61): n is a, c, g, or t
  misc_feature (65)..(65): n is a, c, g, or t
  misc_feature (72)..(73): n is a, c, g, or t
  misc_feature (77)..(77): n is a, c, g, or t
  misc_feature (246)..(246): n is a, c, g, or t
  misc_feature (294)..(294): n is a, c, g, or t
  misc_feature (323)..(323): n is a, c, g, or t
  misc_feature (633)..(633): n is a, c, g, or t
  misc_feature (732)..(732): n is a, c, g, or t
  misc_feature (1204)..(1204): n is a, c, g, or t
  misc_feature (1216)..(1216): n is a, c, g, or t
  misc_feature (1230)..(1230): n is a, c, g, or t
  misc_feature (1246)..(1246): n is a, c, g, or t
  misc_feature (1264)..(1264): n is a, c, g, or t
  misc_feature (1345)..(1345): n is a, c, g, or t
  misc_feature (1435)..(1435): n is a, c, g, or t
  misc_feature (1547)..(1547): n is a, c, g, or t
  misc_feature (1562)..(1562): n is a, c, g, or t
  misc_feature (1567)..(1567): n is a, c, g, or t
  Peptide Sequence Number=SeqID_9159
  Probeset Number=SeqID_9866
ggggaaaagagaggaaaagnaaaaanaaaannaaattagtggatatatgtnataatantnntggnttatagnnctcncacaatagactccatgccctccgcgcgtcctcgtgttgcgcttaggccgtgtgatgttcatatcgtatcctatatcggtcctatgatagtgtgtgtgttttgtgtgtagtagaggtgatagagtgtaatgtacatgcatatcaacaaataaattccctatggtttgttnagtatcggtgttgattggatgttgggtctctcgttggcgaggtggcgncgtcccgccgcgtacatatgagcgctctnatatgcaaagacgcccacgcgtgcgttttcttctgtaactcgtgtacttaagtatagaggtgggagagaagaacgataagcagtcgaaacgaatgcatggagagacttgcacgttagagtgtgtgtctctaatgagtgagtaatctgtctctgtctctcgtgttgtgattcatgtagtgtctattttcgcgccatcctgactctccttacctcttttctctctaccttcttcgttttgtagttctgctctgatcgttgtatatctacttgaacggtcttaatgtgttctggctgtgtctggctatatcanttgatatgggatggagaggatgtgagagagatgtgtatacgagatctcgctaaaagagatgtagtctggcatgacgttctggtgctagtgtcggcgcangcgacgtgtcgcgctacgggatcgtcgcgatcgcgcgcgttatgctgagagtcagattatcttaggtagcattgctttcttataacgatattcatcttgtatgggtactgaaatcgcggtaataatattgatagacatgtgctattgacgcagcgactcagcggtgtgttatgatacgaatactccaacaaagataagctacgagtcaatcgtggtgcgagcgtgtctcgttattgtcaatcatcaactctcactatgcttatacttcatgtgtctttcgcgctctcgtcaagtatgcgatacattacgacgaatcacgcagactgctcacatgctatatatactgctctcagcgcacaccacatgtgcatacactactaactcatatctcacacgatgcatgcataaagaagacacactcaacaaatgcgatctatatacacgatcgctcacaacttataccagattagcngcgtcacatcgngtactgacacactnatactcgcgagctacngcgtactcagtatgagtnatcatagtatatgataaggatgtgatgacgtataacataacaacactaatgtatgcagtgatctaacatgatacgtcatanacatatagtaccgatgttgagaatagtaggtgtgcgagacggatagggtagatgtggtatgtgtgactggtagtagtgtctgtgatggtnatgttactgtgctgacgtgcgcgtctacgcgcgctcacgctcatgtcgagcgccacacactgcagctgcgtctggcgtgcgatcgacacagcacactccgcacacatctatnccgcgtctcgactanctcan

SEQ ID NO: 88 - DNA, 1686 bp, Glycine max
  misc_feature (19)..(20): n is a, c, g, or t
  misc_feature (42)..(42): n is a, c, g, or t
  misc_feature (147)..(147): n is a, c, g, or t
  misc_feature (275)..(275): n is a, c, g, or t
  misc_feature (337)..(337): n is a, c, g, or t
  misc_feature (625)..(625): n is a, c, g, or t
  misc_feature (678)..(678): n is a, c, g, or t
  misc_feature (874)..(874): n is a, c, g, or t
  misc_feature (1004)..(1004): n is a, c, g, or t
  misc_feature (1139)..(1139): n is a, c, g, or t
  misc_feature (1145)..(1145): n is a, c, g, or t
  misc_feature (1461)..(1461): n is a, c, g, or t
  misc_feature (1550)..(1550): n is a, c, g, or t
  Probeset Number=SeqID_9867
cggtcgggtggtggcgcgnntccttttttttctcccttcgtntgcctatagttcgtccccttctccgctctcttgtgtggcgcggtcagcgctcatttagacatgtcttgtctacgttgtaggcgtgcttataatattgcccccacnacccccccaccccccccgcgcgccaattaaaatgtgatgtattcgtgcgtggctactctcgtcccatccgtacagcttacgacaagtcgtgtcgagggcgtcgtaggatattttatctccacagctanactccaactctccacaaggagatgatctcaatatctcttttatcatacttcaccacgtatangacagtgcgaagactatgtgtgtaaatgtacggcgcgtatgttcgtgggatgtaggcgccggaccaacctctctctatttagtccaacttccacctcataggacgaagacacgacacacaaagacatcaaccgcgacgacaacatatgttccgagtattacccatcatacacaccgcgatgacatagcgacgagctgacacatcgatctcccactcctcatatacttaccctaccttctgtctctctgcttcggtgttgactttttctcactctcgttatatgttatncctccccttcgccggcggtcttttgcggtgcctctctctctgttcttgggatngtgctatctatctccgagcatgacatgttcgtctgacatacctcatgtatactataaccgcttcgcttgtggcgacaccgcgcgactgtgtatcggatttgtggtgactaccgatcacgaatgtccacacttgtccgcctgtatggacttctattctcgtagtctatcctttcgttccactacttccgttcctatnggcctcgccctcccttctgccacaccacgcacggctagtgcgtataataacgattatcttactacgtcgtcgcatcctcactaccttatcgccgtcggtgtcaggcgtgctccttcctagctaactactnatgtgtgcgccggagcgggacataaatctgaaacttgatgattgtcttatcgcaagctgaccacgctcttctcgcactgcatcacaacactcacatgacgtacgaccagttggcttgatggatgtgtgcgagacncagcgnagtatcatctacacaccgcatgggtcagcggcatcgatagcgtacgtttatattatacgtaagttcgactggtctcgtgcatgacacaccgcctatattgtgacatagcatagcgtgcccgtgttacagtgtatgtgatgtccctcactccacgctcgtgcttcactgcctcttctctgctagatcggatatgtcgcactacgcctaatcttacaacctggctacgattctgtgtctctactatataatctacttatctatcgtgactttgtctctatcttgcgtcgccactctcgtgcagcgctcagacatacgngtattcgtgctgcgcgtcacgttatatttcctccgtggcccgcgcgagtcgctatatacgacatatatctactcttgcgcggcaccacnaagagatatattcactaccgatctctctctactgtatatacaccacgatcacacactcactaatatcgggaacatgctactgcgtcagcactctgcgacagtgcacacaacagacttcactcactgcgcatcactg

SEQ ID NO: 89 - DNA, 660 bp, Glycine max
  misc_feature (660)..(660): n is a, c, g, or t
  Peptide Sequence Number=SeqID_9160
  Probeset Number=SeqID_9868
atgtgaaggagaaactcttgtggtaacagtctttgagattagaaaatcggaggtatagtcctgagtagttcgatttctggattcggtggagtctgactttccatgcatacacgtaatcagagaattgtaaccattggatgaagatcaaacgactctgatatcgagtgtgtgttttagcttttatctacaaagataaaaacgatttgtatgatcttttatttaatgatttgatttgttgactgcatgcatgattgcgaggaaaaacagggaaaaacagggaattcgccaatttcaagttcagtgtgtgttggtttttgttaacttgagttytggagctaatgttttttgaggatgaatttgcagattccagattttatcaagagggaggttgagtttcggtttcttgctgtaagcttgtaratgtagattttkagccttgctccttttatattttgattggcttcagatatttttttatgtgttttaattatcctttttagttgtcaatgtaattgtgtatgcattctatcttgtatcgtatgatcgtatcaatcaagttaaasmmaagttgagtatttagttgattggaagtgtgattgagagtcatgtgtgcattgttatcatatgtttacctccactgttattatcatatatacgctn

SEQ ID NO: 90 - DNA, 628 bp, Glycine max
  misc_feature (97)..(97): n is a, c, g, or t
  misc_feature (151)..(151): n is a, c, g, or t
  misc_feature (362)..(362): n is a, c, g, or t
  Probeset Number=SeqID_9869
atcgatctcacactccaagctagccacgccagctactgctccgtgaccagcagtgcactaccacgtacacggaaacaactcgtggtactgaactagnttggtagtacgtagcagctagcacgatggggcagcttaacaagaagcttctggntgcgtccatggtggcggccgtgctggccgtggcggcggtggacctctcgcgcgccatcccgctggaggacaggacctggagtcggaggaggcgcttgtggacctgtaccagcggtggaagaccgggcaccgtgtgccccccaccacgccgaaaagcaccgccgcttccggaccttaaagccaaagcccacttcgtccactcccacaacaanggcggggaacgcccctatcgcctccacctcaaccgcttcgcgaaatgaacccagccgagttccgcgccaccttcgttgggaaactccgccgggacccccgggccccgccggcgtccatccccggattcatgaacccgggagggaaagggcccaccttctccccctccgtgaactggagaaaaaaaggcccctgacggccgcaaagaacaaggaaaggggggaatttgcttggccatccccaggggggggcccgggagaagaaccat

SEQ ID NO: 91 - DNA, 766 bp, Glycine max
  Peptide Sequence Number=SeqID_9161
  Probeset Number=SeqID_9870
actcttcaaagtctccgccagacacttctccatcaaaactcctctcacacaatggccacttccttccctaccttgacaccttttcttttcatcctccttctctccatcccctccgttcttgaagcagctcatcaccacacggcggcgccggctccggctgtagactgttcgatgctcatactcaacatggctgattgtttgtcctttgtttccgctggaggcacggaggccaagccggctagttcgtgttgcaacggccttaagacggtgctcaagactgacgcagagtgtctatgtgaggcgtttaaaagcagtgcttctctaggagttactttgaacatgactaaagcagctacacttcccgctgcatgcaagcttcacgctccttctatggctgcttgtggattgtccgccgctcctactatggctccaggtcttgctccaggaggagctgctggacccgacttaagttttctatctccaaacccatctccagggaaccgcggatcttccttgcttcccttctccttcaccaccgtactcggtgctatgtccttcgtattgttattcttgtctcgtgtctgaagaagccagctagatttggttgtatgaaatggctttgggtttgggttttcgtgactttagttttgcgtgtcttttgagtctacttctgttttagaccatgtcggtttctgttcgtagtttatttaatcttaattacgtttcacattggtccttttatctaagaacatctctgatccctcgt

SEQ ID NO: 92 - DNA, 1347 bp, Glycine max
  misc_feature (243)..(243): n is a, c, g, or t
  misc_feature (595)..(595): n is a, c, g, or t
  Peptide Sequence Number=SeqID_9162
  Probeset Number=SeqID_9871
cttgcgaggcggcgatggcgcggcgctcaggtacgatgtaccacgcgcgcgctgatatataacacacgatactatatctccttcttttcatactacagagagacacgcagacagcaggcgttgctcccctgatatgattcatacaatatattagttagtagatatagagcgcgcggacgttaatacttctgcgggccggccctatgttgcggcgcgtagaataagcagcatgtcagtacgatnagcgctctacacaacgaatagtcgtgtcgacatcgcccgtctggtggagcacaacaagaaaggcagggcagagcagcgtcgcgtttccggcgctcccgtgcgacgcagaagtgaggcaaggagaggcgcgactcgactatataactactccctccgcgatgaagtcgataatatattcactacatcggcggcgcggagtcgtacgacgtgagagagagatcacaccacagtatcaggtgtgcattattcacattgagccaatgctcatcggtacgatcggtgcgacgccatatgtagaagatacccgcatgtatatgcaggctgaacgcggttcgctgagtcataatcgagncgcccgctccccacgacataacataatcagggctctgaagagagcgcagagggtaccgccggactggaggcgcaggatcgaatcacgcggcttgcaactcgtcataatacagcctcagcggcgcgtgagtggtactccgcgtgagttactagagtcccgcgccgcaatcaaataggcgtagcgacgcccttatatctacagctaatactctctagcgcggcgtgcgtgcgagccgcgtctgcgtagatcatacactataaggcgtaataaggcgaagtgggtcgcattcagcgcgtggtgagccgcattagacataatacaaaacataaaggcggcgagcgcgcgggcgagagggaatacagcgcacatcgatatcccgtggcggcaatcttataccaatcaacgctgtggcgtggcctgttatgcatctgaaggtaccacagagtagaacgatcactacatgtggcactacagcatttgcgacacgctagcccgcggggaggcgagtagtaataaaaatggagatagctatagagaaggtgataggttatggtgatgggcgttcacttatatcgagcgcccaatatccgcggcgtcaggggaggggcgtctgggtaatgagtgtatattttatattagagggggcgccgccgcgcctctcgccggctgcgatcgttatattcagttggtatattgtagtgtgaactgtatgggggttggattctgctgcttcgaggactaaccccacccaa

SEQ ID NO: 93 - DNA, 422 bp, Glycine max
  misc_feature (389)..(389): n is a, c, g, or t
  misc_feature (404)..(406): n is a, c, g, or t
  misc_feature (413)..(414): n is a, c, g, or t
  misc_feature (416)..(422): n is a, c, g, or t
  Probeset Number=SeqID_9872
aaatggcatcactcaaagctgagaaacctgttgaatctcagtcatcagggcaggttaagaaagaacctgcaaaacccagtggtagcactccaaaagctccttcttccaagccagctccaaaagaaactcagaaaaagtctcgtccctaacagaaggcaagcagcaattaataggatatatttggtagaatgatgatttagaaaaataagtgggtggaaatcttggaaaaagttgaaaacaatgcttgccgtgaagggctctttccaaaaaaatttgaaacccgacatttacccccctggttccgggggcttaccaaggacctcgcctggaaacttatttaaagggggaaggttaaaaaaaataaaaaaaatcctttttttttttatgcnccggcccccgcccgnnnaaaaggnngnnnnnnn

SEQ ID NO: 94 - DNA, 763 bp, Glycine max
  misc_feature (691)..(691): n is a, c, g, or t
  misc_feature (763)..(763): n is a, c, g, or t
  Peptide Sequence Number=SeqID_9163
  Probeset Number=SeqID_9873
gccggtttgtgtgggggccggaaaccagggtaattcgagttcaaaaaaggatgtagaagggcaaaaagcgggggatttgttagggtggggttccataagagggttgtttggtcgtgggcgccagatttcaatttggaaggcaaagggttggtggcccgcagaagccgttggcggggagcatatataaggcaggccggtcttactgggagcctctatgacaaatttggggcaagcctcagtggaggcaaaatcgtttctgggaggacatgtcctccgggatatacgcatgacattctccaaaactgtggtgatgctgtcaatgaatgctgcaagttggggggtgcatcctctgggtgcggtgccttagccactctcaagagctccgatgcaagtgaaattgtgaaaggagcggtttcacaatgcaccaacgcatgttctaatttctgcaccaagggctcagctaaagcagttgaaactgcctaacaagcatatccgctatctatgtattaattgtatgtgttgttgttttacatgttttcaataattgtcgtgtatgtgacaaattgctagactcttttgctatttccaagttatctatgtgacgtagaaggtcatctatccctagattgtttatcccttgtacttgcataactaaataaagaagaaggggggggggggggggggggtgggncccacattaaacaggaggggggggttgggggggggggggggtggtttgtccaacggaaaatcccgccccgtn

SEQ ID NO: 95 - DNA, 446 bp, Glycine max
  misc_feature (90)..(90): n is a, c, g, or t
  misc_feature (156)..(156): n is a, c, g, or t
  Peptide Sequence Number=SeqID_9164
  Probeset Number=SeqID_9874
ccaccctcatggaattgcaaacaccgatcagaaagaaaaaaatgagttcccttcgtctggctttatgctgtgtcggatcggagtgcttgnaacactaccacacttctcatatgcacagctagatccttcattttcccgtctcgtctttttaaatgngactccaatcttgtggggggggcgctcaaatgtctcccatcctgatcccctcttacttgcaaggaggaggagggtgccttgtcaccactgttaaggacatgggcgttacgcatcaaatcttctaaactacactaactctatcgtgagcgaccaaagtgcagagccaaacaacagctcactatcacgttgatatgtcgtgaaccatatcaagactccatcggaaaatgctctcaccggcataactacgagagctcatattcttgctctggcggctcaattatctcctgatc

SEQ ID NO: 96 - DNA, 938 bp, Glycine max
  Peptide Sequence Number=SeqID_9165
  Probeset Number=SeqID_9875
tcaactttgtcccctaaacccttacaaaggacagtgaggactgagcattgctataacactctcaaacgctgttgtagcgaccgaagagtcctgtgtgtgacctcaaaaccctcccgacagtcaccgtcttgagcgcaaccgagtcttcttcttcggttcaccatgaagctcgtcaggtttctcatgaagctgcacactgaaaccgtgtcaagtgagtccaagaacggcacaatggttccatgtcactataaatgtagatatgaaaatatgtacacacaactctgaaaagttaaaataacattataaagggaaaaatccagtcactttgagatcatctcagtgtgaagagcctacatacattcgttaatatattcttcctgagcaagctagaatcttgagactttactgcttgaagacgtacacccaagatccattccaggaagccgagggctcgaagacctgggcgaggacgcggacgaggtcggaaggctttgggtcgtggacgtggtcgtggtcgttgatgcggccattgttcgttgtttttgagatgtgcttgtaagatattgtgggagtttttttgagaggttttgaagacgtttttggagagctttttttagttatgtttccattttcttgcaagtgctttatcattccttactgtacaaccattgtcattttgaaactcgtgtatcttgaattacctttctgttattgccttatgttagatgataatgggatctattcattgagcagtaagacaaacaacccaactctaaagtctcttctgaaagaaactgcctatgtatgtgtagtgtcatatgatgaagttatagtaattactggtatttttacgggagggagaagaagtaaaagagaggaggtgggggggggggggagccacttgttatattttgagggttttaggcggcgagagtgcg

SEQ ID NO: 97 - DNA, 842 bp, Glycine max
  Peptide Sequence Number=SeqID_9250
  Probeset Number=SeqID_9876
ttacaaataatttgtgtgatagagaaatcattttccttatgcacataatttctacaaataaatcgaaagaaaataaaacaatgagaaaaaaaagaagaaatcaaactagaaaatgaagtaaaaaaaaaaaatacatcagaaaagaattccattggatattcgaagtattctccttgtagtaaataagaaactatttcctaaatgtattcatttagaactgatgataaaaaatggtaaacaagtttttaaaaacgtgtacttgtgtacgatttcatgcatcatcattcagttaacttttataaaatgattctgtaaatgtaagaaataaaaaaataaaacaaatctaaaactggattagcgtggaaatggctttgcataataatattgagctggagctcagaccaatcattgacataacatttctcattcagttgctctattcattcaagtcatttcccaacaccacaccgattctattccaaaaaacattcaagtgaaccacctcaacaaacgaaacaaataacaaagaatagacaaataatgtatctatacatattatactgtaatatcaaagcatagtattttcggttttgattgatgtgtgtttccattcgcatgatccgacacagaaaactatgaagaaaaaacaattattgtaccgctttttcatgcatcattttatttccgkaaatktatttgttcagaataaaaaaaaagaggacaatagctattattgtttttatttttttaaattaatcaattttttgtcatatgctttccaaaatcattttgaaagatattaacaaatgcaaatgcaaataaataacttgtaaataaaagtc

SEQ ID NO: 98 - DNA, 1884 bp, Glycine max
  misc_feature (19)..(19): n is a, c, g, or t
  misc_feature (24)..(24): n is a, c, g, or t
  misc_feature (52)..(52): n is a, c, g, or t
  misc_feature (78)..(78): n is a, c, g, or t
  misc_feature (80)..(80): n is a, c, g, or t
  misc_feature (87)..(88): n is a, c, g, or t
  misc_feature (98)..(98): n is a, c, g, or t
  misc_feature (100)..(100): n is a, c, g, or t
  misc_feature (105)..(106): n is a, c, g, or t
  misc_feature (110)..(110): n is a, c, g, or t
  misc_feature (211)..(211): n is a, c, g, or t
  misc_feature (265)..(265): n is a, c, g, or t
  misc_feature (282)..(282): n is a, c, g, or t
  misc_feature (405)..(405): n is a, c, g, or t
  misc_feature (407)..(407): n is a, c, g, or t
  misc_feature (432)..(432): n is a, c, g, or t
  misc_feature (441)..(441): n is a, c, g, or t
  misc_feature (517)..(517): n is a, c, g, or t
  misc_feature (519)..(519): n is a, c, g, or t
  misc_feature (525)..(525): n is a, c, g, or t
  misc_feature (527)..(527): n is a, c, g, or t
  misc_feature (536)..(536): n is a, c, g, or t
  misc_feature (576)..(576): n is a, c, g, or t
  misc_feature (595)..(595): n is a, c, g, or t
  misc_feature (697)..(697): n is a, c, g, or t
  misc_feature (699)..(699): n is a, c, g, or t
  misc_feature (706)..(706): n is a, c, g, or t
  misc_feature (716)..(716): n is a, c, g, or t
  misc_feature (726)..(726): n is a, c, g, or t
  misc_feature (737)..(737): n is a, c, g, or t
  misc_feature (744)..(744): n is a, c, g, or t
  misc_feature (825)..(825): n is a, c, g, or t
  misc_feature (879)..(879): n is a, c, g, or t
  misc_feature (958)..(958): n is a, c, g, or t
  misc_feature (1016)..(1016): n is a, c, g, or t
  misc_feature (1040)..(1040): n is a, c, g, or t
  misc_feature (1082)..(1082): n is a, c, g, or t
  misc_feature (1131)..(1131): n is a, c, g, or t
  misc_feature (1146)..(1146): n is a, c, g, or t
  misc_feature (1193)..(1193): n is a, c, g, or t
  misc_feature (1286)..(1286): n is a, c, g, or t
  misc_feature (1297)..(1297): n is a, c, g, or t
  misc_feature (1341)..(1341): n is a, c, g, or t
  misc_feature (1365)..(1365): n is a, c, g, or t
  misc_feature (1376)..(1376): n is a, c, g, or t
  misc_feature (1441)..(1441): n is a, c, g, or t
  misc_feature (1501)..(1501): n is a, c, g, or t
  misc_feature (1506)..(1506): n is a, c, g, or t
  misc_feature (1794)..(1794): n is a, c, g, or t
  misc_feature (1807)..(1807): n is a, c, g, or t
  misc_feature (1853)..(1853): n is a, c, g, or t
  Probeset Number=SeqID_9877
gtgtgtggtggtggccctntgccncgcctggtttttcctctctctctcgtgngctgcgtcgggtgttgggtgctgggngnggggagnnggagggcgcncngcganntccnctctctctttcttatgtgagagtattatagtcttggagattttatattctatatctcttgtagtcttggttattgtatatagatactagtactaaataaanttcatttacttattatatcataatctcacatcgcgttgctgagtacatacctantagaatatgcacatccnccatacacacaggaagtagcaaacattcagtatcctgctctgggcgtgcagtgctgtgctcctctacttatattcccgccaggaagcacgaggcacacaccccactgcagcgcaggggagtananataagagtggtggtgagcacacacnctgctcaanacataatgtatataatgaaatacaagagagacttagtagcgagatatgatgaatactaagtgttgtggagagagananaaaacncnccacaacgnaagtgagactccagacatcacactaccacgtacgatatanaatgtgagaagatagaganttaggtcaggaagctatacagtatatacaataacacgagataaaatagagatggggagatataagatgctatagacggtacggaatgataaagcaactccancngatccgncgcccgcagnccgtgcggcntgcgccgcccnggcgggngcgttacgacgcccaaggccgcacacagagcgcattattggtctaatgttgccgctcgcgctgcgctggtgtgttgagcgntgtcagtggtaagtacttcactctctatcattatttagtgtctatcgcttagcnatatcttgtgtatactcgtacagcatgactatgcgtatgattctaactctcatcactatataatgatgcggaatgacgntgagtgtcatgacatcaagcactgatatatatgataatgagcactactcatcagtctntgtgtaggtgatgatgctcacgtntcgatcgcagactgtgtgacctcacgagacatataatgtgtntgtcataatacaccattatatagtagactagctctcatgcgaaagctcncagctaaccatggcngcgcgagcagcgcgacaaacaatgatgcatgattcattcgtcgatantcataagatatactatgaatgttagtatgatcgcaggcgcgtgggcgatggtgatgatcgatatggtatcgtactatatgtactgtatgccgnagtgtgacaantgtatgacgccctctagagtcgactatgaactctacgtgtatgnatgatacctgtatatgtgggtgtngtatacgctgngcatcgagagggatgagcacactccatcacctcacctacagacagtccacacatatgtacttttntgctcgactcgctgccatctatcatccgattgtcgctatactctggtgatgatctatatnactantctctacatgtgacatagactgagctgagagatggatagtgataattgatcgacgctcacaatatgcacaatagacatatatctattacagacgatatcacatacatctaacactctctgtatcactcgtagataactaaactacatacacataatattactgcatcatatgtcgcgcctcgcagcctcgttcacgatctcacatgctgctctgtatcactacgcgacgtactcgcactgcagttccttgacatcgcataaaactctctgcagttatacgaggtgtgnacgacgactgaancgactaaaccagctctcgattagtgtatacagtgatgacacatcgnctgtcgatcactctcagtacactaatttcca

SEQ ID NO: 99 - DNA, 602 bp, Glycine max
  misc_feature (521)..(521): n is a, c, g, or t
  misc_feature (539)..(539): n is a, c, g, or t
  misc_feature (602)..(602): n is a, c, g, or t
  Peptide Sequence Number=SeqID_9251
  Probeset Number=SeqID_9878
actcaacatcttcttccgcactcagactctctcactaactctcaattcgatttcttcaatttcgattcgaaagagacgatgagcaccggcgcagcaagcggcacgacgaaaggagggagaggaaagccaaaggccaccaagtccgtctctcgttcctccaaggccggtctccagttccccgtcgggagaatcgcgagattcctcaaggccggtaaatacgcagagcgtgtcggtgccggagctccggtttacctctccgccgttctagagtacctcgccgctgaggtgttggagctcgctggaaacgcggcgagggataacaagaagacgcgtattgtcccgaggcatattcagcttgcggtgaggaacgatgaggagctgagtaagcttctgggagctgtgacgattgctaacggaggagtgttgccgaatattcattcgaatcttttgccttccaaggttgggaagaacaaaggagatattggatctgcttctcaagagttttgagtttcattttatcncttggtttttttggatgnaactttagctaatatatgcttcttgattaatatccgtaaggtttgccaaaaaaaaaaaaaaan

SEQ ID NO: 100 - DNA, 739 bp, Glycine max
  misc_feature (465)..(465): n is a, c, g, or t
  misc_feature (739)..(739): n is a, c, g, or t
  Peptide Sequence Number=SeqID_9252
  Probeset Number=SeqID_9879
accaaagagcacacttgatcccacactctatggtgatcaaaccagtaccataacaaaagaacaattggagattaacatgggaggggtcacagtagaagaggcacttagtactcagagattattcatattatattaccaaaatgcattcatcccatatttaacaaggataaacagcctacctactgcaaaagcttatgccacaaggacaatcctgttcttgaaagatgatggtactttgaagccacttgctattgaattaagcaaaccacatccaaataaagataatttgggtcctgagagtgtagtggtgtagcctgcaactgaaggtgttgatagtacaatttggctattggccaaagctcatgttattgtgaatgactctggttatcatcagctcataaaccattaattaaatactcatacagtaataaaaccatttaccatatcaaccaatatacatctcantatactccaccctatttataaacttctttatcctcactaccacgacaccataaatatcaataaacttactatacagtccctaattaatacacatagcatgatacataaatcattgttaccaagagaatactccattaaaatggttttatccatctacaagaattaaattttcactaaccaaacattaccagctaatctcatcaagagaagattaacaattaaaaatccctctacaccccataaccttcaccttataatagaagactacccttan

SEQ ID NO: 101 - DNA, 1783 bp, Glycine max
  misc_feature (1)..(1): n is a, c, g, or t
  misc_feature (22)..(23): n is a, c, g, or t
  misc_feature (34)..(34): n is a, c, g, or t
  misc_feature (39)..(39): n is a, c, g, or t
  misc_feature (59)..(59): n is a, c, g, or t
  misc_feature (77)..(77): n is a, c, g, or t
  misc_feature (112)..(112): n is a, c, g, or t
  misc_feature (115)..(115): n is a, c, g, or t
  misc_feature (129)..(129): n is a, c, g, or t
  misc_feature (135)..(135): n is a, c, g, or t
  misc_feature (137)..(137): n is a, c, g, or t
  misc_feature (139)..(139): n is a, c, g, or t
  misc_feature (143)..(143): n is a, c, g, or t
  misc_feature (149)..(149): n is a, c, g, or t
  misc_feature (157)..(157): n is a, c, g, or t
  misc_feature (170)..(170): n is a, c, g, or t
  misc_feature (200)..(200): n is a, c, g, or t
  misc_feature (206)..(206): n is a, c, g, or t
  misc_feature (208)..(208): n is a, c, g, or t
  misc_feature (210)..(210): n is a, c, g, or t
  misc_feature (212)..(212): n is a, c, g, or t
  misc_feature (241)..(241): n is a, c, g, or t
  misc_feature (245)..(245): n is a, c, g, or t
  misc_feature (274)..(274): n is a, c, g, or t
  misc_feature (276)..(276): n is a, c, g, or t
  misc_feature (278)..(278): n is a, c, g, or t
  misc_feature (280)..(280): n is a, c, g, or t
  misc_feature (287)..(287): n is a, c, g, or t
  misc_feature (318)..(318): n is a, c, g, or t
  misc_feature (360)..(360): n is a, c, g, or t
  misc_feature (399)..(399): n is a, c, g, or t
  misc_feature (482)..(482): n is a, c, g, or t
  misc_feature (691)..(691): n is a, c, g, or t
  misc_feature (695)..(695): n is a, c, g, or t
  misc_feature (850)..(850): n is a, c, g, or t
  misc_feature (855)..(855): n is a, c, g, or t
  misc_feature (920)..(920): n is a, c, g, or t
  misc_feature (946)..(946): n is a, c, g, or t
  misc_feature (967)..(967): n is a, c, g, or t
  misc_feature (1104)..(1104): n is a, c, g, or t
  misc_feature (1143)..(1143): n is a, c, g, or t
  misc_feature (1168)..(1168): n is a, c, g, or t
  misc_feature (1190)..(1190): n is a, c, g, or t
  misc_feature (1276)..(1276): n is a, c, g, or t
  misc_feature (1406)..(1406): n is a, c, g, or t
  misc_feature (1428)..(1428): n is a, c, g, or t
  misc_feature (1442)..(1442): n is a, c, g, or t
  misc_feature (1463)..(1463): n is a, c, g, or t
  misc_feature (1465)..(1465): n is a, c, g, or t
  misc_feature (1488)..(1488): n is a, c, g, or t
  misc_feature (1508)..(1508): n is a, c, g, or t
  misc_feature (1510)..(1510): n is a, c, g, or t
  misc_feature (1548)..(1548): n is a, c, g, or t
  misc_feature (1555)..(1555): n is a, c, g, or t
  misc_feature (1589)..(1589): n is a, c, g, or t
  misc_feature (1595)..(1595): n is a, c, g, or t
  misc_feature (1597)..(1597): n is a, c, g, or t
  misc_feature (1659)..(1659): n is a, c, g, or t
  misc_feature (1683)..(1683): n is a, c, g, or t
  misc_feature (1750)..(1750): n is a, c, g, or t
  misc_feature (1783)..(1783): n is a, c, g, or t
  Peptide Sequence Number=SeqID_9253
  Probeset Number=SeqID_9880
nggctgtccgatggcttacacnntcgtaatagtnactgncatgacagtagtagcaaggnagtccggtcgatcagtgnctcatctgggtcactatctgtacgtctctatctanccntgtgcgaagacagnagtcantnanacancggatncttcacanatatggcgtcctntatatatatctatctatatatatatatatntaggananangnattggtcgatatatatatatatatatagnatanatatatatatatatatatatatatatatntntntntcatcanatatatatatatatatatatatctatctcanatatatatatatatatatatctatattctctctctctctttnttctatatatatatatatatatatatatctgtatctttntgatatatatatatatatatatatctatatatatatgtctctctatatatatatatatatatatatatatatatgtactattnatatatatatatatatatatatatatatatatatatatctctctctatatatatctatatatatatatatatatatatatatctatctctatatatatatatatatatatatatatatatatatatctctgatctatatatatatatatatatatatatatatatatctctctctcacatatatatatatatatatatatatatatatnactntatcattaatctatatatctatatatatatatatatatatctctctgtctatatatatatatatatacatatatatctatatactcactctatctcatctatatatctatatatatcatatgtatactgaaacacagaccaatctactatatatntacantaagtagtcagagtactctcacataatatctatctcatatctcacgtgtacactactcagatctnaaatctctactatatacgatataaantatacacatctgcctcgaatntcatctgaactatcgactctacacccaccacacagacatacgctatacactatcgtatagtgtatagagaagagacatatcgaagctatactctactagctacactcactccaaatacatagcgacacacgcatcgngtactccgacacacaatctatataccatagcgtacacantaaacgcatcaccacactcaccacncacgcatcacagcagacacacncacacgtacacgcacacaatacataaccaaacacaatcaccgatagcgacgaaacactactccgatacacataataatatcaccgnataggagaatggcagaaggtcggactcctacaacatccaagcaccaatcacaacacctacatcactacactacttacacacaaacaagaaacccacacatcacacgtataccaccatcatacattacacnatccatcgcacacacaccagcncaaaactctctacnctaacaccttcacactatccnanacacaccacataacgccacatcnccaaggcaaaatccacaccncncataagcagtatcactcgacacgacgacgcacacaccnacacacnactaatagcataacacgacacggcctaccatacnaatctncnatactgcacacacaccaccgcacacatgcacacacactacaacgaaaaatacacacataagntacatcgtcgactctcactacacnccaacacgcatacgtcggcacacacgcacacctccaccacttacatccagcacacacaaaaagcacnacacaccacatcactcagacatcatatatagan

SEQ ID NO: 102 - DNA, 637 bp, Glycine max
  misc_feature (55)..(57): n is a, c, g, or t
  misc_feature (202)..(202): n is a, c, g, or t
  Probeset Number=SeqID_9881
ccttcttccgcccgcgcccgcatcccatctcaccaccttcctcccgcgccttttnnnttcttcttctcaaagctggaactccaccgcggggggccgcggcggagggtacccgggccgcgggggcggcggttacgggccctgcggccggtggggctgcttgccggccgtgggtaccacggcgacttgatccgatgctgcaggnccgccaaacacgtccccggaggccatgaaccggactgaggtgcacaactaacttagctggcaacctgggcttatgggtttgggcttaacccaagacgggacccccattgggtatcaaatccgcggggggaaaaaaatctctacgcccttttcgaccacgtcttatttcccacccctagggaccgggctgtcttggtttgtttttttttcgccctctttgttcgggccgcgccccacgcttttttacaccaccaaaacgctcatataaaccctcccttcctcccccccgcgtttcctttttataacacattctccacccattgtgggggttgagacaactcccccattatttttggcactgtatcaggcgccccccccccctcgcgctttttcttaccccccggatacctacggcccgttattagggtggggctta

SEQ ID NO: 103 - DNA, 1340 bp, Glycine max
  misc_feature (1)..(1): n is a, c, g, or t
  misc_feature (65)..(65): n is a, c, g, or t
  misc_feature (418)..(418): n is a, c, g, or t
  misc_feature (575)..(576): n is a, c, g, or t
  misc_feature (579)..(579): n is a, c, g, or t
  misc_feature (1150)..(1150): n is a, c, g, or t
  misc_feature (1220)..(1220): n is a, c, g, or t
  misc_feature (1222)..(1222): n is a, c, g, or t
  misc_feature (1229)..(1229): n is a, c, g, or t
  misc_feature (1237)..(1237): n is a, c, g, or t
  misc_feature (1274)..(1274): n is a, c, g, or t
  misc_feature (1314)..(1314): n is a, c, g, or t
  misc_feature (1322)..(1323): n is a, c, g, or t
  Peptide Sequence Number=SeqID_9254
  Probeset Number=SeqID_9882
ncgtgtatgagcgttggagtaatagtatgatagtataatttagtagacggtgagatgcgtgtgantctcagtgtctataccgtcacgtgtcgccacgcgcctcagctctacactgcgatacgcaacgccgtcttcactccctgaagtacgcatgtgtagaggacagcgatagagcgagatgccatcaagtgagtaacgcggctggattgcgcgaagccactatacacaccatcgcatccctagtgtgtacggtgatgaaataacggtcgacctaacgtattgagtctgtacatacggcagatgcatatgatgctccagatgttgtgagtagtaggtggtcattacagatcatgatgcgtatattatgtgaggagtatgataagtcggagtcttgtcagacataatccttgtctatcgnatatatgtcgtagtatttatattgtgaactctatcgcaacattaaaccactcaagaataaaccaccaacaacacaggagggtgggtgggcacacagagttgtctattatattatagtctgtcatcttctttttagtataagtatatcatactttttnnccnccctcaacttctccactatcttctctctgtagtcataacattatatgtatcagtggagctgttgatattctattatattattactaagtctcgagtgtggctactactggtctgtgtagattgatgtatctgacatatgtctcacgagtgagagtagtacagatatgtcgtcgggcgacggagagaggtagagcgagggcgggaatcactcgagtagagagtgaggctacatatcagcacgtgctactacgcaaaagttcgcgcgagacagcgacctatctgtgtgcattcatacacgtcttcgagttatgtattgtgagtagagcagagaaggcagagtatgcacagcaagagtggcgtccatacgcgttctggtagctggtcggcatggagtggctcgcgtacgttggtatggtggagcgcgcgcatcacgagtctacaggagagaggaggagtgatggtgactatacgacaactgatgcaatctcatacatgtagagtagttcagttctgtgcgtatatcattaatattatactatatatatgcggcggagttggtgtcgcacacgcncagatcatgatctgaggtagtcacatctgtggcgatctgagagatagtacccatccagacgagatagatntngtcgaancgtgggtngtcgtgtcgtcgcgcccgcctgaagagtggtggtgtntgttggtctagtgttcaattgagttgtggtggggggtganaaactacnnaacaagaagaaataaaa

SEQ ID NO: 104 - DNA, 2158 bp, Glycine max
  misc_feature (1)..(1): n is a, c, g, or t
  misc_feature (5)..(5): n is a, c, g, or t
  misc_feature (115)..(115): n is a, c, g, or t
  misc_feature (120)..(120): n is a, c, g, or t
  misc_feature (161)..(161): n is a, c, g, or t
  misc_feature (173)..(173): n is a, c, g, or t
  misc_feature (205)..(205): n is a, c, g, or t
  misc_feature (219)..(219): n is a, c, g, or t
  misc_feature (233)..(233): n is a, c, g, or t
  misc_feature (301)..(301): n is a, c, g, or t
  misc_feature (330)..(330): n is a, c, g, or t
  misc_feature (465)..(465): n is a, c, g, or t
  misc_feature (507)..(507): n is a, c, g, or t
  misc_feature (542)..(542): n is a, c, g, or t
  misc_feature (624)..(624): n is a, c, g, or t
  misc_feature (633)..(633): n is a, c, g, or t
  misc_feature (637)..(637): n is a, c, g, or t
  misc_feature (660)..(660): n is a, c, g, or t
  misc_feature (680)..(680): n is a, c, g, or t
  misc_feature (688)..(688): n is a, c, g, or t
  misc_feature (743)..(743): n is a, c, g, or t
  misc_feature (782)..(782): n is a, c, g, or t
  misc_feature (915)..(915): n is a, c, g, or t
  misc_feature (951)..(951): n is a, c, g, or t
  misc_feature (981)..(981): n is a, c, g, or t
  misc_feature (1003)..(1003): n is a, c, g, or t
  misc_feature (1005)..(1005): n is a, c, g, or t
  misc_feature (1012)..(1012): n is a, c, g, or t
  misc_feature (1018)..(1018): n is a, c, g, or t
  misc_feature (1115)..(1115): n is a, c, g, or t
  misc_feature (1140)..(1140): n is a, c, g, or t
  misc_feature (1250)..(1250): n is a, c, g, or t
  misc_feature (1297)..(1297): n is a, c, g, or t
  misc_feature (1310)..(1310): n is a, c, g, or t
  misc_feature (1488)..(1488): n is a, c, g, or t
  misc_feature (1568)..(1568): n is a, c, g, or t
  misc_feature (1655)..(1655): n is a, c, g, or t
  misc_feature (1763)..(1763): n is a, c, g, or t
  misc_feature (1792)..(1792): n is a, c, g, or t
  misc_feature (1800)..(1800): n is a, c, g, or t
  misc_feature (1854)..(1854): n is a, c, g, or t
  misc_feature (1889)..(1889): n is a, c, g, or t
  misc_feature (1923)..(1923): n is a, c, g, or t
  misc_feature (1947)..(1947): n is a, c, g, or t
  misc_feature (1953)..(1953): n is a, c, g, or t
  misc_feature (1979)..(1979): n is a, c, g, or t
  misc_feature (2048)..(2053): n is a, c, g, or t
  misc_feature (2058)..(2058): n is a, c, g, or t
  misc_feature (2127)..(2127): n is a, c, g, or t
  misc_feature (2143)..(2143): n is a, c, g, or t
  misc_feature (2145)..(2145): n is a, c, g, or t
  Probeset Number=SeqID_9883
ncagncggcatcgcgcagatgcgcagcgagcatagtcatgtctgatcattgatagcatacccctagtactgagcgcacagactgacgtcgcatgttatgtacgtcatatcatcgnggtcncacagtcgaccatcagtcatctatatatcacatgcagtacncgttgattcagntcgttgtcgatggactcgtccggccctacacngctatgctgcattnggttgatctgccgncagtagtgtcgactgtcatcacctgattcgttcgactagggtctcctataatgcacatatgtctcgtngcgctacacgttcgctctgactgagggancagctcgagtctcgctgtagtgtcatcgtcatgtcatttcgtagtgtatagtcgctgtcgacgtcatacgtgtccatgtagcgtcttttatgcgatgatcgatgctctagcctacatatcatcttgcgtagcgtnagagacttctatatctctgcagacattctgctttcacgagcnacactatgcacgtgtatgatgcgaggtgatattgncgtagacatcatagagcagtgcgaagacattctgcccgtattacacgtaggcaacctactcctgccctggatcgcgttctgngcgtagctnaaanagagtgcgttgagacgtatcgantgcggctgtgttctgtcatncaaagtcntcatcgcgactctttcacgcactgacacagtgtgcgtttcgagactacatctcgntcaatcatactctgtaacatgtaatgctcgagtcatcgngtcgactctattgagtcgtctgtcgcaccatactccctctgtggagcttgatactcatgagagtcgcgcgatggtatgtattagcacatctgctactagagtctgtgaagtactctcactatcagtgtgcatnccgtcgcgcgatcgtcaactactgtgtattgcagtnctagcagtatggccgctcgatagtgtgtgnacgtgtgtcgcgccgtcactcngncgcgtangccctntctcgcttgtctgttcaacgacaatcactgtgccgcgtgaggttattacaagcgtagatcgcgacttccttcgcacacatcgacgtcgtgtctctgncgctgctagtcaggtatgcgtatcncgtgagtccgtcacgcgtcgccagcacgatttgctctgacgtatagtgaactcactatgttcctgctcttccaggtatcacagattatctgcagtcagtgtcgtactgantctgttactagatgctattcttgagtataagacagtatcgacgatgngcgtttatcatantatgcgtgattagtccgaatttctatatagatgatgcctgcgctcgtcgtcgtaggcgaggcgtcgcctatcgcgtacaatagtagacagtatacatgatataaacacagacgatactcctggcagagcgtggtgtgatgagacgagcgagtcgttagtctacaccgccgactgccancagtgagacgctgtagcagctatgagatgcgtcgcgatcttactggtgagtgtacatatatgatggtcagagcgtgtcgncgtgcgtgtgtcactgacctatgagctctcctcgatttcgactatttctatcatactgtcggtgtcggatctgtcgtcgtagtcgcnctcgtttacatttctgagccgctgcgtgtgtagaccagtcatcagtcagcgacgtcgttccacgaaaaactcagtagtgtagtgactccgcacagcgacctgctcacnactgtgttattgtctggggcgcgtgaganaacattanacgtctttagatcgtggtctcggtgctgccatgtggtagcgattcgatgacgangatacgtgcgtgtgtatgttattaggctagcgctntgcgttgttcattcctgtgggcatataacactgncgctgcctatcagactcctttctnccttcntgcgctatgcttgtgtgttgcaagtngaaacgcctcgcatgcggcgaccgctccctgcccatcgtgagtaggttgtgtgcgaggtcataggccgnnnnnnccgcntcgtatgtctctcgtggtgtctctatacgcgcagatcgtgccgactagctgtattgtcgtgtgagcagncgtcgaggctctgtcngngggtgcccccgac

SEQ ID NO: 105 - DNA, 1383 bp, Glycine max
  misc_feature (6)..(7): n is a, c, g, or t
  misc_feature (199)..(199): n is a, c, g, or t
  misc_feature (746)..(746): n is a, c, g, or t
  misc_feature (813)..(813): n is a, c, g, or t
  misc_feature (899)..(899): n is a, c, g, or t
  Peptide Sequence Number=SeqID_9255
  Probeset Number=SeqID_9884
attaanntaatcatatctatcaatacgcaagaaatacaagaaaataaatagactctagacgaagaaaggcggacaacttaatgaaccagaacccccaacaacctctgcgatagaacatctcgtcgcctatatataccaacacccaacgcaccaccctgacatgcacgtacttctcaactacactaatccaccctacttntgattagttgcgtatgaatgtgttgatatatataccatcactctttctgttccgtgctgcgtacatcagtcgtgttaacctatgtggctgtctccgcgtctccacctctcgtctttgcccactttcgttattactgcatcatacgtacctgttacgagtacctcacgacgctgttctctcctcccaccaccgctgttcctctctatatacacttgaactcatactatagacccaccgtcgatcgtcctcccgccacagatatagcgctaagtatataatgtctacgcggcgagcgaggatgatggttgcttagtcattcatgcccaactagcgaatgagttctaatccaaataaacaccaccaattaattctcgtttatagtttatactcgtccccgtctccgaccctcattaagaattcgtagctctagactcgtgtcgcgactcttgatgcacagcaccctaccgctcgcttctgcccatcatcactttgcctcttgttagctagcccacccgatcctctctgcaatgtgtttatggctccgtcncctaacctgccatcagcccgatgctctaaacatgagcggcgtaacgccaaagacaacacatcacaantacaagccagacacgagaaccatcttgatacataatacgtcataatcgtctgcccgctccacctatctcatcattacctcatatcncatagtgtatcggagtatgagtctatgagtagattgatcatccacttaatcctatcttatctgtcccatatctgcagttctgccgctcagctttcaaataaaataatgataagacactacttacttgtaagtaccctcataccttcgatctcaccaccctcggactatgtttaattattttactaaaagactatcaaaacaacaccttagacgccctatcggtacgttgagagcgccgattgtaactgcgacagcaccactcacaacgcaatatatcaagtataacttgtaaatacgtactactaactctgtcttactatgtatctaacctcattctccatctcttacatcaatacatcctacaaactacatcctacaacgacgtacatagagatatattattcatttagtcgcgtgcggagcctgcgtatcctaccctacggacagtcaatataacactatcatagtaatagatccatgcata

SEQ ID NO: 106 - DNA, 1337 bp, Glycine max
  misc_feature (17)..(17): n is a, c, g, or t
  misc_feature (89)..(89): n is a, c, g, or t
  misc_feature (124)..(124): n is a, c, g, or t
  misc_feature (403)..(403): n is a, c, g, or t
  misc_feature (465)..(465): n is a, c, g, or t
  misc_feature (646)..(646): n is a, c, g, or t
  misc_feature (736)..(737): n is a, c, g, or t
  misc_feature (770)..(770): n is a, c, g, or t
  misc_feature (815)..(815): n is a, c, g, or t
  misc_feature (908)..(909): n is a, c, g, or t
  misc_feature (919)..(919): n is a, c, g, or t
  misc_feature (940)..(941): n is a, c, g, or t
  misc_feature (962)..(963): n is a, c, g, or t
  misc_feature (985)..(985): n is a, c, g, or t
  misc_feature (1031)..(1032): n is a, c, g, or t
  misc_feature (1042)..(1042): n is a, c, g, or t
  misc_feature (1050)..(1050): n is a, c, g, or t
  misc_feature (1119)..(1119): n is a, c, g, or t
  misc_feature (1122)..(1122): n is a, c, g, or t
  misc_feature (1134)..(1134): n is a, c, g, or t
  misc_feature (1185)..(1185): n is a, c, g, or t
  misc_feature (1240)..(1240): n is a, c, g, or t
  Probeset Number=SeqID_9885
cgtatattatatgaganagtaaatattatatatgacataaagaacacacctatcgtcattaacaatatacagaacaagtattcatcaanttattaaactaaacacataaatagaaacatcaatntatagcatattgacacacacacacaccaaaccaataacataactaacactatcaatgtatgttcgctttaaatcatcgactataatatacatcataacattataattccaatacctataatatataacataataatataaatagtcagcaccacaacctacgaccacatatcacaccttatttagttacgcgcccgccgtaagctaacaacagactcagaataatatagactatccagctctatattatataaccaaactcgtatacaagacacagaangaaagagacaagataacctaattaacacatatgatgaacatcagttgcagatatgattaatnattaaactctatgtactcagtaacaacacatatatcatacatatcacccagctcaagagaatagtaaagagtataacataacaacaccttaccaacacacaactatacgcttatacaataatacttcagtctcaaacataataaaacatcactaacagcttcgcgctaactaacgataacnacctaaaaatgcatacgttactattcgttgaatttagttgtagtacgactacaagtatattattaactctacatcttctctgtttgtttnntgtgttctcggaatatatatagaaataggttantgatatatgtaaataatatataatgtaagtagatataatagttantattatatcgttcttacatttaaactatgctgaatattatataatacattactaaacgttacaacacatatacagtagaaatatataaaacannagaaaaaagnattacgttatcatactactgnnaactcactcgagacttcgcgnncgcttctatctctactcgcatntctctgcgacgcaagcacgatcatctactctctgctttctcttctnnccctccactnccggtttnctcctagtctgcgaaacggtacgctatcgcactatctccaatctcataacaatcgtgctaatatatatncgncgtaatcatcgnatatatacatacgaaaacacctataacagatacacacatcgcatcgactantaataacatcgtataaaagtaaatatcgatcacatatatgaaattagtattcttntcggttttctcatctctattcactctcttctctcttctgtcctccacgcatataattatactctacaaataactgaaaaatattaaaaatacaaata

SEQ ID NO: 107 - DNA, 1509 bp, Glycine max
  misc_feature (10)..(11): n is a, c, g, or t
  misc_feature (17)..(17): n is a, c, g, or t
  misc_feature (19)..(19): n is a, c, g, or t
  misc_feature (24)..(24): n is a, c, g, or t
  misc_feature (29)..(29): n is a, c, g, or t
  misc_feature (32)..(32): n is a, c, g, or t
  misc_feature (77)..(77): n is a, c, g, or t
  misc_feature (90)..(91): n is a, c, g, or t
  misc_feature (93)..(94): n is a, c, g, or t
  misc_feature (180)..(180): n is a, c, g, or t
  misc_feature (189)..(189): n is a, c, g, or t
  misc_feature (221)..(222): n is a, c, g, or t
  misc_feature (515)..(515): n is a, c, g, or t
  misc_feature (574)..(574): n is a, c, g, or t
  misc_feature (897)..(897): n is a, c, g, or t
  misc_feature (1095)..(1095): n is a, c, g, or t
  misc_feature (1213)..(1213): n is a, c, g, or t
  misc_feature (1263)..(1263): n is a, c, g, or t
  misc_feature (1272)..(1272): n is a, c, g, or t
  misc_feature (1329)..(1329): n is a, c, g, or t
  misc_feature (1441)..(1441): n is a, c, g, or t
  misc_feature (1443)..(1443): n is a, c, g, or t
  misc_feature (1450)..(1450): n is a, c, g, or t
  Peptide Sequence Number=SeqID_9264
  Probeset Number=SeqID_9886
gggggggggnngggggngnggggntgggnganggggtaaagggaagaagttattggaatagtagtattttataggtngtaggaaaggttnntnnaggatgaatagaagaagggtgggaaggagagaatggagagagtgcgaggttgaaatatagtggaggtggggtgggattggaaacangaattaatncgtgactgcgttggtctgtaggtgttggcttnntgttaatatggagaccaattccgaagatggacagagaggaacaaagcgattctatatacagcagactacatttgatgaagagagattagatcacatctctgctaaataaggctcttaaataatgtgttaaccacacagatcactgttaccatctgtcgcgagtggcgatgatggcctcacatctcaacgctcctggcgccaagaagatctaatataggaaagtatggagatggtggtgagtgtggggttggggttgccgggatctgggggctcggttgtcgacggggccaagncccacaataaaccttttgcgaaagtacactttccccctctcgccaccctattgtgggcngtcgccggggatcaacaactacttttacttaataaagaaaaaccttataagggggagaatgtacccccccacacagaggggggcctatagaacaaagggggaaacaaaaccgcgccgcgggagagaagaaagagggggccagaaaaacatagcaacgaggggggagggaaaaaaaatataatcgggggagagcgatctttatgggcgaaataagcatgggaatatattgtttggcggtgtggttaggtacataaaaatgtgtggaacaccactatgtgtaaatatacacaacaccgcaccccgcgattttgtggtggatgagncgagaacagatacaaatatatgtgggggtagaggagcactctcacatcgcttacttccttgtggtgtgggacgggatgtggtcatactagaggagcgcgcgccgcgacaacaagtatgagaaacacacacactgacacacgcgcgatgtgcttatggctgctggcataatacaacgaaagagtgagaggggatcggtnctccacatacacagcaaatcacaaccaccaccgcgcgcgccgcaccatagcgcgactcacatactatgttgcttgtgagaggtacagtatgtcagaagagagaacagaataacccacngggatgagcgtgggcgcggtggtggagcggggtgaaactatctatatatnatctccgcntcgctacgcggtgtgcgtcaaaccatcgaccgcgcgcgcgcgcagaaagaaaaatantacacaaatagtagatcacgcggcgcggagaccgctctactacatatcaagaccactggcggtggcgcgcggcgagcgtagagatataaatcaaatcttactcatgctgggngntgtgtgntgtgtgcgtgagggatacggtgagaggggagcgaggaatactaatatattagagtcgcg

SEQ ID NO: 108 - DNA, 1991 bp, Glycine max
  misc_feature (5)..(5): n is a, c, g, or t
  misc_feature (30)..(30): n is a, c, g, or t
  misc_feature (54)..(54): n is a, c, g, or t
  misc_feature (79)..(79): n is a, c, g, or t
  misc_feature (88)..(88): n is a, c, g, or t
  misc_feature (155)..(155): n is a, c, g, or t
  misc_feature (184)..(184): n is a, c, g, or t
  misc_feature (501)..(501): n is a, c, g, or t
  misc_feature (613)..(613): n is a, c, g, or t
  misc_feature (623)..(623): n is a, c, g, or t
  misc_feature (708)..(708): n is a, c, g, or t
  misc_feature (812)..(812): n is a, c, g, or t
  misc_feature (814)..(814): n is a, c, g, or t
  misc_feature (849)..(849): n is a, c, g, or t
  misc_feature (940)..(940): n is a, c, g, or t
  misc_feature (980)..(980): n is a, c, g, or t
  misc_feature (982)..(982): n is a, c, g, or t
  misc_feature (984)..(984): n is a, c, g, or t
  misc_feature (1022)..(1022): n is a, c, g, or t
  misc_feature (1033)..(1033): n is a, c, g, or t
  misc_feature (1136)..(1136): n is a, c, g, or t
  misc_feature (1262)..(1263): n is a, c, g, or t
  misc_feature (1319)..(1319): n is a, c, g, or t
  misc_feature (1338)..(1338): n is a, c, g, or t
  misc_feature (1375)..(1375): n is a, c, g, or t
  misc_feature (1398)..(1398): n is a, c, g, or t
  misc_feature (1401)..(1401): n is a, c, g, or t
  misc_feature (1403)..(1403): n is a, c, g, or t
  misc_feature (1421)..(1421): n is a, c, g, or t
  misc_feature (1468)..(1468): n is a, c, g, or t
  misc_feature (1471)..(1471): n is a, c, g, or t
  misc_feature (1509)..(1509): n is a, c, g, or t
  misc_feature (1636)..(1636): n is a, c, g, or t
  misc_feature (1695)..(1697): n is a, c, g, or t
  misc_feature (1700)..(1700): n is a, c, g, or t
  misc_feature (1711)..(1711): n is a, c, g, or t
  misc_feature (1744)..(1744): n is a, c, g, or t
  misc_feature (1749)..(1749): n is a, c, g, or t
  misc_feature (1758)..(1759): n is a, c, g, or t
  misc_feature (1762)..(1763): n is a, c, g, or t
  misc_feature (1768)..(1770): n is a, c, g, or t
  misc_feature (1775)..(1775): n is a, c, g, or t
  misc_feature (1779)..(1779): n is a, c, g, or t
  misc_feature (1782)..(1782): n is a, c, g, or t
  misc_feature (1807)..(1807): n is a, c, g, or t
  misc_feature (1813)..(1815): n is a, c, g, or t
  misc_feature (1826)..(1826): n is a, c, g, or t
  misc_feature (1828)..(1829): n is a, c, g, or t
  misc_feature (1850)..(1850): n is a, c, g, or t
  misc_feature (1856)..(1856): n is a, c, g, or t
  misc_feature (1858)..(1858): n is a, c, g, or t
  misc_feature (1872)..(1872): n is a, c, g, or t
  misc_feature (1878)..(1878): n is a, c, g, or t
  misc_feature (1891)..(1891): n is a, c, g, or t
  misc_feature (1893)..(1893): n is a, c, g, or t
  misc_feature (1903)..(1903): n is a, c, g, or t
  misc_feature (1906)..(1908): n is a, c, g, or t
  misc_feature (1912)..(1913): n is a, c, g, or t
  misc_feature (1921)..(1923): n is a, c, g, or t
  misc_feature (1930)..(1933): n is a, c, g, or t
  misc_feature (1948)..(1948): n is a, c, g, or t
  misc_feature (1955)..(1955): n is a, c, g, or t
  misc_feature (1957)..(1958): n is a, c, g, or t
  misc_feature (1962)..(1964): n is a, c, g, or t
  misc_feature (1967)..(1967): n is a, c, g, or t
  misc_feature (1969)..(1970): n is a, c, g, or t
  misc_feature (1975)..(1975): n is a, c, g, or t
  Probeset Number=SeqID_9887
tatantgttttgtcgtttcggttcgacttnatgagtgatgcgtcatagggagtngtgttcgttgtgtgtcgcacgatcntccacgtcntatatcatcatcacatctcgtatgacgacatgcgactcataagatgtagcatactcatatacgtatnataggaggtcgcaagtaataatgcatganacgcaaatcgtcgtagacgatcaccagtcctctaagcactcgagtcgagagtgtatgggcgtgctgcgcgtgtcgcgcgtgatgaggtccgcgtgctgggcgaggatagcaggcattgagagagactatgtatatttacatacgttcgagagaggtgattctgttagctagatcactagtaatatacatgatcatatgtgaaattatgtgatagtgtgctcatgacctcaatgacataatccaccatcgtatcatacgcttaccatacgcatctcttctcactactatccatgagcgcaagcgcagcgagggaaganacggcgacgcatagcgcgcactcacacgtgcgccgtcatactcacgtctcatcagctatccagcttcatcgctcacgagctatacgccactcatatcgtgtagcgcgggctncacgcgtatnaatagagacgtatcttctcatcatagatatagattactgaggacgcgtgaacgtcatcgcgacacggagagcgtcgtcggtgtgncggacgcacgcacacacacaggcactacacgtatgacgctccaagtcatcaacttataatataactatcacgtctcgacctgttgtgtgcgtgtcggcccgcgncngcgacggcgctcgagtcacgcgcgcactgctaatncgtcagtcagcggtcgcgtatgactagcgctgtacgaggtatgatatacattctgcatcatacatagacatgcacatctcagaacgcatanacatcattcgccactacatatattactaacacacagacanancnctatacgacataagtgagatagcagtgatacagcaganaaggcaatgcnatggagcgactagcataaccagcacagactcgcgaagatgtagcaagcgacgagtgtgtgtcttgagtacgtgcacctcgtgcgctatccttatgctcacttnatagagtccagcataggagtcgtgtagttgcgtagtctcatgatctgcgtcgtgcgtttgagtttcgtcaactctcgactcgtgtgattcgttagtagcacgcgcgtcgcgctggctcggtgtganncgctgctggtctggtcatgctcgctgtcttcgatctcgcgctatcttgacgctgtncgcgtgtcccatctgcatntcacactgctatacacatacctctataatctatctcnagtcttgagtggcacactacgtngcncntgacgatatatcatgtcnagtagtcatcctgcgcggctctcgactgtgtcgacttcatcttcttnctncttatgatcttgatgtatgatgtggtggctagttgtgntagggttgtgagtgcgcagttagtatagctgtctccgtcaggccgcgccgctaataatcgtatactatcggagcacacgttgtgcgggtagcgtgtcgtgtctgatcgcagcgcgaacatgcgacgntatcatagcaggtactatcttgtacgtcgtctgctcgtatacatagactaatcctagannntantgtaattggantatgggtatggtgaaaataaaataagaagatantacantgactaganntannttccnnngtacnctanatntgtaccactgcagcggcgtgaagtngggggnnngggtgcgttgngnngtcggctgtccgccgcgcgtngcacancnaccagcacgcaccncacaanggtccaacactcntntcgccggccntannnctcnncgcctgcnnnccccgcnnnntccctcgcctttccnccccccncnncccnnnccncnnccacnccaaaacccccccccc

SEQ ID NO: 109 - DNA, 1780 bp, Glycine max
  misc_feature (315)..(315): n is a, c, g, or t
  misc_feature (590)..(590): n is a, c, g, or t
  misc_feature (595)..(595): n is a, c, g, or t
  misc_feature (695)..(695): n is a, c, g, or t
  misc_feature (863)..(863): n is a, c, g, or t
  misc_feature (888)..(888): n is a, c, g, or t
  misc_feature (1073)..(1073): n is a, c, g, or t
  misc_feature (1123)..(1123): n is a, c, g, or t
  misc_feature (1125)..(1125): n is a, c, g, or t
  misc_feature (1136)..(1136): n is a, c, g, or t
  misc_feature (1139)..(1139): n is a, c, g, or t
  misc_feature (1154)..(1154): n is a, c, g, or t
  misc_feature (1162)..(1162): n is a, c, g, or t
  misc_feature (1165)..(1165): n is a, c, g, or t
  misc_feature (1174)..(1174): n is a, c, g, or t
  misc_feature (1228)..(1228): n is a, c, g, or t
  misc_feature (1235)..(1235): n is a, c, g, or t
  misc_feature (1250)..(1250): n is a, c, g, or t
  misc_feature (1270)..(1270): n is a, c, g, or t
  misc_feature (1305)..(1305): n is a, c, g, or t
  misc_feature (1418)..(1418): n is a, c, g, or t
  misc_feature (1441)..(1441): n is a, c, g, or t
  misc_feature (1495)..(1495): n is a, c, g, or t
  misc_feature (1505)..(1505): n is a, c, g, or t
  misc_feature (1518)..(1518): n is a, c, g, or t
  misc_feature (1534)..(1534): n is a, c, g, or t
  misc_feature (1541)..(1541): n is a, c, g, or t
  misc_feature (1543)..(1543): n is a, c, g, or t
  misc_feature (1595)..(1595): n is a, c, g, or t
  misc_feature (1597)..(1597): n is a, c, g, or t
  misc_feature (1602)..(1602): n is a, c, g, or t
  misc_feature (1643)..(1643): n is a, c, g, or t
  misc_feature (1651)..(1651): n is a, c, g, or t
  misc_feature (1656)..(1656): n is a, c, g, or t
  misc_feature (1660)..(1660): n is a, c, g, or t
  misc_feature (1669)..(1669): n is a, c, g, or t
  misc_feature (1679)..(1679): n is a, c, g, or t
  misc_feature (1735)..(1735): n is a, c, g, or t
  misc_feature (1740)..(1740): n is a, c, g, or t
  misc_feature (1780)..(1780): n is a, c, g, or t
  Peptide Sequence Number=SeqID_6007
  Probeset Number=SeqID_9888
tctttcttgtcttgttcgttatctcacttctctccctctcgctctgtctgattttattatatatgctagtgtgcatgtaatatatctatgttcgaaagggagccgcgctactctctctgagtatggatacgcgtgcgattagcgcatgctgcgtcctcctctcatcttccttctcttatcattatcctgatagtgactacaactagatagagagccagattcctctctatcgaactacataaatgaagataatactatataagtagagacgtgagtctgcgcgtgtcgctacgtgtatttatagatacgttgttngagcgtggagagtgaggaatcagctggggcagccgcgctacgtctagccacacctcgtgatcgtcgtctacctacctatacttacatctactctcatcacaaccatactctaccatcagtgatctctcacgtcgagatctatatcactcgtacgtgcttgcgcgctcctctctctctaggcaacaacatacacttccttctctgatcgccgtctcatacacatctggctactgcgacgcccgcgcgtgactgtctattgccatggctggacgagnaggtncttagcgacgtcgttcgatagcctccgcactcatgattgtgtacagctatgatatcctgattctgtctgactatgtacgctactacgtgataactctttntcgttcactatataattgcagttgattagactatcgctactctataacgactactgttacaacaatgaccatgtatgcttcttcactgtgataaccgagcatctgcactctgagatctacgagtgtgtagtttatatgatgaattaatgatactacagcttgcgcganccctctcatcggaccactacgctcngatccacttacatcatgtctgacactatatacatgacgtagtaggacgtcgcgacctccaatgtcaagattgactctctcgtatcgtacgatgctatgatatgtaacgtgaccagagctatccgtacgatgtctactatctgctgaacgacgcacatcatctgcgtcactctcgatatcgcacgntatagtcgtagctcgtcgatgacgacatacatattgcgtaaatcgatggnanacgcggtcagnagncgtatttctactctnctcgacgntcntccgacgantcgttgttacatggtgctgctgtgtcatatactgatgggcagcatcacgcgttngtaagantcgctcagcatgccnctactgaacgcgccactctncacacatcctcgctatcttactcgctcgtatgatngtggcgtatctcatatcactgccacatcttactcgtatcgacgtacgcactgcgtaccaccactcgtatgctgacgatgctatctcatatatgacgttgagctatgctctcantgacgacagtgatgatcatgacntcacactgctctaagcacctcggactgacgtcacatcgtgtagtctatctcgcngcctacacancgcgaaatacgcnctaagtgttaatcgcnatgatanantcactcctactgcctgcgcccgcacatatcactatcatacatctcgtcgtcnantactntatactatctttacaagcttcagtacttagtgatgtactantaatactnatctncgantcatcgacnttgattacantccgcatatactagtgactatgtatagtatatctgttagcacgctatatgataggntatgnatgtcaatgttagtagctcgataacagcgaatgacgatan

SEQ ID NO: 110 - DNA, 1551 bp, Glycine max
  misc_feature (1)..(1): n is a, c, g, or t
  misc_feature (48)..(48): n is a, c, g, or t
  misc_feature (142)..(142): n is a, c, g, or t
  misc_feature (157)..(157): n is a, c, g, or t
  misc_feature (256)..(256): n is a, c, g, or t
  misc_feature (259)..(259): n is a, c, g, or t
  misc_feature (282)..(282): n is a, c, g, or t
  misc_feature (505)..(505): n is a, c, g, or t
  misc_feature (731)..(731): n is a, c, g, or t
  misc_feature (1207)..(1208): n is a, c, g, or t
  misc_feature (1211)..(1212): n is a, c, g, or t
  misc_feature (1406)..(1406): n is a, c, g, or t
  misc_feature (1495)..(1495): n is a, c, g, or t
  misc_feature (1498)..(1498): n is a, c, g, or t
  misc_feature (1500)..(1502): n is a, c, g, or t
  misc_feature (1505)..(1506): n is a, c, g, or t
  misc_feature (1511)..(1515): n is a, c, g, or t
  misc_feature (1526)..(1551): n is a, c, g, or t
  Probeset Number=SeqID_9889
ncgagtgaagagaggggagtatgtgatgataagttagcacgggatgcnaattgcggagaggctgatgagatatatctaaaatgcatatataacggcgtctacatacgtcatgtgggtagtccatctactaaaggtcgatatntatgatggatgacanatgacatgttcacacataagtggatgtgtgaacgcgaaggacaagtgagggcgcgaggaggcggtaacagatggagtgagacacgataaaagggagacnatngcatgtgacgatggcgcgcgaangtgtggcttatcattttcgatgtgccttgccgtagggtggacctccgcgtattacaccacaatagacaaatacacacactcttgtctatcttgtctctatgtacttatttgctcggctcaatcgagacacgatgtgcgtgcatacgtacgcttgatacacgctaatgtgttcgtattgttctatattgttatctatattttaacttggtgttccgtatcgtanttatgttacccttatcttgtgtatctggcttagaactggcggagtgcgctaagcggttgtggtgtgttaagaggtagcggaagtggatcagagcaatatttcaatgaggatagtgaggtcaagggatctatagtagtaggaaaaatcgtaataaacatacaaataataactaatggttaattataattctctagcgcggtccaggcactaggatggtgcggtcggntagtagtgatttgatcattcccgtgtctggataggtccgccctagtgcaggaggctgttggtagctcaaggtcgggtgggcgacgggtaactccacgtcgtggacgcaggtcggcgttgctcatctaagacggagaaccgggttcgtagtgaccaggtagtactttcctcacgtagtgacggtgttgtgtcatagtacgataagactgtcaacgcactgttgagtgtaacgtacgtgagcgggctggagagcagacgcggctgtaggatatcggcgagatcccgggttagtggaaagccagtagaacgctaccggggagagttggaggtcctatctaggagcgtggtagcacagacgagttgatatgcggtgtgagtatgtgtgactgagtcgcgtctgtggagagcaagctgattctagaggaacctagatatatcgagccgttctctgctacgaggacggtcggaacacataanncannttattataaatatatatatatcatatattttaattaattgatttacataatatatacaaaatatatgggaagagaggtaataattaagagtatcacgctttatctaaatatataaataaggtgagatttattagtatgtattcgtttcgagagaaatccgcctgaccgtaggtgcatctccgccgtcgataccncgcgcgcagtactcccggggcactccctatatgtcctaagactctgaccggcccacccccgggtggatctcaccagttttttgcaaccnatncnnntcnncgttnnnnnccccccccaannnnnnnnnnnnnnnnnnnnnnnnnn

SEQ ID NO: 111 - DNA, 2178 bp, Glycine max
  misc_feature (1)..(1): n is a, c, g, or t
  misc_feature (9)..(9): n is a, c, g, or t
  misc_feature (12)..(12): n is a, c, g, or t
  misc_feature (24)..(24): n is a, c, g, or t
  misc_feature (26)..(26): n is a, c, g, or t
  misc_feature (64)..(64): n is a, c, g, or t
  misc_feature (73)..(73): n is a, c, g, or t
  misc_feature (85)..(85): n is a, c, g, or t
  misc_feature (111)..(111): n is a, c, g, or t
  misc_feature (123)..(123): n is a, c, g, or t
  misc_feature (140)..(140): n is a, c, g, or t
  misc_feature (156)..(156): n is a, c, g, or t
  misc_feature (180)..(180): n is a, c, g, or t
  misc_feature (185)..(185): n is a, c, g, or t
  misc_feature (200)..(200): n is a, c, g, or t
  misc_feature (211)..(211): n is a, c, g, or t
  misc_feature (217)..(217): n is a, c, g, or t
  misc_feature (228)..(228): n is a, c, g, or t
  misc_feature (237)..(237): n is a, c, g, or t
  misc_feature (284)..(284): n is a, c, g, or t
  misc_feature (320)..(320): n is a, c, g, or t
  misc_feature (337)..(337): n is a, c, g, or t
  misc_feature (412)..(412): n is a, c, g, or t
  misc_feature (442)..(442): n is a, c, g, or t
  misc_feature (445)..(445): n is a, c, g, or t
  misc_feature (457)..(457): n is a, c, g, or t
  misc_feature (484)..(484): n is a, c, g, or t
  misc_feature (489)..(489): n is a, c, g, or t
  misc_feature (529)..(529): n is a, c, g, or t
  misc_feature (592)..(592): n is a, c, g, or t
  misc_feature (599)..(599): n is a, c, g, or t
  misc_feature (617)..(617): n is a, c, g, or t
  misc_feature (623)..(623): n is a, c, g, or t
  misc_feature (629)..(629): n is a, c, g, or t
  misc_feature (663)..(663): n is a, c, g, or t
  misc_feature (697)..(697): n is a, c, g, or t
  misc_feature (708)..(708): n is a, c, g, or t
  misc_feature (711)..(711): n is a, c, g, or t
  misc_feature (719)..(719): n is a, c, g, or t
  misc_feature (744)..(744): n is a, c, g, or t
  misc_feature (810)..(810): n is a, c, g, or t
  misc_feature (862)..(862): n is a, c, g, or t
  misc_feature (907)..(907): n is a, c, g, or t
  misc_feature (1019)..(1019): n is a, c, g, or t
  misc_feature (1140)..(1140): n is a, c, g, or t
  misc_feature (1155)..(1155): n is a, c, g, or t
  misc_feature (1198)..(1198): n is a, c, g, or t
  misc_feature (1242)..(1242): n is a, c, g, or t
  misc_feature (1286)..(1286): n is a, c, g, or t
  misc_feature (1338)..(1338): n is a, c, g, or t
  misc_feature (1359)..(1359): n is a, c, g, or t
  misc_feature (1440)..(1440): n is a, c, g, or t
  misc_feature (2020)..(2020): n is a, c, g, or t
  Peptide Sequence Number=SeqID_6888
  Probeset Number=SeqID_9890
natgcgacnatnactagacgagtnantggttcgtacactgatatgcctgttcagacgtgatctncgtgatacnacagtccaccgncgcattcgtcaccgtatgcagatgancatgatcgtatncatagtcgatgatactncaatagcgacgactangtatgcagagtcagcagcgcatantatanatggctgagcagcgntcggacgcttngtagtncatcatcgagntcagtccanttcacatcacgatgatgtgccgccgttgtactcgacgacgcgtcgantatacgccgtcgtagcatcacacgtctatcttacanacgcgtcatcattatgntactccgtcgcagtgtgtctaattatcatcgtctcgtccgcagttgtgcgcactagtgctcatagtggagctatntgtgtcgcgatctagtcgtcctacgcacgntgnagtcagctgcantatatagagtacgtcatcacgtgccancagcnctacatcacgatgaagagtgtgagtcgtgtctgtcagtcncagttgacgcgtctcgtatctcgtcgttcgttagtcgtctcgcggcgacagcatatgagagantcatgcncagcgacagactatgctngtgtcncattcnacgtagtaggtagtcgcgacgtcgctacggatgngttaagactgcacgtcgtattgatcgataaagantctacgcacgnagntcggtcgnacatgtatttcgtactgtagatcgnctatacacgacgtctcatatcatatcgtcgtgcgcatacactatgcatactggctgctcgcgtatnccctgtatgcgcgactatgtcgtcagtgtcatattctgattacttatctatntatcgtgcatcagtagacagcgatgtgtacagtgagtcgagtctngagtccacgcgtctccacgacgtcgcgatgacacacgcgtgatggcacgtagcgctgtcgttcgctgtcactcgtggacgacatcgttcgtcctagcatagtgaagcatggntgcgtatgacatgtctgcatcactcacatatcgtgagattagtgtctcgtcgagataagataaattgaccggcgcgtgctcatacatacagagcttgcgccagctagttatctcttgctanagacatctcattagngcacgcatgacacgtccttacgtctcagagcagagatatggcngcatgagtgctggatatcgctactaatgatagcacgacggtgcnaacagcagagccactgtatcgttacatccggacgtacgcgtacnccgcatacgtgcactcgtatggacagactgacgcgcgctaacgtatcacaangtctacaatcgtatgtgatgngtcgatatctgatatgatgattatgctagtgctacattcatgcgtcgcgagatgcgaaagtcaagtgacacatgtctccgntatgctgtagggtggtcgcttataatatatatatcagtctcccggcagtcgtgtcggctgcccgatgcgggcttactggtctcaccatcttgtatatatccgcacactctaggagcgcgatatacgcgagtgctcttcgtggcagtctcttagcagtagcgcagcgagaacaaccacgccgctagactcactcgtcacggacgcgcggagcaggccgacatattactctacactcgacatgctcttcgcgcgcacgctcaacggcagagccggttagagttcaatgaagtcgtgagcgacatcctcatatgattgtgaatcactcacagatatcacagtacagtcggtctgtaaggagctggtagtagagtatatcatattacttataattatcactcgtgccgtcgctccgcgggcggtgattgttctgtctcgcgaggtgcgtatgagagccgaatcgagtattgattgcgacgtatagaaacactttctatcgttattgtagttactcaacatcttagtccatcattttcatctactgtgtggcataatactttctcctccgctcatctcctcttcngagtacttggtggaggaaaacacagcgcacctgcggaggagagccgcgccagcagttagcgtgtcaccacgacagcgcgactacggcgcaccgaccgacgcgtcactactacgcacactgctacgtttctgcatctatttactagctctgttcttgtg

SEQ ID NO: 112 - DNA, 1493 bp, Glycine max
  misc_feature (1)..(1): n is a, c, g, or t
  misc_feature (91)..(91): n is a, c, g, or t
  misc_feature (231)..(231): n is a, c, g, or t
  misc_feature (690)..(690): n is a, c, g, or t
  misc_feature (774)..(774): n is a, c, g, or t
  misc_feature (1051)..(1051): n is a, c, g, or t
  misc_feature (1342)..(1342): n is a, c, g, or t
  misc_feature (1447)..(1448): n is a, c, g, or t
  Probeset Number=SeqID_9891
ngataagcatagacttccttgctagagttggtaacactactgagctctataatgttagatgattaatgatagatatctatcctgtatcganaagcactcacgaactgtttatgtttagagtcgattatgtcaatcatatgactacgcgcgcgcacctgacgcgctgtgctagagcccgcacctctgtctattctcgccgtatctgtgatggcggcagagttatagctgcgnctcgtcacacaatcctcctgtctccatacatagtaaagacacaatgcactgccacggaatatcgactcacatccgcgcgcgctaccctgcgtcttttacgaatacgcgtatacgtggccgcccaaacaagcggccaccaccacggcgtgtcatggcgtactatgatacaagatgtatctatcgcgacctctgaagaaaggatgaagtttataagttcacatcgcaggaaccagatgtgtcattatacgaccagctgtacagaccaaacacccgtccttgtcgtatctacctctccccaccatccttgtatactcatgtcgtgactgtcccgcttctgtggtgcgtgtgttggggtggataatctcttattacactcctcttaatcccgcatattttatttattcttctttacttcttctactcatctataataatttttacttactattctcctcaccntcccacacccaccactcaacatcaagatttgcctgcgatcctttctgtgcgtggtatataccgtgggaccgggctgtctttaantctcgggatgagacggagtgggtgatgaagggtaagctttgttaatctattctcttactctacctctctcatcccgtcatctgcaatcttacaactgccgcctccgcccagctcctccacgtggcgcggcctccatggagaagcaggagagggtgcaggatagtgttgtgcagaggcgaggaaggcgcggaggcggaccgccgagtcccacgcgccagacagccgagacggtccgcgccctgctcgcgtccatcccctcgtggatatctcgaccagncgcgctcactcgacgaagtggttatctgtttcatattttttcttagtttattggcgcgcggcgtagaggagtgtgaagctgataatctgtaatcaacatcgctagcacaaccatctctccctacattcagtcgagaccgagcgcggactggatttggtgctgaaagagattattgtaagacgtacgcccccccatcatgacaggcgcagggcctctccgcggcgctcccgcccccgtcagagacagaggtatagggtatctcgtgcacttcatcctctactaccccagagngggcacgatcagggaggaggctcacattgtttatcacaacatctcttcctggttggaggtagagggtgttgtcactcgtcgtaaagagcggcggacgcaacccgnnttacctataattttttaaattccctgcgctggggcccccaacccc

SEQ ID NO: 113 - DNA, 570 bp, Glycine max
  misc_feature (194)..(194): n is a, c, g, or t
  misc_feature (240)..(240): n is a, c, g, or t
  Peptide Sequence Number=SeqID_6889
  Probeset Number=SeqID_9892
gtgaaacactacccaattgaacttgcctttttctgatgcagttggaaccttttcctttggtcttctttccttctctgtctctctgcttattgttattgctgttgtgactaaagaacaaggggttgcttcttcccttttgttttcaaagaagaaaattttcaattttcaatttttcattgggttctctgaaatgnagagagatttcatgggtctcaacttgaaagaaccactagcttgtgntgaaaagagagatgaaacatgatgccttgcaaactctgggcttcaaaaaggtcgattttgacatgggccattctcaaacaagtatctgccttcccccttttgatggcttttaagctttccagatgataaaataaaaaaaaaggggccggaaactatcatcctttcgggggttatttgcctttttaaggcaagaaaatttttgaccttaatccaaaactccttttggaaaaccccccaaaattttttaaactttggggggaaaaggggccccctttttttttcggagattttaaatccgggaaaaaaaggtggggaatcccccctgggggt

SEQ ID NO: 114 - DNA, 1539 bp, Glycine max
  misc_feature (1)..(2): n is a, c, g, or t
  misc_feature (14)..(14): n is a, c, g, or t
  misc_feature (18)..(18): n is a, c, g, or t
  misc_feature (26)..(26): n is a, c, g, or t
  misc_feature (39)..(39): n is a, c, g, or t
  misc_feature (99)..(99): n is a, c, g, or t
  misc_feature (126)..(126): n is a, c, g, or t
  misc_feature (128)..(128): n is a, c, g, or t
  misc_feature (133)..(133): n is a, c, g, or t
  misc_feature (135)..(135): n is a, c, g, or t
  misc_feature (142)..(142): n is a, c, g, or t
  misc_feature (221)..(221): n is a, c, g, or t
  misc_feature (266)..(266): n is a, c, g, or t
  misc_feature (423)..(423): n is a, c, g, or t
  misc_feature (462)..(462): n is a, c, g, or t
  misc_feature (592)..(592): n is a, c, g, or t
  misc_feature (597)..(597): n is a, c, g, or t
  misc_feature (1116)..(1116): n is a, c, g, or t
  misc_feature (1195)..(1195): n is a, c, g, or t
  misc_feature (1270)..(1270): n is a, c, g, or t
  misc_feature (1331)..(1331): n is a, c, g, or t
  misc_feature (1362)..(1362): n is a, c, g, or t
  misc_feature (1424)..(1424): n is a, c, g, or t
  misc_feature (1437)..(1437): n is a, c, g, or t
  misc_feature (1441)..(1441): n is a, c, g, or t
  misc_feature (1474)..(1474): n is a, c, g, or t
  misc_feature (1484)..(1484): n is a, c, g, or t
  misc_feature (1524)..(1524): n is a, c, g, or t
  Probeset Number=SeqID_9893
nnttttttttaaantttntgattttngtgttgtttcacngcatcgacgcacaccggccaactaccccccaccacactattttcactccgtgactctcgntggtgatgataattattatgtgtgggntntctcncnccggagncccgagatagagcgataacgcgcgggtcctgcctcccatccataagggttagaaggaggagaatcagtatcagagtctnttactctcttatctccttttctctcctcttcaagagcaggagaanctgtagcagagatatctggagtttgagatgtctggcgcttcagagactttatattggaagcctagcttcgatacggggcccccactactaatacatgccaatccgcccatcatccctcagttcagtgccatatcacacgagaaacagagggatgaantattagagttcgcagaatggagactgcctattaatgganccagttcttaacagcggcgtgagaacagtatgatcagatagaagaatgtatatgatctcgacagttgtccccgagttagtatgctacttatgacaataatatatttattcacctcttgatggagtggatntcctntttatttgtcgcagcaatataactaccatcgcccctcagctaccctgcctcgctagcgcacctagagtctcgccacgcccctgctcggtgagaccgacgtataacaatagatagtagctcagacacacagacacattatacgctacacaaagctacatcaaccgacacctcccgtagatgtgagtagtacacccaccgcacacggcatgtggagcgtcgtgcggagtaggaggtagatacactgtacatcttcgatacaactatgatcatctacgagcgcgcttcattgcagcagatgtccgctgtcgcgctgcgcgcacaggccaggacggtcggacgtgtgcgggcggcgtgactgtataggtggctcgctctactcacacaacatccatactatatgattccattctgtcgagtaatgagacggtactcacaccgactcgatatgcgcacacactctcgccacgacgcacaccactaacctagtgtgagttggccagcgcacacgacgctcgtcanacaccgtcgcgtctagacgagaggtgacaacccacacacatagacacgactgctgaaggacgtacatcagcagtagcgngcagcgccaagcgtgtgcgttcgcgtatcgcatggatggcacccacgaggacgatgaggctcggaacgcacagancactcgagcgacgccacgtgcaacgatctcaacagaactgtagacgagcgggaattcgagntacgtatatcaagatccttgtcccacgtctncggctacgtgatgtagagcgagcacaagtgagtgctctgacgtatgatatactgcacaatangatcacacatgcntganactattgacactagtgatgaggagcatctattnggacatgccncagcgtcgactacgctagcgctgtgcctgcctcctcgacnacgtgcgcgcgcgcg

SEQ ID NO: 115 - DNA, 795 bp, Glycine max
  Peptide Sequence Number=SeqID_6890
  Probeset Number=SeqID_9894
agctcgaatcggctcgagttaggatggggtgctatattggaccccatcgcatcggatctacggcgcagtttccagaggagtgtcggttctcttcgcggaacgatggtcccagcggaatgtagtgaccaccttgctccatggttaacagcagcaggcgcttttttttttgatggttgacttcccctacaggtgattctgggcgacggtcggagactctccggcgtgtcgctatacgccggagcagctttgaaggggaaaatgtatcaacttgtttacccagtgaaattagggattctcggagactcactctgcatggagaattctttacacccgaacatggtgaagggtaagatagttatatgcgacagaggaagtagcccgagggcagcaaaggggttagtggtgaagatagcagggggagtgggaatgattctggccaacggaatatccaacggcgaaggactcgtgggagacgctcatcttctcccagctggtgctgttggtgccaacgaaggagacgtaatcaagaaatacatttcctcttcaacaacccccacagcccttcttgtttacaaggtccttttttaggaatcaaaccggccccggtttacgttttttttaagggaggggccaacggtgtaaacccccaaacttttaaccgggttttttggttccggggtaaacattctccccgctgaaccaagttgtcggccaaccggtttgactccgataccagagaaccgagtcaacattttgtgtgcactccattgcttgcctcacgtaagtggcgccggg

SEQ ID NO: 116 - DNA, 614 bp, Glycine max
  misc_feature (1)..(1): n is a, c, g, or t
  misc_feature (566)..(566): n is a, c, g, or t
  Peptide Sequence Number=SeqID_6891
  Probeset Number=SeqID_9895
nagaagaagttttggtgttcttgacacaggttcgggctgatctcaaagacccaaagattcacgggtattggcccatgtgagattcaccccctctacgattagtcgaagtgaccgatgctcatgctaacctgttttgagtgttgtggtatatggccagaagccactacacgcacagtcttctccggaacctgcaggaagcgatggctgagggtctgctgggccatatgtaattgcagttcttttgaagcaactttcgtttcactgggccataacagcatcatattgtcaggatgatatggatgtccactgagatctgatggctagttctcatctttatttgctaggtgtaaaacctctcgactatcttaggaaatgcttgtcgcctagatcttgccaaatccagcggtgttgggaacattcttcgccgtctcagcggaacttgcgctagccacattcttgccctggaagtacgacaaggaagctcgtatcagaaccgctgagagttcctgagctaccatatgcgttcacctggcatgcgtggccaaggtagctagagcatttggcgnttggtgttagagtcgggagaagcgaaccacttgccaccaccgttctcg

SEQ ID NO: 117 - DNA, 1705 bp, Glycine max
  misc_feature (20)..(21): n is a, c, g, or t
  misc_feature (29)..(30): n is a, c, g, or t
  misc_feature (33)..(33): n is a, c, g, or t
  misc_feature (61)..(61): n is a, c, g, or t
  misc_feature (72)..(72): n is a, c, g, or t
  misc_feature (80)..(80): n is a, c, g, or t
  misc_feature (87)..(87): n is a, c, g, or t
  misc_feature (156)..(156): n is a, c, g, or t
  misc_feature (221)..(221): n is a, c, g, or t
  misc_feature (223)..(223): n is a, c, g, or t
  misc_feature (293)..(293): n is a, c, g, or t
  misc_feature (295)..(295): n is a, c, g, or t
  misc_feature (299)..(299): n is a, c, g, or t
  misc_feature (322)..(322): n is a, c, g, or t
  misc_feature (390)..(390): n is a, c, g, or t
  misc_feature (462)..(462): n is a, c, g, or t
  misc_feature (523)..(523): n is a, c, g, or t
  misc_feature (567)..(567): n is a, c, g, or t
  misc_feature (594)..(595): n is a, c, g, or t
  misc_feature (598)..(598): n is a, c, g, or t
  misc_feature (605)..(606): n is a, c, g, or t
  misc_feature (642)..(642): n is a, c, g, or t
  misc_feature (708)..(708): n is a, c, g, or t
  misc_feature (715)..(715): n is a, c, g, or t
  misc_feature (805)..(805): n is a, c, g, or t
  misc_feature (877)..(877): n is a, c, g, or t
  misc_feature (929)..(929): n is a, c, g, or t
  misc_feature (996)..(996): n is a, c, g, or t
  misc_feature (1216)..(1216): n is a, c, g, or t
  misc_feature (1355)..(1355): n is a, c, g, or t
  misc_feature (1391)..(1391): n is a, c, g, or t
  misc_feature (1465)..(1465): n is a, c, g, or t
  misc_feature (1525)..(1525): n is a, c, g, or t
  misc_feature (1527)..(1527): n is a, c, g, or t
  misc_feature (1562)..(1562): n is a, c, g, or t
  misc_feature (1604)..(1604): n is a, c, g, or t
  misc_feature (1640)..(1640): n is a, c, g, or t
  misc_feature (1655)..(1656): n is a, c, g, or t
  Peptide Sequence Number=SeqID_6892
  Probeset Number=SeqID_9896
ggtgcctcgccccccaccannccacccannaanttaaagagtaataaagtaatataaaaanaacaaaaaccnaccaaaanattctgnataagaaaaagcctatattccagagcgcgagctcgggcaccaccgcctactcattccgcctatggtggnttaatacaaacacgcgcgacctgggacagagctgagggagagccaagtgtgacggagcacatctnancacgagaaacactaacatctctatacatattatataccacgagagaccacacaccgaccacctggatttngngggngggcacgggttaggccgggatgntggcgtagcgctgcgccggcgagccctcgtgggcgccgtccctgcccgcgcgtggcgcgagcggctgnaccgcctactcacactaccgagcggcggcggggtcgcgccattcgcgctgctgatctgctccggcgggctgngcgtcgtgctgtgtatctgcgtgtgattggtggtaatctataagtactatgctgtgacctnttctctctactcttttctctcacctccgtagcctcttggcattntagtcatgcggtagtcatgagcatctnncantctcccnncccgctctctgttcctccatacctatcttgtacacntaatgtcacacgcgctgtccagcacgtggctcttcgccggcgctctctcgttctcgtctccgcctntcatacntctccagtcactataaacctcatctgtgagtcccggtctcatccactctcgcctcaagctgtttcttgtctctcatatctgtatacatantctctattaagtgcacactggataataagtgtatgatggtgacacatacacatgaaagaagtgcgggcgttnagatccacacgtgtcagcatctccgtcggacctcaatagactcgctgagagntgtgttctgtgtatgtatgacacgacacttcgctgtatattgtacctgccgcctacctcccagccanccactattgacacacgctaatagatatgagatcgtcctactgtgtcttgtacttctcaccaccgcgcctcgcggtcttgtcttctggtgtccgggggcgctcctctctgttactcactgactgctgtgttatcgctcgcgatgcacaatcgaataatgcacgcagccgctactctacacgtagcaacctacgctgtcaccgctcatccataattacccanctgctggcgtccacactcgcgcagcatggatggaacacacaatatactatgtgtgggtggcgactccctcaccatccacattactactccaccatatcactccagccagtatcgtgctgcccaaaatccatcacccacnccgactcaccagcgcgcgcacccgtataggcggggngcgtgaccaacagctagacccacgcgcgcagtcactatcttccgcacacatgactctgtgcggatctcaataanagcgtctcacgctgccacatcaccgacatcatctctctgtctgtcctcgccactctcgangntactgtgtacgcgcgtctctctctcacactgtccnctcatctctcctcctacagctgccctagtgtccagtgcgatnacgctgtgctcggtgatcacatctgcatgatctttntgttctccggcgacnnatctatcgataatggtagatgtagcgtgtaatcaccagagtgattagtg

SEQ ID NO: 118 - DNA, 417 bp, Glycine max
  Probeset Number=SeqID_9897
ttccaatattctcttcagctcaaatcctctggttatggcgtctccgacttctctaaactcaacccctacagatctcgttcgaagaaagaagagacaatccgcttcctcctccgccgcatcgcctcggagaaacaacgcagcttccgcaaccgccggagacggcgagagccacgcgcgatggagatcggagaagcagcagcgtaactactccgcaaagctggtccaggcgctgcaacaggtccgcctcagctcctccgccgccgaaacaccatctccgacggcgaagaagcgagggaaagccgtccgggaagccgccgaccgcgctctcgccgtctccgctcgcgggaggacgctctggagcagagcgatcctcgctaaccggatcaagctcaaattccggaaacagaaacggccgcg

SEQ ID NO: 119 - DNA, 1515 bp, Glycine max
  Peptide Sequence Number=SeqID_6893
  Probeset Number=SeqID_9898
gatcaaacaaataaaccaacaataacgacaacaaacacaacacacacaacaccaacacctaaaaatgtacaagcaacaagaaaaccaaagctttttggataaggcaaaggaaaaggttgacaaccttttacacggcaagtcagccagcagggatcttaagtctgatgctatgatcgatgaaagattcgaatcctcatccaagttcactaacaaatccaacgccatggttgacgaaagctatgccagcaccagtgctagcaccagcgaatactccaccttgagcaaaatgaacgtgaagaccgtcctcaatgaaatgatcgatgaatcccacgtccaaagacaagtcattcaagaaacaccagttgtccaaacttctgtcatcaaagaagatgctaccatcgtcaaggagatcgttcatgaagttcctgttatccaaaaggaaattcacgaaagagaagttatccacaaggacatcatccacgagagaccaatcattgagagagaaatccatcaagtcccaattcatgttaccgaagtcgttaagcatgatactgaattcagaggacaactccctcaggacattaagatgcaaaccgagtttgttcaagaaaaggccatcatcaatgaggagcacattaaagatcaagctgtcctccgcaaggttgttgagcacgagaagcctctcatccacaaggaaatccacgaaatgcctcttatcaacaaggaaatcatccatgagagacctattgttgaaagagaagttaaggaagtcccagttcttcaaaaggaattcgtcagagacgaaaccctcgtcgtcgacaacagagctgctgaaaaggccgtccaaaaagagttcgttcgcgaacaagctgtcaaggacaccgaatttatccgtgaacaacctgttctccagagcgaattgatccatgacaagcctatgatccagaaggaaatctacgagaagcctgtcatcaccaaggaaatcatccatgaaaagccagttcttgagaagcacctcatcgaaaccaccactcaccaaactgagaacatcagagaaaaaactcttgttgaagagaaggttgttgttgaaaaggctctctttgagaccatcaccaccaacttcaagggcactgcttctgtccgcaacgtctcctggctcgacaacgagagattcaaaattgaaggagaaggaaksttcakaagattctccaacaagttccatggagtcttcgacaagttgaagaaggacaacgtctatgttttgagaagcggagttttcgagagatacaacgagcctcttgagaagctcagtctcctccctgttgagaccatctatattagagaataaatgctctcaaagtaaatgtgcactagtagcaatttgtaagtgaggggaaaagtttaaattcaaagaataattttattaccattaatgtttatgtttatcctaattcataatccctagttgaatgtctaattgcctatcggtttgtacactttaaacaagcctaattc

SEQ ID NO: 120 - DNA, 1608 bp, Glycine max
  misc_feature (1)..(1): n is a, c, g, or t
  misc_feature (78)..(78): n is a, c, g, or t
  misc_feature (81)..(81): n is a, c, g, or t
  misc_feature (114)..(114): n is a, c, g, or t
  misc_feature (156)..(156): n is a, c, g, or t
  misc_feature (165)..(165): n is a, c, g, or t
  misc_feature (463)..(463): n is a, c, g, or t
  misc_feature (760)..(760): n is a, c, g, or t
  misc_feature (782)..(782): n is a, c, g, or t
  misc_feature (784)..(784): n is a, c, g, or t
  misc_feature (787)..(787): n is a, c, g, or t
  misc_feature (814)..(814): n is a, c, g, or t
  misc_feature (858)..(858): n is a, c, g, or t
  misc_feature (935)..(935): n is a, c, g, or t
  misc_feature (990)..(990): n is a, c, g, or t
  misc_feature (1159)..(1159): n is a, c, g, or t
  misc_feature (1306)..(1306): n is a, c, g, or t
  misc_feature (1347)..(1347): n is a, c, g, or t
  misc_feature (1383)..(1383): n is a, c, g, or t
  misc_feature (1386)..(1386): n is a, c, g, or t
  misc_feature (1479)..(1481): n is a, c, g, or t
  misc_feature (1530)..(1530): n is a, c, g, or t
  misc_feature (1555)..(1555): n is a, c, g, or t
  misc_feature (1569)..(1569): n is a, c, g, or t
  Peptide Sequence Number=SeqID_6894
  Probeset Number=SeqID_9899
ngagaggcgcgtgcgagtcctctatcgcctatcgatactgtatgagtgtgtctagcatagcgtgacacgtggtgcgtngtntagtgcgtactcatctgcatggactgtgatcgntgcgcgtctctgcatcacagcactcttcgcgtcagatcgcgntcgcactcnccgtatccatgtacggatcaactactatggtctgtagatcagtttcgttatgtatatagagtactgtctactctctcttacactaagcgcagttagtcgccgtcttatccttctgtattattcctgtgtttcgtgtcctctccgctccacctctactggtcccgtctaccgcgcgcaattatatctctcctggtatatatattctagcacgccgtcgcgcgtcgtgtgtctccacacgtcactcgacctcattcttatgcacgtcatcgctgtactgcgctgccccacattcttacgncgcctctcttgaacttctctatgtgaagtgtatgcgaagagatagtctctctttcctgcggtggtatactactagtagatctatgagcccgtcgaacacacgatacaggcgcggcggtgatatcgcagacagcgtcgcgctccatgcgtgcggcgcagtgatatgttatcgtacgtatgtatctattatgcggtctcctctattcttctagatacatacatttaatgatataattagactactcgtgatatgagtgatcgttgtataaagtatatagcagtataccgttgacggacngcgtctccgctatatcaccgtncntcntctcttcactcgtgtcgcgtcggtgcnctgcggtgctcgcgtcgtaactgctcgctcgccacgccgcgccngcaccctaataatccacagtaagaacggacgcaggcggcgtagtcagaacgctgcgcgccggcgacatatcactacngttacgtacgtgagacatacacacctcctcctctccgagacagcgtggagatganacatgatcggatgagactcgcagcgattctctcctctcatcatcagtagatacgtcgcagctcaattatacgcttggtgcgaaagatagatgcgtggggagtagtcctgccgcgtatcacgccagcgcctctaattagcgtgcttcgctctcctactcctctcatgtgncctcaacgccgtatttcgttcctctctgtcgcttcgagtagtatgtcttatgataatatagaagatagtaataaagcgtgttctatgggtgtgcgtataggatcactcatacatctgactatacctgttctctcgtctccttcctgnctgccgcaccttcactatctacatgctctcgcttctctcancgtcttctctagagtatagcgcaggtagagaggatncgnaggcacaatctcgtcatgcgctgtcgtctggtagtatctctagtctctgtgtatccttgtgttgtgttgattgtgtgtgtctttcttttttannntttattttaatatatatgatggagcacagcatacgtcagatcgccgcgnatgaaaccacagaggaaccgagaanacgagagagcgaanccacagcccgcaaccacacgcagcacacgcccgcccgca

SEQ ID NO: 121 - DNA, 1945 bp, Glycine max
  misc_feature (6)..(6): n is a, c, g, or t
  misc_feature (35)..(35): n is a, c, g, or t
  misc_feature (50)..(50): n is a, c, g, or t
  misc_feature (100)..(100): n is a, c, g, or t
  misc_feature (112)..(112): n is a, c, g, or t
  misc_feature (115)..(115): n is a, c, g, or t
  misc_feature (131)..(131): n is a, c, g, or t
  misc_feature (186)..(186): n is a, c, g, or t
  misc_feature (221)..(221): n is a, c, g, or t
  misc_feature (287)..(287): n is a, c, g, or t
  misc_feature (331)..(331): n is a, c, g, or t
  misc_feature (359)..(359): n is a, c, g, or t
  misc_feature (435)..(435): n is a, c, g, or t
  misc_feature (445)..(445): n is a, c, g, or t
  misc_feature (541)..(541): n is a, c, g, or t
  misc_feature (547)..(547): n is a, c, g, or t
  misc_feature (691)..(691): n is a, c, g, or t
  misc_feature (701)..(701): n is a, c, g, or t
  misc_feature (776)..(776): n is a, c, g, or t
  misc_feature (783)..(783): n is a, c, g, or t
  misc_feature (797)..(798): n is a, c, g, or t
  misc_feature (802)..(802): n is a, c, g, or t
  misc_feature (858)..(858): n is a, c, g, or t
  misc_feature (907)..(907): n is a, c, g, or t
  misc_feature (959)..(959): n is a, c, g, or t
  misc_feature (995)..(996): n is a, c, g, or t
  misc_feature (999)..(999): n is a, c, g, or t
  misc_feature (1007)..(1007): n is a, c, g, or t
  misc_feature (1013)..(1013): n is a, c, g, or t
  misc_feature (1057)..(1057): n is a, c, g, or t
  misc_feature (1060)..(1060): n is a, c, g, or t
  misc_feature (1064)..(1064): n is a, c, g, or t
  misc_feature (1078)..(1078): n is a, c, g, or t
  misc_feature (1106)..(1106): n is a, c, g, or t
  misc_feature (1150)..(1150): n is a, c, g, or t
  misc_feature (1152)..(1153): n is a, c, g, or t
  misc_feature (1155)..(1155): n is a, c, g, or t
  misc_feature (1157)..(1157): n is a, c, g, or t
  misc_feature (1161)..(1161): n is a, c, g, or t
  misc_feature (1164)..(1164): n is a, c, g, or t
  misc_feature (1168)..(1168): n is a, c, g, or t
  misc_feature (1172)..(1172): n is a, c, g, or t
  misc_feature (1182)..(1182): n is a, c, g, or t
  misc_feature (1214)..(1214): n is a, c, g, or t
  misc_feature (1230)..(1230): n is a, c, g, or t
  misc_feature (1232)..(1232): n is a, c, g, or t
  misc_feature (1237)..(1237): n is a, c, g, or t
  misc_feature (1334)..(1334): n is a, c, g, or t
  misc_feature (1338)..(1338): n is a, c, g, or t
  misc_feature (1342)..(1342): n is a, c, g, or t
  misc_feature (1347)..(1347): n is a, c, g, or t
  misc_feature (1358)..(1358): n is a, c, g, or t
  misc_feature (1360)..(1360): n is a, c, g, or t
  misc_feature (1362)..(1362): n is a, c, g, or t
  misc_feature (1374)..(1374): n is a, c, g, or t
  misc_feature (1382)..(1383): n is a, c, g, or t
  misc_feature (1395)..(1395): n is a, c, g, or t
  misc_feature (1401)..(1401): n is a, c, g, or t
  misc_feature (1410)..(1410): n is a, c, g, or t
  misc_feature (1442)..(1442): n is a, c, g, or t
  misc_feature (1500)..(1500): n is a, c, g, or t
  misc_feature (1555)..(1555): n is a, c, g, or t
  misc_feature (1598)..(1598): n is a, c, g, or t
  misc_feature (1610)..(1610): n is a, c, g, or t
  misc_feature (1679)..(1679): n is a, c, g, or t
  misc_feature (1685)..(1685): n is a, c, g, or t
  misc_feature (1687)..(1687): n is a, c, g, or t
  misc_feature (1691)..(1691): n is a, c, g, or t
  misc_feature (1702)..(1702): n is a, c, g, or t
  misc_feature (1716)..(1716): n is a, c, g, or t
  misc_feature (1718)..(1718): n is a, c, g, or t
  misc_feature (1750)..(1750): n is a, c, g, or t
  misc_feature (1761)..(1761): n is a, c, g, or t
  misc_feature (1800)..(1802): n is a, c, g, or t
  misc_feature (1811)..(1811): n is a, c, g, or t
  misc_feature (1833)..(1833): n is a, c, g, or t
  misc_feature (1839)..(1839): n is a, c, g, or t
  misc_feature (1851)..(1851): n is a, c, g, or t
  misc_feature (1869)..(1869): n is a, c, g, or t
  misc_feature (1901)..(1901): n is a, c, g, or t
  misc_feature (1911)..(1911): n is a, c, g, or t
  misc_feature (1920)..(1920): n is a, c, g, or t
  misc_feature (1933)..(1933): n is a, c, g, or t
  Peptide Sequence Number=SeqID_6185
  Probeset Number=SeqID_9900
ctacangccgaccacacacaagccgacgagcaganagtcaagacaagcantacgtatctgacgacactacagtcgataattacagtgcaagagtcgctanaacgctcgacancgncatcataacacactcnaccgtgcgagtgcacacgcaccctcgctcgcactaccagggatgctagatatgantaatagatcactcatggctcagctcagtatactcntacacactctctctagtattaatagattgagagctgtatgcgggtctccatcttcgtacggtacancatacatacatcactccatcattctctgctcacacgatccacgntctacaaatgtgatcagtgcacacgcgntcgcaggctgcatgcagacgtgcacagtgaacacagagaccgcacagatcacagcaagtagacatgtacaacatgncataactcanctcacacaccgtcctgcgagactggtgtgatcggctacacatcatgaagtactccatcagacacaaacacagtcacaacgcaagacagccacaaangcactncgctaatctcatgcgtgatcggcaagacagcagaccacgatcccacacacacactccacaccacaccccagcacctacacacgagagaggctagagtgcatgttgtctcgtgacatggcgcacatcatcacacgcacacgcagntgtgcgtggngtgggcagaggatcattcacaatgacagacgcgcccgtcatgcacttctaatagctcacggactctgagataacntctcatntcactccgtgtgtnntttnttcatcgatcaacactaatacctcaatcacacactgcccacacatagataagtgtngtttggttgttaatcgtaataaagatacatcgactatgctgtcctggcngagcaccgcctggtcattctctcaccaccattcatcacctagtagatatatnacatctactatacatgaaataatgtatatgcttatnnttnctatatanaactanatcttcgttctctcgttatgtccttttctacttgggtggtggtnggnggtntggtgtgagatatnggatagactcaccattgacacgacagcncactcagactaccgttcacattccactcacgtatgattaagtantnntntntccntcntcancctnatactacatntctgtccatatgcttatgttattcgtggtttnatcttgtcatgtcgtnanttcgncgtgagtctatcattatcatatatcaataagatttccacagtcttacgatatctccataagtcatttctcctatctcgcatatcatcatattagtanagtnaatncactncacatcactcngnantactccgcaccngcgcgtgnnaggatagaagangacganagcacgcancaaactagcaacaccagcaccagacacaatcnaattcacacacagtgtcgtgtctgtgcacatacgacgcgcacgacatcataggtgtgntgagtcgactaccactatacatctactgcgttattctctgtgtgttgtttgtgtntcgcatgcctaccaatcgcgcgagccgcatctctctcgctctntgcttctctacnccgctcgcacacagagcgatcgacgcgcaatcgtagctgcgctacgcaactcgcacacagcacacatcncccccngngtgngctgcgctgcnccgtgcgcacagtntntctccatctcagccgcgtagagagcgagtgtnctcgcggctcnctataccaccacgaagttacacatgcttcatctattacnnncatactcanaactcgtccttcaggttgtggntgtgtntgtgtgtggggnggggtgccgcgcatctantaccagactataatgaagatataccacacagnggagtgtgtngttgagacncttcacacacccnccataccacctc

SEQ ID NO: 122 - DNA, 1463 bp, Glycine max
  misc_feature (1287)..(1463): n is a, c, g, or t
  Probeset Number=SeqID_9901
cccacgcgtccgcccacgcgtccgattttgtttcggtcaaaaaaggagaaaggaaaggtttcatagattaatatatgttatgggcaccatcgcctctccagcttcttcttcttctccgttttctgatgctttttctcaaaggtgtgtatgaggctgttttgttgaattgcttgtgggatggcaacagcaatacaagtcatgaaggagatgagctaaaataatgggtgattcttctcttctcacttgtttgtcaatggagggccccatcttgaagattaaagaataatgggttgttacagagttcagcttgtggcaataatctcgttcatgcttttgctttcaaatacccacggttggggagatgatgggcatgccattgtttgtaagatagctcaggctcgcctcagcactgcagctgcaaaggctgtgaagaaattgttgcccaaatctgccaataatgacttggcgagcaagtgctcttgggcagatagtctgagggttgtcttcccttggtcttctgctttgcactttgctaatactcctgactccgtttgcaattacaaggacacaagggattgtgtagataaaaaaactggaattaagggacgatgcgttgtggcagcaattaccaattacaccaaccagctcctcgagtatggcagtgacactaaatccaaatataatctcactcaatcacttctattcctttcacattttttgggagacgtccatcagcccctacattgtggctttttctcctgaaagggtacctatgaaatcaatgttcccaaggggagcgccagagcaagttcagcgctgacatgggatgcaagcattcttgcaggatgcaacgaaagctttaaagaggactatcaaaccctcaatgcgtgcttggcgttgaggttgtttccacacccaatctgatgaccctggatgaggatgatcgaaaaaggtggatagaactcactggccgagacttgaattttacaattccaactgaagcaagtgatttcagttcatggagaaatcttcccaacacggactttgttcttgagaggccacctcccccaatcaagaatggtcctaatgcacacccggaagaacctgcttaatggaatcggactttacggatctggtcttaacgatctggccttaatggatctggacttccctatctaacccagtaatgggatgggtgggcctctctcctgtcgccgccaaaagagaaaggacttttcccccatgggatgaaaaaaatgttacctggtggtattcccccaccgatcnnnnnnnnnnnnnnnnnnnnnnnnnnnnnnnnnnnnnnnnnnnnnnnnnnnnnnnnnnnnnnnnnnnnnnnnnnnnnnnnnnnnnnnnnnnnnnnnnnnnnnnnnnnnnnnnnnnnnnnnnnnnnnnnnnnnnnnnnnnnnnnnnnnnnnnnnnnnnnnnnnnnnnnnnnnnnnnnn

SEQ ID NO: 123 - DNA, 722 bp, Glycine max
  Peptide Sequence Number=SeqID_6186
  Probeset Number=SeqID_9902
tccccttgaacccctttggccgttttgtcattggaggtcctcccggtgatgctggtctccccggccccaagatcatcatcgatactttcggaggatggggggctcatggtggtggggccttctccgggaaggatccccccaaggttgataggagtggtgcttcccttgtgagacaggctgcttaaagcattgtggcaagtgggctagccaaaaggggccttgggcaagtgttttatgcccttgggggggccgagcctttgtctgtttttgttgccccctatggccccgggaagatccctgataaggagattttcccccttgtgaaggagaactttgatttcaggcccggtatgatttccctcccccttgatttcaaaaggggtgggaataacaggtttttgaagactgctgcatatggccccttcggcagagagggccctgccttcccatgggaagtggtccagcccccccagtgggggaaggcctaaggcccttctttcccctgcaatgtggtgggggttttttagcgttgcccttataatggggggtttccataactttccccgtcccctggtctgggtttttctctcgtcgtcccccacaaaaattgtttttcccccccttcctttgtaattttttccatggtcaactaaaaaaggtcctttttgttttccgccccttgtgtcttttaatttcagtatcaaaaagaaagttcccagttt

SEQ ID NO: 124 - DNA, 1400 bp, Glycine max
  misc_feature (54)..(54): n is a, c, g, or t
  misc_feature (67)..(67): n is a, c, g, or t
  misc_feature (313)..(313): n is a, c, g, or t
  misc_feature (370)..(370): n is a, c, g, or t
  misc_feature (466)..(466): n is a, c, g, or t
  misc_feature (657)..(658): n is a, c, g, or t
  misc_feature (660)..(660): n is a, c, g, or t
  misc_feature (808)..(808): n is a, c, g, or t
  misc_feature (825)..(825): n is a, c, g, or t
  misc_feature (844)..(844): n is a, c, g, or t
  misc_feature (885)..(885): n is a, c, g, or t
  misc_feature (1148)..(1148): n is a, c, g, or t
  misc_feature (1192)..(1192): n is a, c, g, or t
  misc_feature (1194)..(1194): n is a, c, g, or t
  misc_feature (1285)..(1285): n is a, c, g, or t
  misc_feature (1293)..(1293): n is a, c, g, or t
  misc_feature (1299)..(1299): n is a, c, g, or t
  misc_feature (1313)..(1314): n is a, c, g, or t
  misc_feature (1320)..(1320): n is a, c, g, or t
  misc_feature (1323)..(1324): n is a, c, g, or t
  misc_feature (1340)..(1340): n is a, c, g, or t
  misc_feature (1356)..(1356): n is a, c, g, or t
  misc_feature (1359)..(1365): n is a, c, g, or t
  misc_feature (1370)..(1373): n is a, c, g, or t
  misc_feature (1379)..(1379): n is a, c, g, or t
  misc_feature (1381)..(1382): n is a, c, g, or t
  Peptide Sequence Number=SeqID_6187
  Probeset Number=SeqID_9903
tagacagacaacaagaacacaatacatatgaatgtcaaacatatacatcatctnggttttggatagngtatgaggttagggtagagagaagggtgagaggagagataatcaagatagacatcacaggatgcatagcgtgtgagatgtgtcgtggagcgtgtatcgagtcagtgctcaacgaagcagagtacggcagactgaacgtgtgacattatgatgtgtcgtttgtggtgaatgtgtttgttgagtatatatagacaaatgatgtccacactgacgttgacatgctatgtgctccactaactgtctaagnttatgttaatagtcagagcaaaataatatgcatgtatacacagaagatgcacagggnatcaggcttggataacgcaatgagtcgtgacatggtattggtaaagtgatgtgtagtaggcgagggacagtgcgcaggaggagaacagtcaatagntaaatcgatgtaatggactgtgctgaggagtgttctatatcatgtggtgtgatatatacatgaaatgttatatgtcagtgcatattcaacatacacacatacggtgagtgagggcaatatatacaactcatacaaatactaacaatgaacaaggcattacgtggagttgttgggttggttgtgtttttttnntntttggcggggtgtcttactcctaaacataacatataaattctagatttatatagtcgtccgtatgagagaattagtaatgctaatctcagtaaattaaataattggtatggctgttagagctaaggcagtgtgagagtggtctatganttcagttatgatcccgncaccaccaattattttttntatacatcccacaatatgagctacatataactattagatgnatattataatggttctaacacttttaaaatgagatatagtattttcttactttccttcaatagaacaagtgaagtagggggcacataggaagaaatggcatcatctaccattaatagagatacagtggttattcgcgcgtgggggagaaagtagtattatctacatcataataaattaattagtgatttttccttgtttctcgtaagttggtaataatctgatagttattatatattttatgtatgttatttttgtcgttggntttaattgttatttagttctttctgagaagtgtgtacatatatntntaatctatagttggtaggagggaggctaaaaataaagatagttaggtgtcgtatttttttatagcttggccacaataaataataaggttangtgatatncatacncactgttttcgggnnttgttnaanntttttttcttttttgntaaatgtatgcgtggntgnnnnnnncatgnnnnaagcancnngggaggcaagccccccaa

SEQ ID NO: 125 - DNA, 1612 bp, Glycine max
  misc_feature (90)..(91): n is a, c, g, or t
  misc_feature (93)..(97): n is a, c, g, or t
  misc_feature (99)..(101): n is a, c, g, or t
  misc_feature (145)..(145): n is a, c, g, or t
  misc_feature (147)..(147): n is a, c, g, or t
  misc_feature (149)..(149): n is a, c, g, or t
  misc_feature (153)..(153): n is a, c, g, or t
  misc_feature (156)..(157): n is a, c, g, or t
  misc_feature (163)..(163): n is a, c, g, or t
  misc_feature (190)..(190): n is a, c, g, or t
  misc_feature (193)..(193): n is a, c, g, or t
  misc_feature (310)..(310): n is a, c, g, or t
  misc_feature (370)..(370): n is a, c, g, or t
  misc_feature (910)..(910): n is a, c, g, or t
  misc_feature (956)..(956): n is a, c, g, or t
  misc_feature (1055)..(1055): n is a, c, g, or t
  misc_feature (1170)..(1170): n is a, c, g, or t
  misc_feature (1221)..(1221): n is a, c, g, or t
  misc_feature (1273)..(1273): n is a, c, g, or t
  misc_feature (1283)..(1283): n is a, c, g, or t
  misc_feature (1339)..(1339): n is a, c, g, or t
  misc_feature (1377)..(1377): n is a, c, g, or t
  misc_feature (1381)..(1381): n is a, c, g, or t
  misc_feature (1386)..(1386): n is a, c, g, or t
  misc_feature (1396)..(1396): n is a, c, g, or t
  misc_feature (1450)..(1450): n is a, c, g, or t
  misc_feature (1453)..(1453): n is a, c, g, or t
  misc_feature (1455)..(1455): n is a, c, g, or t
  misc_feature (1518)..(1518): n is a, c, g, or t
  misc_feature (1607)..(1607): n is a, c, g, or t
  misc_feature (1612)..(1612): n is a, c, g, or t
  Probeset Number=SeqID_9904
ctcttcgcaatctctcattctactctgtgtcgcgccggagagaccacacgcgccacacgccaccacagcgccatacattatatccacacnnannnnnannnggctcagcatgaggtccccctagaactgcgtctcctatttaacncntnctgnagnntaaatncatcacctattaaatagcgccctcacnccncacgccctcacatcgcagcggctgatgagcctagcgcgtagatagtagacgatacgactgcgtctagtagataaattgcacgtagtcactaagtagtcgatacggcgcatcaatagntagtatatataggtttggctctgtctgtactgctggcacgtcataatatagagcggtctnctattgatagggaaccaggctgtgcatgcttgacagtgtgctccgcctgctatgtatgtattgcgtggttacgccacctctgtctttgctgttattttactgcgagctcgtcgccccgctactcatatctatccgtgtattagtccgcgccacgacgccgcacacacgctcgcgcaatagtgtgtgctatattcacctccattggactgtcatacgcccacggcgtccgtgagttctgcgccccgcatacgccgtcaatcggcgctactatacattaatattatacgcactgccaccgcacccgtcacgccctcgcacgccgcgtcagtatgggtatcgggactagtcggatacagccggcacgtgcgcatatatctattatcagctcgtcgagacgatctacttagacaccacggctgatgtgctctcgacattctacgtctctcgtataatgtatattgtgtatgacatacgatgcgagtatatcgcgccgagtataagttaggatgtaggagagcgcggtcgctgtgactatcgctncttatatcatagtccacacccacacccacacactcatattattatnactctctctcgcggtagactcctgcgctgtgtgagtgcgctattctataataactcgcaacgcctagcatctctctgcgcgtcgcacactctcgctcantgcgcacgcccacgatatatactgtgtatctagatactgcgctccaccgttcactgcccacgcgcgcgcgagtatgtagtaatgtgcgcacgcctatctatgcgtgctagtgacntagcacgtctcgctctctgacatcgtctactaagttatatgtatatatganatagtagtggcacaatagctcgcgtacagatcgtcatacgctgtgctgtctncagcagcgtncgacgcaccacacatctctctatgaacgttagagtcgtgcacatcagtgatactgnacttagcgcgctgacttctcgcgacacgcactatatcntttncctcnttactttatngcgcctctgtcggcgcgctgacgcgaagatgacgatcgtatatcataaacgtcnctntnctctcactcgccgcccgcgtcgctgcgttgcctgcgcgatactctcctccacagatagaaaangcatgcgctacatgtctgttctacgaacgtagcgatccgtcgatatcgcgatgcatatacatcgtacacgcgccaaacgcacgccgctntcatn

SEQ ID NO: 126 - DNA, 469 bp, Glycine max
  Peptide Sequence Number=SeqID_6188
  Probeset Number=SeqID_9905
aggcaaggctggtctgatccctcaggagacagcactcccatggttcagaaccggtgtgttcccacctgcaggaaccctacactactgggcagactcctacacactggtcgtgtttgagatggcacttgatgggattgcaaagcacagaaaaattccagacttgggccaacccaggtttatgggcaaaacattattccctagaactaaagaagggtcttggaggttctggggagcccagtttccccaggaggaacctttctttaaccccatttggtttttgaaagggataaaaacccccttaaagattttaaccctcacggaagggaaaaaatggaaggtgggctttttttggaaaactgtggttcattcttttccaaaccctttttccacgggggtttggcctacccaaaaactcctcaaaaatattttgtggaaccccccgggaaacaaacattttttgtccaaattc

SEQ ID NO: 127 - DNA, 1957 bp, Glycine max
  misc_feature (1)..(1): n is a, c, g, or t
  misc_feature (26)..(26): n is a, c, g, or t
  misc_feature (187)..(187): n is a, c, g, or t
  misc_feature (308)..(308): n is a, c, g, or t
  misc_feature (315)..(315): n is a, c, g, or t
  misc_feature (354)..(354): n is a, c, g, or t
  misc_feature (359)..(359): n is a, c, g, or t
  misc_feature (390)..(390): n is a, c, g, or t
  misc_feature (397)..(397): n is a, c, g, or t
  misc_feature (413)..(413): n is a, c, g, or t
  misc_feature (486)..(486): n is a, c, g, or t
  misc_feature (668)..(668): n is a, c, g, or t
  misc_feature (696)..(696): n is a, c, g, or t
  misc_feature (755)..(755): n is a, c, g, or t
  misc_feature (778)..(778): n is a, c, g, or t
  misc_feature (794)..(794): n is a, c, g, or t
  misc_feature (796)..(796): n is a, c, g, or t
  misc_feature (829)..(829): n is a, c, g, or t
  misc_feature (838)..(838): n is a, c, g, or t
  misc_feature (853)..(853): n is a, c, g, or t
  misc_feature (919)..(919): n is a, c, g, or t
  misc_feature (1029)..(1029): n is a, c, g, or t
  misc_feature (1149)..(1149): n is a, c, g, or t
  misc_feature (1151)..(1151): n is a, c, g, or t
  misc_feature (1187)..(1187): n is a, c, g, or t
  misc_feature (1199)..(1199): n is a, c, g, or t
  misc_feature (1207)..(1207): n is a, c, g, or t
  misc_feature (1216)..(1216): n is a, c, g, or t
  misc_feature (1218)..(1218): n is a, c, g, or t
  misc_feature (1220)..(1220): n is a, c, g, or t
  misc_feature (1222)..(1222): n is a, c, g, or t
  misc_feature (1230)..(1230): n is a, c, g, or t
  misc_feature (1235)..(1236): n is a, c, g, or t
  misc_feature (1290)..(1290): n is a, c, g, or t
  misc_feature (1416)..(1416): n is a, c, g, or t
  misc_feature (1737)..(1737): n is a, c, g, or t
  misc_feature (1739)..(1740): n is a, c, g, or t
  misc_feature (1763)..(1763): n is a, c, g, or t
  misc_feature (1774)..(1776): n is a, c, g, or t
  misc_feature (1824)..(1824): n is a, c, g, or t
  misc_feature (1829)..(1829): n is a, c, g, or t
  misc_feature (1842)..(1842): n is a, c, g, or t
  misc_feature (1869)..(1870): n is a, c, g, or t
  misc_feature (1874)..(1874): n is a, c, g, or t
  misc_feature (1888)..(1891): n is a, c, g, or t
  misc_feature (1901)..(1902): n is a, c, g, or t
  misc_feature (1904)..(1904): n is a, c, g, or t
  misc_feature (1907)..(1907): n is a, c, g, or t
  misc_feature (1919)..(1919): n is a, c, g, or t
  misc_feature (1921)..(1921): n is a, c, g, or t
  misc_feature (1936)..(1936): n is a, c, g, or t
  Peptide Sequence Number=SeqID_6189
  Probeset Number=SeqID_9906
ngagagagtatgcgatggtagtatantataggatagtgagcgattgaatgaggagaagtaatagggacagacagagcagtgagtagacgagacagtaacgttatgaccagagaatgatggacgatatacatcagcgtgggtatgagagacgcgagacgtagagcagtgtgcgatatgagatgagtgncggcgcaatatattggagtcgtagcctagcgtgcgtgagtagctttagcatgacgcaatgctctgacagtcggtagtgtagtgtggagtagtgagtcgtctgtgacgtaaatgtatatctnatctctngttagtagttgtagagttgttctatgtcatctatatagncgcgntcctggtgtagtcgtcgctgtgagtccttgntgaatcntggtggcgcatgattntgtagagcggtgtacgtgacgagtatgttaagagtgagcgagagagtgtgagagcgagatgctgcgagatgtnccgcacagaggtgtgaggatgggacacgcgagagtggatcagggcagttgatgtatagatagtctgcgtatgatgtatgcggtgtataggcgagtatgagtatagagacgagtgacagtgagtagatggtgatcgcggcgtagaggcgcaggatgtatatcctgagagagaggagagtatancagcagtggagagtagctggtgagggcnatgtgtgagtaagatagagtgacgtgtggtagagtagagagagagaggtgcagtcgtgngggaagcgaaggtagtgcgagcngcgaggagagtgcatnantagtcgtgttgagtgtggggggtgggggagtcngtgagtacncgcacaacgagcagncagacgcagagcagcgagatcgaacaagcgggagacgtcgcggtagtgatactcgagtgcagtgcngcagcagtgagtgtgtgtattatacatatatactatattactaatatgtgagcgctcgtcgtgctcatcaatatatataaagatatatgtcatgtagatgagatcgtatntgtcgcttcgcagacaccattgcaagtcgctcgtcgcgtgcgtatcagagagactttactgttgtacgccctcattatctatgtgtgtagtaaatgaagatatatagtaggtataggtgnanatataatagagagcgtagatgagaggtagaagaggngggtgtggtgcntcggaccngctccgtcncntncncatccganccctnnccgaggtacgtgcgtcagtgtagtgaaccacgtacataggcgagcagcgcgcgnacttgcgcgaggattgcgaggcgtctatctgctctgtatactgagtgaatatatatatagaggcgagagtgacgtagaaatatgtggtgtatttgtatctgtgtgtatctagtgcgccgatagganagagagtgcgagatggagaagaggaaataaataagtggtataataaagagtatgggtttgattgatgatgtggtagtagtgtatttctctatggcgcgtgcgagtcatgagctgtctgcgtccctcaagtgaggcgtgagtgtgagtggtggtcggagcgagagtgggtgtgtatatagtagaagagtgaaagcgtcatgactataaactatagtttggtagagaggatgatggatgagtagagagagagagtgagcacaaggagttgcggactagggtgcgagaaggatgagccactcactctcttgtccccttctgctntnnttttttttctcctatctagtttnttctatggttnnngtgtggtgtgttcctcttcttgtactcctctctagttcacttatatcncttgntgcttgcgatgtntgtgatcggtacacgtcacacggggtnntgtnacaaaagacacatnnnntccgtattcnncnccnggagggaagagngnaggaggagagaaggngagagagaggcggacccccaa

SEQ ID NO: 128 - DNA, 425 bp, Glycine max
  Probeset Number=SeqID_9907
acaaaccctagggagattctcctctctgcatcgtcctctccttccgccgagagtttttgagccaaaccctaattagcttgcgactagtatcacttgcagaaggaggagacaagatgagattggtcaagtgttggttttgctcttctacgatatatcctggacatggtattcagtttgtccgcaacgatgcaaagatttttcggttctgtaggtctaaatgccacaagaacttcaagatgaagaggaaccctcgtaaggtcaagtggactaaagcctacagagctgcacacggaaaggacatgactcaggataaaacttccgagtttgagaagaagagaaacagacccgagaggtatgataggaacgttacggaggatactctcaaggccattaagaagattgataagatcagaagcactagagaa

SEQ ID NO: 129 - DNA, 591 bp, Glycine max
  misc_feature (77)..(77): n is a, c, g, or t
  misc_feature (563)..(563): n is a, c, g, or t
  misc_feature (584)..(584): n is a, c, g, or t
  Peptide Sequence Number=SeqID_6190
  Probeset Number=SeqID_9908
tcagctacgtaggcccccccccccgtttaaaacgtacaatcgatcgatacgtgtacatttctcttatttttctgctnacttgaattataaaagggtattgattctcttgtgaaacctcaatttgagctatcgacttgaacaagttagaagacatcaagaaaaattcaaaatgaaaacttcaatttccgtatttttggtggcagcagtattggtgttggtgatcaaccaatgtatggccagtcatggcaaggggcatgatcataaaaattggaaagataacgttaaagtggaaatagaaaagttggatccgaaccacttgagaagtgaattgttggagcatttgaaagaattttccgatccggctaaattctatcccaaggcactagatgaaattgatacaatgctttctatatataaagaacgtgatcctcaagatttgagtacgaaagagttgattacgaaaacagaaaagcttgaaactgagttaaaaaaggcttgcggctcagaagtaaaaatttcaactctgacacgagcttgggctacggtttcaataaataactggnaaatacatctttggacgattntaataca

SEQ ID NO: 130 - DNA, 1587 bp, Glycine max
  misc_feature (34)..(36): n is a, c, g, or t
  misc_feature (46)..(46): n is a, c, g, or t
  misc_feature (49)..(51): n is a, c, g, or t
  misc_feature (53)..(53): n is a, c, g, or t
  misc_feature (61)..(61): n is a, c, g, or t
  misc_feature (64)..(66): n is a, c, g, or t
  misc_feature (113)..(115): n is a, c, g, or t
  misc_feature (120)..(121): n is a, c, g, or t
  misc_feature (133)..(133): n is a, c, g, or t
  misc_feature (204)..(204): n is a, c, g, or t
  misc_feature (209)..(209): n is a, c, g, or t
  misc_feature (235)..(235): n is a, c, g, or t
  misc_feature (297)..(297): n is a, c, g, or t
  misc_feature (335)..(335): n is a, c, g, or t
  misc_feature (366)..(366): n is a, c, g, or t
  misc_feature (377)..(377): n is a, c, g, or t
  misc_feature (387)..(387): n is a, c, g, or t
  misc_feature (462)..(462): n is a, c, g, or t
  misc_feature (464)..(464): n is a, c, g, or t
  misc_feature (468)..(468): n is a, c, g, or t
  misc_feature (521)..(521): n is a, c, g, or t
  misc_feature (564)..(564): n is a, c, g, or t
  misc_feature (595)..(595): n is a, c, g, or t
  misc_feature (602)..(603): n is a, c, g, or t
  misc_feature (605)..(608): n is a, c, g, or t
  misc_feature (610)..(610): n is a, c, g, or t
  misc_feature (614)..(614): n is a, c, g, or t
  misc_feature (617)..(617): n is a, c, g, or t
  misc_feature (619)..(619): n is a, c, g, or t
  misc_feature (711)..(711): n is a, c, g, or t
  misc_feature (844)..(844): n is a, c, g, or t
  misc_feature (948)..(948): n is a, c, g, or t
  misc_feature (952)..(952): n is a, c, g, or t
  misc_feature (963)..(963): n is a, c, g, or t
  misc_feature (968)..(968): n is a, c, g, or t
  misc_feature (972)..(972): n is a, c, g, or t
  misc_feature (985)..(985): n is a, c, g, or t
  misc_feature (1191)..(1191): n is a, c, g, or t
  misc_feature (1257)..(1257): n is a, c, g, or t
  misc_feature (1291)..(1291): n is a, c, g, or t
  misc_feature (1333)..(1333): n is a, c, g, or t
  misc_feature (1423)..(1423): n is a, c, g, or t
  misc_feature (1503)..(1503): n is a, c, g, or t
  misc_feature (1574)..(1574): n is a, c, g, or t
  misc_feature (1587)..(1587): n is a, c, g, or t
  Probeset Number=SeqID_9909
tgggggggttgttgtttgggtgcgcccccccccnnngggggggtgngcnnnanggggacanaannnattcattctctctcctctgctaccaagacgaaaagacaccgaaaaannnaccanngggtggaagttnacccacacccatccgagagttcatagcataatcgataaggcgctccccctctccacccacacaacgagaangatcnacgtgtgaggtgtgggtgtgggagtntgggtgtggcaacgacacattcgagaggacgacccccctatccctatcatataccaaacacnccaccacaccaccatcgctgtcatatcaaatcaacaanagaaaacaacaacacatatgtggcctcaacnctggcgcgtanacggagtatnctcatcctacactatcccgactcctccagcagatagaaatatgtcacagcagagcactacgagcgtataacatcntnacgngcacactctcctataatgctgctccctttaacaccttatgacatcagattctncaactacggtacggcgcttctcgctccacttgagcgagcgggnagataaatcaaacactatatgtatatgttantgagtgnntnnnnanattntantnccctcttcactatggtctctcctctctatctcctactctattgtgttgtcttagactatgtgtctatcatattatggtataagtatgaagtngatatgaacgtaaaagaaatataactctttatactataaaggacaacacgccctacgctgcatatatgagacattccacttagatgattatacataagataatgatgataactgtttaacaggcgcatgtatntgtgtatgtcggtcctcgacatgcataatgtgggaaaaacacacccacacaccacactgcttacctatatataagatatatctaaatattcaatatattgaatnatanatgccataganaacanatanagttacttgaaanacataagaagcaaagaagaggagtagtaggagatgcatggtacgcttctattcagcgttacgtgtgctgatcatatctataagcgtctgccatagactattctcacgactatatacatgtgtcgatacatcacaatactataataccattaaacatgcacaatatacgtctccacctgcctcgatctccgtactgtatattatatntattgagtaatactctatcacttagtaatagtacagcgacttatacctcgatcctcctatcgtganatatcgacactaggctatggcatatcaatccaancgcagcgcacgtgattaatagcgatctgactatgtaagactnatgtctatgatgcacgatgcagacattcccagttatacagatacgtcgtgcacgtgatgactctagcactgactgcatcatcatcagatntgatggctcgtgatagtcactatgcgcatcacttgagacagtgcgcatgtctctaataccacattcatacagcgtgactnacacgcacgactcactatgagtaccgtaaacagctatcacaatgatctcgcgtgaaaagacactcctatcntactacgtactan

SEQ ID NO: 131 - DNA, 1198 bp, Glycine max
  Peptide Sequence Number=SeqID_6191
  Probeset Number=SeqID_9910
cacgagaccattacctagaacatcctaatcgaaaaaatttcctttagcgtctctttaaaagttgtaatctttaggggcctttgtgaagagaaagagagagatctcagatcatcaaaagtgcgtttggtaaagggatggcaggtcgctacgatcggaaccccttcgacgaaggagacgaagtcaatccttttgcgaatcccggaagtgtacccgctgcttcgagttccagactatcgcctttgcctccggaacctgctggttttggttttggtcgcactgttgacgttcctcttgacagaccagggtctggtgcccaggatctgaagaagaaagagaaggagctccaagccaaagaagctgagcttaaacgacgggagcaggatctcaaacggaaagaggatgctgctgcacgagctggaattgttatcgaggtgaaaaactggccgcccttgttccctcttatccaccatgacattgcaaatgaaattcccattcgtctccaaaggctacagtatattgctttctcaacatacttggggttggttcttgcacttttctggaacgtcatcgccgttactacagcttggatcaaaggagaaggagtaacgatttggcttcttgctcttatttacttcatctcgggtgtcccaggaggctatgtgttatggtatcgtcctctctaccgtgccttcagaaatgatagcgcattgagctttggatggtttttcttgttctacatgctccacatagctttctgcgtctttgctgcagttgctcctcctgttgtcttcaaaggaaagtcacttgcgggcatattacctgcgctagatatgttgagcagtcaggcactggtcggaatcttctacttcatcgggtttgcgtttttctgccttgaatcagtggtcagcatctgggttattcagcaagtatacatgtacttccgagggagcgggaaagcagatgagatgaaaagggatgctgcaagaggagccatgagagctgcggtttgatacaaatgatttgaactcatgatcgctcctgaagctattggttgtgatgtgtaactttttacattcttcagctctttgacctttttgttttgttttgtttttacagcagcaaagtaaaaaaaaaaatttgtgtatttgtttttattcaatttgagttcagatttcatacaccaaaaaaaaaaaaaaaa

SEQ ID NO: 132 - DNA, 1384 bp, Glycine max
  Peptide Sequence Number=SeqID_6272
  Probeset Number=SeqID_9911
aaatccttaatgacaaaacaacaaattaaacacataataaccgtatgtgtgttacatatttaaacgtctcttggtaatagtttttaatttttaaggatttatcgatttacagagcaaatgaaaaaatgcaaacaaaaaaaatcaagttaatcaaattaaacattgaatattgtgaatgtaaaatttagggcctgtttgcctaacgtatatatagatgtattttaatcatatatttttttcttctctcttacgtttcatacgtcactcttcattgagttccgaattgggtttaaaacttttttttgaatggatttcaagtttttttctctcctttcgattttatctcgcgagtgaggtatatactttatggtacctaccacgcagatcacggtgaaaaaagaggcttaattttatgagccaaacggactaattttaaatcgtttgctgtcaaaagtcttttagcatccattttatttattactggatatattttttaaaaatatgtcgcaaaatgccataaaactgatttaattatagcccttaaaaaatcacctctctgaaaatagatgttgagcgaaccgcatcaaagtcagcagaataatccacttgtgctagtttttcaagatgaaaacgacaggagtaaaaaaaaatgttgcctctttttcaccggagtgtcacgagaataaatgaacttgtcatcattttgtaaggcacaaagaacaaacccacaaacagattcaattcattgtttacttaaaatgttattgattattttaatttaaaacgtaaaattttaagaagatattttgtatataataaacaaagtgaagaagattaacattttgctcatctagcagcaacagcaacagcaacagcagcctcagctgtagcagcagcagcaataacaacaaagaaaatgcatcaagttaaagaacagaatgagtaatggaacatccacgctaacgactgccattgaaagcaaaccaactacgcaaactttaacgtcgattatggctcacactcgattaactggctccttttgaagcgattagtttgttatttttttttttcgtattctgttccccagttctcatcacatcatacatatcgttttcgaccagatcactttttaactctttgactgattcagtcgawgttgtactgttttttttaattttatttaacactctcattcagttaacgctttcattctcattctcgttccgtattctgacacgggaacacatcattgtttcagtttaaacaaaacaaaatgaaataacaactaaacggatgtatttaatttgtttgccattgtaattgtattattcagagaaagaaaaaaataaataaatttaaagaacttaataaatgtaataagacc

SEQ ID NO: 133 - DNA, 466 bp, Glycine max
  misc_feature (6)..(6): n is a, c, g, or t
  misc_feature (252)..(252): n is a, c, g, or t
  misc_feature (264)..(264): n is a, c, g, or t
  misc_feature (320)..(321): n is a, c, g, or t
  misc_feature (343)..(343): n is a, c, g, or t
  misc_feature (346)..(346): n is a, c, g, or t
  misc_feature (381)..(381): n is a, c, g, or t
  misc_feature (457)..(457): n is a, c, g, or t
  Peptide Sequence Number=SeqID_7163
  Probeset Number=SeqID_9912
tttttntttttttttttggtttaagataaatgtgggcaaagccctaagctttagtatgaaattacacatactgaattataaatgttttactatatagaagggtgtgattcctagtaattaaaataataaacagcaactaacaacaacaaactgagcaattaatcaagcgactttttgcaaatataactaacaattaagaagtaaatcaatatacagaataattctttaaaaagatagggagttagatatggntatttacacatntagcaagcatttcttactatattgaaaagagaaagaagccaattatggcctatttnntttaatacagctttcttagtanatntcaaagttatgattttcttcttgattctcatcaanagttctaagtctcaatcccaacttataatttatagtcttgagtctggcaattttcctgctcatgattgctcaaganaatgtttag

SEQ ID NO: 134 - DNA, 492 bp, Glycine max
  Probeset Number=SeqID_9913
aaaatcatcacagcaaaaatctcactgccttaaaacaataaacgtcgcaatggcaaaggctgacaagaaaccagcagagaagaagccggcggaaaccaccaccgcggcggcagcagagaagaagccaaaagccgggaagaagctaccgaaggaccccgccgtggccggagacaagaagaagaagcggaccaagaagagcgtggagacctacaagatctacatcttcaaggtgctgaagcaggttcacccggacatcgggatctcgagcaaagccatggggatcatgaacagcttcatcaacgacatcttcgagaagctcgccggcgagtcttccaagcttgcgaggtacaacaagaagcccacgatcacttcgagggagattcagacggcggtgaggctcgtgttgcctggagagttggcgaagcatgctgtctctgagggtaccaaggcggtgaccaagttcacgagttcttagatctcgagagagattgt

SEQ ID NO: 135 - DNA, 1666 bp, Glycine max
  misc_feature (1)..(1): n is a, c, g, or t
  misc_feature (193)..(193): n is a, c, g, or t
  misc_feature (207)..(207): n is a, c, g, or t
  misc_feature (286)..(286): n is a, c, g, or t
  misc_feature (382)..(382): n is a, c, g, or t
  misc_feature (421)..(421): n is a, c, g, or t
  misc_feature (440)..(440): n is a, c, g, or t
  misc_feature (474)..(474): n is a, c, g, or t
  misc_feature (477)..(477): n is a, c, g, or t
  misc_feature (512)..(512): n is a, c, g, or t
  misc_feature (524)..(524): n is a, c, g, or t
  misc_feature (576)..(576): n is a, c, g, or t
  misc_feature (708)..(708): n is a, c, g, or t
  misc_feature (728)..(728): n is a, c, g, or t
  misc_feature (764)..(764): n is a, c, g, or t
  misc_feature (819)..(819): n is a, c, g, or t
  misc_feature (919)..(919): n is a, c, g, or t
  misc_feature (976)..(976): n is a, c, g, or t
  misc_feature (1155)..(1155): n is a, c, g, or t
  misc_feature (1302)..(1302): n is a, c, g, or t
  misc_feature (1331)..(1331): n is a, c, g, or t
  misc_feature (1471)..(1471): n is a, c, g, or t
  misc_feature (1529)..(1529): n is a, c, g, or t
  misc_feature (1550)..(1551): n is a, c, g, or t
  misc_feature (1553)..(1553): n is a, c, g, or t
  misc_feature (1567)..(1567): n is a, c, g, or t
  misc_feature (1576)..(1576): n is a, c, g, or t
  misc_feature (1578)..(1578): n is a, c, g, or t
  misc_feature (1580)..(1580): n is a, c, g, or t
  misc_feature (1597)..(1597): n is a, c, g, or t
  misc_feature (1616)..(1618): n is a, c, g, or t
  misc_feature (1629)..(1629): n is a, c, g, or t
  misc_feature (1631)..(1631): n is a, c, g, or t
  misc_feature (1633)..(1633): n is a, c, g, or t
  misc_feature (1637)..(1637): n is a, c, g, or t
  misc_feature (1639)..(1639): n is a, c, g, or t
  misc_feature (1642)..(1642): n is a, c, g, or t
  misc_feature (1644)..(1644): n is a, c, g, or t
  misc_feature (1646)..(1646): n is a, c, g, or t
  misc_feature (1650)..(1650): n is a, c, g, or t
  misc_feature (1655)..(1655): n is a, c, g, or t
  misc_feature (1657)..(1657): n is a, c, g, or t
  Peptide Sequence Number=SeqID_7164
  Probeset Number=SeqID_9914
ntgccgtgtatggtgtatgtgtagtgtagtcaccgcccgatgtgtgtcgtagtgggtggtagtatatgccaacgccatgtagtgaggtgtgtgtgtttaagataggaggtgtagtagagtaagatgagcaccgcaagtgataaccggaggttgtgggatgtgaggatgtggatggatatggaggtagatgcgncgtcgcgatgtagngtgtgagagggacgtgattcacgtgtgagaggcgtgctcgtagatcacagccatcgtgtcgcatagtagtcatcacgcntgtgtgtgtgtcttctcatccttgcacgtgaatatgatacacgagcctccctgcgaagtgatgaggtactaatttcgcgcgagagtatatagactnatgccgcccaaatacgggtgatgatggtatgacgggtanggatgtgtgactgggtcgngatgacgtgcgatgccgcgcgcgagcgttggatngangtcgcacgcggaaagtagtagtgtagagagagatnacagagagagangatgagcatggtagatagcatgtcaatcaagaggaagagatggcgtcgtatnagcactagtcgcgtccgagatttgtgagatcccaggtgtgggacatgtgaggagagatatgagttatagagtgcgtctgcgtcacggtgtgttgcctgcgaggatccgcttgtagtttgtgacctactcacnagatgtgggcgggtgtgagntcagagtcacccaccattatacctatgtgctttgangtagtatatgtgatgaggactgaggtgttgttgtcgcaggtcgccatcagaatanatcgtatatgtgactggtgacatatgcagtatatagatataaattacataagtatagtgatatgtcccgtgttgtgttcgcgcatatgtggtgaggtatntgatgagataatgatgagtatgatatcacttagtatcaccggtgagaatacgaacangtatgtggtgtgtacagagacagagtggttatggtggtgggtgcggcgatagtgagtcgagatgtgaacatcgctcgtgttgtgggtgggagcgccacacggggatggtgtgggctctggtgtcccgtgtgagtagacacacccacagtgtggagagggtgatgagagctacgccgccngagagacgccacggagagaacacaccacgcacagaagaacgtagaagcgcacaagaagagcgccaatatcatcatattgtctctgtacgcttccatcgtatgagaattctccttgtgttgtgatgtctcgatgccatctattatganggtgggcactcacacgccggtattgttgncgcgcgttagggtctggagcggagtggcgagaggtcggaggcctcacggtggtgtgggtcgccggctgtggggtccacaggtatgccgctcttcgcgccccttttttatatatcctatgttagataacccgcacaacacnccaccacaatgcatcaagacacagtatacaacaaaattaaaccacatatattaatatnccataatatataatacagaannancatcccccacatcntcacttatnantnttcctttcaatttattntttttcttacctttttagnnnttctctttttntncncctntnttntntntttnatatnancaccaacaa

SEQ ID NO: 136 - DNA, 1809 bp, Glycine max
  misc_feature (68)..(68): n is a, c, g, or t
  misc_feature (140)..(140): n is a, c, g, or t
  misc_feature (208)..(208): n is a, c, g, or t
  misc_feature (224)..(224): n is a, c, g, or t
  misc_feature (249)..(249): n is a, c, g, or t
  misc_feature (279)..(279): n is a, c, g, or t
  misc_feature (313)..(313): n is a, c, g, or t
  misc_feature (361)..(361): n is a, c, g, or t
  misc_feature (418)..(418): n is a, c, g, or t
  misc_feature (441)..(441): n is a, c, g, or t
  misc_feature (561)..(561): n is a, c, g, or t
  misc_feature (594)..(594): n is a, c, g, or t
  misc_feature (631)..(631): n is a, c, g, or t
  misc_feature (657)..(657): n is a, c, g, or t
  misc_feature (667)..(667): n is a, c, g, or t
  misc_feature (822)..(822): n is a, c, g, or t
  misc_feature (878)..(878): n is a, c, g, or t
  misc_feature (909)..(909): n is a, c, g, or t
  misc_feature (911)..(911): n is a, c, g, or t
  misc_feature (927)..(927): n is a, c, g, or t
  misc_feature (1030)..(1030): n is a, c, g, or t
  misc_feature (1042)..(1042): n is a, c, g, or t
  misc_feature (1045)..(1045): n is a, c, g, or t
  misc_feature (1122)..(1122): n is a, c, g, or t
  misc_feature (1145)..(1145): n is a, c, g, or t
  misc_feature (1162)..(1162): n is a, c, g, or t
  misc_feature (1173)..(1173): n is a, c, g, or t
  misc_feature (1176)..(1176): n is a, c, g, or t
  misc_feature (1179)..(1179): n is a, c, g, or t
  misc_feature (1197)..(1198): n is a, c, g, or t
  misc_feature (1267)..(1267): n is a, c, g, or t
  misc_feature (1271)..(1271): n is a, c, g, or t
  misc_feature (1323)..(1323): n is a, c, g, or t
  misc_feature (1354)..(1354): n is a, c, g, or t
  misc_feature (1380)..(1380): n is a, c, g, or t
  misc_feature (1444)..(1444): n is a, c, g, or t
  misc_feature (1482)..(1482): n is a, c, g, or t
  misc_feature (1485)..(1485): n is a, c, g, or t
  misc_feature (1506)..(1506): n is a, c, g, or t
  misc_feature (1584)..(1584): n is a, c, g, or t
  misc_feature (1589)..(1589): n is a, c, g, or t
  misc_feature (1604)..(1604): n is a, c, g, or t
  misc_feature (1649)..(1649): n is a, c, g, or t
  misc_feature (1658)..(1658): n is a, c, g, or t
  misc_feature (1662)..(1662): n is a, c, g, or t
  misc_feature (1714)..(1714): n is a, c, g, or t
  misc_feature (1730)..(1730): n is a, c, g, or t
  misc_feature (1737)..(1737): n is a, c, g, or t
  misc_feature (1749)..(1749): n is a, c, g, or t
  misc_feature (1765)..(1765): n is a, c, g, or t
  misc_feature (1789)..(1789): n is a, c, g, or t
  misc_feature (1792)..(1792): n is a, c, g, or t
  misc_feature (1809)..(1809): n is a, c, g, or t
  Probeset Number=SeqID_9915
ccctgtctgttgtctcctctcttctctgtcgcgatctcttgcttcctatcgctacactactagatatncgatgcactgctcgtttctacacacgtatactctaatgtcagagtctcgccgcaccttgctctctcctcccntctctgcggactagcttctacatctctctcacactagagagatacacagtcgtctatcatagtactantataccaacgttcgcncacacactctcacatatacacctcnacagcatccttcctctgatactctagtgtnatatctatgagactcgtcgcagctctcgagccgngcgctacgtatgcacgagatgatgctcatgactgcgcacgctgcgcantctcattactatcatctatgatcatctgatagtcgctcttcacgacatcagagctgntcgacactacgatagttatctangtctgatgctgacgctaatgctaacgtcgcactaggacgctactactgtgctgctatgacagcatgatgtgctcgcgctgagttgtagttgaacgcatgctacgcgtctatctctgatgntgcatactcgccgataggctcgcgtacactccngactctcctctctctcgtatctcttagccacgatatnagcgatacgtccagttatgatgagancatgcatgtncatgtacatgcagatagcatctagctagtgcgcgcatggtcgagcgccgctgatcagacggatgcgcatcatgtgatgctgctgatgtacgtgtctatgactatctcgaggtgcgcgtgtgcagtcatgcggccttgagtcggtcgcgcctcgcnagtgatgcgcaagtgacaagtcgtagctctgcatgacttatgtcgcgtctgtcggngtctgcagtcgccgtctgcatatctgtagangncagctgtgctgcatcntactgatgctgcgttggttgtgtgtgcgtgagatgatagtggagcaggtgcgcgcttggatctatgtatagtctgtgcatgtagtcatagctctgtgtcgtcncagctggcgtgnagntgtagtgtgtcgtcttcactgctggtgcagatgactgagtgtgcagcgttgctgcgagaccgctactggtgctgctnatgctgtgctgtgctgagcggtntatatgtcgcacgttgnatgtgctgtantantgnacattcaagtgatgtgcnngcattgcatggtgtgctgttgcagtgctcgatgtagtgtgagtgatgtgctgactgtgtgtatggtgcnctgnagcgcacagagaagtagcgacgatcatttgtgttcatgtctcgtgctgtggntctattgatatgctgcgacggctggagctgngatggctgctgctgcagtctcgctgntgactctgtgccgtgtgacgtgtagagatgtgcagtgctactcaagtgacgatgatgagagtcngcagtgtagcttgcacatcatccgtatgtatagtctgnacntgctgctgctgtgagctgtgnatgttgtctgtgagtgactgtgtgagcgccgtgccgcgatcgatgatgtgcacatctgtatgtgtatgcatgaccatntgtgntctgctgctgtgctntactactctaagtgtctggtccatcgcactcgtgctgctgccacntgtgtgccntcgntgttcatgcagagcactgctgtggtgcacggcctgtagttgagatgactggntatgacgtatgtacanacgtgtntgtgactgctgnactgccgcgacccgcnactggagacagattgctgctgctnagnacgtgctatcgtgctan

SEQ ID NO: 137 - DNA, 535 bp, Glycine max
  misc_feature (132)..(150): n is a, c, g, or t
  Peptide Sequence Number=SeqID_7165
  Probeset Number=SeqID_9916
tccagtattcagaatatctgaaaatcatatcttattccacatattaagagagttttgctttgtgcaagatggcaaaataatatggttatggacaatggacctaagatttaagtttaactcttctatttatgnnnnnnnnnnnnnnnnnnngtgcatctaatctcagttatcaggacgcctccttacagcgtatggttacagtgctccagaatttgagtctggaagttatacgcagcaaagtgatgtcttcagttttggtgtcgtaatgctagaacttctcactggacgaaaatcttatgaaaagtcactgcctcgtggagagcaagttttggtcagatgggcagtccctcaactccatgacattgatgcaagctcacaaatggctacaccctgcttaaagggaaccaatcctattaagtccgggcatcgtttggcagacactgtttcgtcatgcaccggaggtgtccccatggctccattcgtggattctaacaacaaccatgaaaacagggacatgatctgtgaggagtgagcc

SEQ ID NO: 138 - DNA, 832 bp, Glycine max
  misc_feature (183)..(183): n is a, c, g, or t
  misc_feature (788)..(788): n is a, c, g, or t
  misc_feature (795)..(796): n is a, c, g, or t
  Peptide Sequence Number=SeqID_7166
  Probeset Number=SeqID_9917
attagcctccggaagcacttgatcaagactcgagtgaacaaaaaaaaaatgatgggtacccttaaggtgtccaacagtagtttatacatattttcgaagttcctagtaatttgtatggtgatgatgatatctttggttgattcaagtattccttgtgtgattttgaggcaatctttcattttngtgatcgaattcagatacgggtgggtttcttacaagtttcctgcacagcctgctccctattggatggcttccttcaaaaaacagggggcctggctttctgatgaaggcttattgttattttccccctccgggcctgggatggccaatttgacccatttcgccatcaattggaacaaattaaccctgggggaaaatttggcctttcgccccccctgggatcccccccacattttctttctgggggggggaaagacttttttccctcttttacccccgggggaggggggttttcccaccccgttgtgtttttttctaaaaagaaaggattttttttggagaaaaaccccttctcaaaaattttgggggccctctcccctcttttttgggaaaagattttccttcaaaaaaaaccccttgtttttttttggggggggggcccccctccctcccctcttaaaaaaatagttttttaaaaaaataaaaacggaggggggtgttttttatatttatattgtgggggggggagacaatcttaaaggggggctcctccctctcccttcaaaaagaagggggggtcccccccccacaccaaaaaatataaaaantaggggnntgttcatacccaagaaggaaatttctctctcccccc

SEQ ID NO: 139 - DNA, 1391 bp, Glycine max
  misc_feature (398)..(398): n is a, c, g, or t
  misc_feature (406)..(406): n is a, c, g, or t
  misc_feature (833)..(833): n is a, c, g, or t
  Probeset Number=SeqID_9918
agttcagagatacgcgtgtgagtaagtgtgcgtagtacctgtctacagttgtgtgtcatatatatcattgcggttctatatcaaatcaagtggtatatgcagatgtagtgtgtctgcatgacggagcagatgcatcagtgcgattgtgagattctgataacagtcttactaattcgaggtactactactatgacgaagtccgcacacacgtatgagcttggctgctggccttcctctgagacccgcacgagttctatacagcaacaggagtagcgactgctagtatccacctagttggtagaataatcttactgtgcgttcatgatctcgtatactgaactaatagttgtattacggggtacggtgagctggtaggagacgtaaatcactccagtcgngtcgcctnagcgtaagtgcgataatcgatcacgcgtagctgaatgtcgcgcacattaggccagacaggaggacgactatctaccgacgcaagctgtagcctagtgcgcgcgacgtgcgcgcgccgagagagtatggtgacctatgagtatgatagcaacagcgaatagggtgagaaacactagatcgcggatattatcatatgtagacataacattcccgtgcaaataactatagatgtgcgcgggctcgtctttcggtgcataactgctatcacttgagaataatacaggtatcgcatcgcatgcgcgcgagtggtctttcatgcggattcttttaggtcgtctctaaagtcattacgacgacaatgcaacgcgccctggcggcgcgctgttattcttacagagcagtcgagactccgcccagcggtccttcanatcaatcacactagcctccttaatggcgaccagtgatagatgactatgactgagtcgtatcagagagatgcttagaactgcacagagattctcttactcgcgatcatctagatggtagttctaagtatcagtcaatggtgcctcacgtgtcgtgcacactcgtaacatacgtgttacgccgtggcgctgcgtagtgctacgtggtaatatggcaggcattgggcaatgtgtgacatcaatgcctccaaacactggcagcactaactataggatacatctctgggatcatacagcggagcctcatatttgatagggaaggtgactacgtagacactggtaacgttgcgctgacataggcgtctctcccatctacttcctcatcctaggagtgccttagcgagccagggtccgccacacagcgctgtcagcgcgctcaccgtcggactcttcatgcgtgttatactcgttgtagagagagaggcggggtggcaacgatagaggcaggatagagatggcgagagcgcacgaggtggacggagccgcggcggtgccgctcac

SEQ ID NO: 140 - DNA, 867 bp, Glycine max
  misc_feature (1)..(1): n is a, c, g, or t
  misc_feature (282)..(282): n is a, c, g, or t
  Peptide Sequence Number=SeqID_7167
  Probeset Number=SeqID_9919
ntttttttttttttttgcttctattaacaaaatttttgtcatcctctttggataagtgaaggacttcctaacaatttagtcatcctctttccacgcctaataaatccccctgttcaatgggttacttgattaagaaataagagcatcggtaagataggaaatttgtttgtgtaaacaatccatgggtaaaacctaaaactccttttattctgaaagggaaaatgatggcggccttagtcgccgcggttcatggtgttttagcagcacatcatggcgatctanagtacagcacacgcacaaggttgcgggctcacaccagaaataagagcatctgtaagataggaaaacagaaaaaacatagtacatatggcgtcggcctctggcctcctcttctcttcttcttctcctcattcagcgcgctcggtcggcatcgccaggagcccagctgctccttttgctctttcttcttgtccttgcttttgcccctctgccgccgccaccagtagcgcaactcttcctcctattgcttcttgttcttttttgcactgttcgaaacaggcgtcgtaggatttcgcgtggcggcagcgcaggtggcagtttggtggttctcccagacgcaggccccaaaggcacgcgacgtggcacggtttgtagtcctcccgtccgctacactgcgctttgcaggaggagcttgggctgttcctggtggcggccgccccgacgaggagcagtgctaggccgaggagtacacacgatacaacaaggctgctgctgctacgcttcatcttggaacccatacccatggctagccaagctatctcgtaggtggatggctgtgtagctaacaatgtaggttgctgggtggat

SEQ ID NO: 141 - DNA, 408 bp, Glycine max
  Probeset Number=SeqID_9920
cgacgaagctcggatttcggcgtcgagtcgactgaatcccctataaagaccccagtttctttctttctttttttcttttcaagggctaaccaagcactcacagtagttttgcttctctcggagatgggtctactagtgctgaaccctaacgccgaagtgctgaacaaatcggcggcacttcacatgaacatcattgccgcctagggtttgcaagatgtcctcaaaaccaacctttgttccaatggaaccatcaaaatgctcgttggtggggctggggatatcaagcttaccaaagatggctacactcttttgaaagagatgcaaatgcaaaaccctacggcgattatgatttgctagatctggtgtggcgcatgatgttgctaggggtgatggcaccactttttactg

SEQ ID NO: 142 - DNA, 583 bp, Glycine max
  Peptide Sequence Number=SeqID_7248
  Probeset Number=SeqID_9921
tctgctagaggcttttactggttttgcatatagctaatgaacaataattgagtcagtagtgaccttgcttacttggttaaaccattctcattttgtctggttgtttattggtttgagggaaaatactagtttttccagggaaggaaaaaacacaaagtataataataacatggattccactctatttttatttcataattcacaactaatacttgatgctcaacaacttagtagtcatattgaattatttaattacatattccacaataaagtacagttatctttttctcaaataatttaacttgagtttataatcccacaaattgaactctgctgatatatgaacactcattctgtcacaattcaagaacaacctacttgggttaagaagggttggcatttgtgcttccttgtttcactgttgtattttgttgttagaagtcagaaggactgagaggtattttctcaaacctagctggagagacatttcttttaaagcgcttgcagttgcatagataggggtgtgaaaagccccacattgggaagtttaggcgaagtaagctcgagttataaaagaaatgtg

SEQ ID NO: 143 - DNA, 505 bp, Glycine max
  Probeset Number=SeqID_9922
caaaagaataccccaattctgtcatcagcagcatagatgccaccattgaacaccttgcagcatcaaatgtgttctttattgccaagcggaaaaatgcaaacatggatgtgctgtatctgtctgccaagatcccccgtgggattccatttctgatagagcttactgctgctgctggtgttcctggtgccaagtgtgcagtcaagactccaaacagggagcctgtgcctctactccttgaagctatggagtctcttatcgattaagtgaccccacaccttgaagatcggcattccgtcaaaatcattcggtcatgagcatacgcaggtgccgctgttccatggaaggtagtcgggacttggattgtgttgctcttgtatgaccactagatccccgtatgtacaccggtaggtgttttggggttgaagtttcctctagggatactcaacctgggactttttgtgccccaggaacagcataccggccccaacatctttccctgcacggc

SEQ ID NO: 144 - DNA, 390 bp, Glycine max
  misc_feature (322)..(322): n is a, c, g, or t
  Peptide Sequence Number=SeqID_7249
  Probeset Number=SeqID_9923
aagcacaagtaagtccatcttagctatgagagaatgctgtatggtgatgtttcttccaagcgagtgtgtatgggtagagtggagacggtgcaagatgggtatggggtcattactcatgtgactaaggaaacagagggaaaagacgaggcttctacggagcagaggagggagtcagttggagatgatggcacatcggcggcctccggagaggaggtccgccgagccaaatgaaaatcctaggctggaactgccgtggcatgctctcctccacggcagttcgcgagctcttggatttacaagggcgcatcaaggcagatttganttttctttctgggtctcatttgaataaatgtaaagccgatgagctgcgtagtgttctaagttttgagt

SEQ ID NO: 145 - DNA, 1902 bp, Glycine max
  misc_feature (1)..(1): n is a, c, g, or t
  misc_feature (19)..(19): n is a, c, g, or t
  misc_feature (21)..(21): n is a, c, g, or t
  misc_feature (23)..(23): n is a, c, g, or t
  misc_feature (59)..(60): n is a, c, g, or t
  misc_feature (156)..(156): n is a, c, g, or t
  misc_feature (162)..(162): n is a, c, g, or t
  misc_feature (202)..(202): n is a, c, g, or t
  misc_feature (258)..(258): n is a, c, g, or t
  misc_feature (264)..(264): n is a, c, g, or t
  misc_feature (295)..(295): n is a, c, g, or t
  misc_feature (329)..(330): n is a, c, g, or t
  misc_feature (333)..(333): n is a, c, g, or t
  misc_feature (446)..(446): n is a, c, g, or t
  misc_feature (474)..(474): n is a, c, g, or t
  misc_feature (477)..(477): n is a, c, g, or t
  misc_feature (527)..(527): n is a, c, g, or t
  misc_feature (574)..(575): n is a, c, g, or t
  misc_feature (577)..(577): n is a, c, g, or t
  misc_feature (648)..(648): n is a, c, g, or t
  misc_feature (669)..(669): n is a, c, g, or t
  misc_feature (890)..(890): n is a, c, g, or t
  misc_feature (942)..(942): n is a, c, g, or t
  misc_feature (959)..(959): n is a, c, g, or t
  misc_feature (1213)..(1213): n is a, c, g, or t
  misc_feature (1216)..(1216): n is a, c, g, or t
  misc_feature (1218)..(1218): n is a, c, g, or t
  misc_feature (1293)..(1293): n is a, c, g, or t
  misc_feature (1417)..(1417): n is a, c, g, or t
  misc_feature (1457)..(1457): n is a, c, g, or t
  misc_feature (1484)..(1484): n is a, c, g, or t
  misc_feature (1496)..(1496): n is a, c, g, or t
  misc_feature (1531)..(1531): n is a, c, g, or t
  misc_feature (1576)..(1576): n is a, c, g, or t
  misc_feature (1790)..(1790): n is a, c, g, or t
  misc_feature (1806)..(1807): n is a, c, g, or t
  misc_feature (1862)..(1862): n is a, c, g, or t
  misc_feature (1864)..(1864): n is a, c, g, or t
  misc_feature (1866)..(1867): n is a, c, g, or t
  misc_feature (1876)..(1876): n is a, c, g, or t
  misc_feature (1879)..(1879): n is a, c, g, or t
  misc_feature (1882)..(1885): n is a, c, g, or t
  misc_feature (1887)..(1887): n is a, c, g, or t
  Peptide Sequence Number=SeqID_8079
  Probeset Number=SeqID_9924
nacatcaatgtagccggcnantntcgacacagtatcacgacgtctgtataaactatgtnngatactactcgacactgcacaaacaacagcagcgatactactacagactctctatcactcagctctacgggtgcgacgcgacaatgatagcctcantcgagngacgtgatctcgcggatcaaaggtagacagcatagtcacnttagcgctgtcgcgactcaaatacatagcagcctagtcgttagattaggtacgacntacatnacgtgatgtcctgcgtgctgtcgctatcagntatgataatcatcattgaatatttagatatatannctncttacacagcgctagctatatctgtcacgcaatcttcctgatactcacgcacacatctcgatcagcacccacgattcagatcatatcttagatagctcactacagacacggtngcgagaacgacatatacacgacgaatanganaagcagacaccgcacacaatgagcgaggatagtcatggagtatggtccantcatctcatcgagtacacgctgcctcatacactgactctagaagagnnantcgaagctgtgcggacgtctagcaagtgccctcgtgagccacatgagccacgcattcatcgagcggttgangtgctgaagtgagtgtgacgnaattcatgcagtgctctctcgtagcgacacatacgtacgagagacaagtcgtcgcgttctcttgcatggcgcgagttgctatctaccgtacgaactacacatctacgtagccatcgtctctcgtgagagagtaacagtcgagtctacgcatcattcgcacctgagcgtctcgtcatagtagtgctgggtgcacacacttcggacgctcgtctaacgtcacntctctcgatgtgggcgcggtcatacctcatctccacacaatctggcgaacgntataatcgggttcgtanggcgtcattcgactgacgatgcgtcaacgttccgcgaagtgaacaggaagtacgtgcttcgatcagccaaggagctatatgcatactcgtcagtacacacgcttatctcgaacaatctattcactcctactgctcttagtatgttggctatcctcgtcgtctcgggcgcatgccgcacgtaagagcgcgagagcgaatgattcagatagtgatattatatatgtctagacatgagatgtacgaaggcgggcggngtngnagatcacagcgactaggagtgccgcgacacgtcgcagaagtatatcagatatcatctcagcactatacacgtctncagagtaatgcgagtactatgagatgtaatgacgaagtagcgctagactacatatccatatgacgagtgcgcacgctggatacatataatcggtacgagtatggaactagttcactagacacancgtgctcgtggcgtcgcatatcacaatcactatcgagagnatactagatatattgtataacagagangatgcatactcntatctcacttcgtcgccacgtctcatcgcctatcnagtacgacagataataacctcgagacacgcacgccaagatctatntactcagtactatatagacaactagatgtcatagtacacatagtcagacatgtatacgacaggctgaagtagatatggtctaagatagtatactcagaacgccagtctctagctcagtagtctgcacctcagtatctgttgcagcgtgtgcgcgaggcgtgctgccatgacatctctatatgtcaacatacggtagtaggagtaaggacaacgnaacactcacgattacnnagaagaagagaccgtaaagtcgctatctcgttatctctgctacgtgtcgcactanangnngacatatgngtnagnnnntnggatgtcgtaaagcg

SEQ ID NO: 146 - DNA, 424 bp, Glycine max
  misc_feature (309)..(309): n is a, c, g, or t
  misc_feature (360)..(360): n is a, c, g, or t
  Probeset Number=SeqID_9925
aaagattctccgatcttctctgacaaaacaaaatcgtctcttcgccaaagtcttcactgtttcgcttcgatcttgagagatctttgtctccccggtcatcaatcaagctcacgggtgactctgaaaaccctgttagagcaaattgatattccagatttttagggtttttttttggggaatctctttcagggctttgctctaacatgtcaggaagaaaggaaacggtgttggatttggctaagtttgtggataagggcgtgcaagttaagcttactggtggtcgacaagtcactggaactcttaaaggcnacgatcagttgctgaaccttgttctagatgcggcggtggagtctgttcganatcatgatgatcccgttgaagactactgaccagaccagacgccttggtttaattgtttgtcgcg

SEQ ID NO: 147 - DNA, 586 bp, Glycine max
  misc_feature (4)..(4): n is a, c, g, or t
  Peptide Sequence Number=SeqID_8080
  Probeset Number=SeqID_9926
gttnaggaagtagtatctacaaacataatctacttatatgcgacccacgcaagtagagcaaggacaaccctgtacaacacaattatactaagtacattcacaaagcttttgattttgaatctgatgaagctcaaaaagacactagctcacttcatgctgatcttaaagactgagaacataagcgcgtttatgctaacaaaattgcacgttacacacttgccacgctctgccctagatgtctctgggagcaagatgctgaaggtgttccaaataagctatccttcgacgaaatccaaagcaagaactacttgtaagtgaatgagacatgacacagtataccagtgtccaacaatagatggaggattgaactcattagacttaaagccaaaaaaatacactgactagaaggttttccttgatccaacttcatttacatgcaaagccaagagaggggccaaaaatgctaccattgagttccaaaacacagagctcatgacacgtttgacctacactctggatgatattgacgtaccctatgaggagtcttctgatggcactgtaaaatgtgaggagaatgatggcattg

SEQ ID NO: 148 - DNA, 1660 bp, Glycine max
  misc_feature (22)..(22): n is a, c, g, or t
  misc_feature (24)..(24): n is a, c, g, or t
  misc_feature (37)..(37): n is a, c, g, or t
  misc_feature (90)..(91): n is a, c, g, or t
  misc_feature (97)..(97): n is a, c, g, or t
  misc_feature (122)..(122): n is a, c, g, or t
  misc_feature (183)..(183): n is a, c, g, or t
  misc_feature (249)..(249): n is a, c, g, or t
  misc_feature (334)..(334): n is a, c, g, or t
  misc_feature (365)..(365): n is a, c, g, or t
  misc_feature (383)..(383): n is a, c, g, or t
  misc_feature (649)..(649): n is a, c, g, or t
  misc_feature (1639)..(1639): n is a, c, g, or t
  Peptide Sequence Number=SeqID_8081
  Probeset Number=SeqID_9927
ccccgcgacgagagatcgacanantcgactgtctgtnatactgcgcgtagcgtatatcgcaaacgagcgtaatattcatcattccggtgnncgctcnccgtcgcgtcacagtcagacacatntatacataataatttacagcgcgcgcgtgcgcgcgagcatcacactattatcacttctgcncatatatgtatacgccgcgcatgtccagagcacgggacgtactggtctatgaagatagtttgttgntgcacttaatccactccgaccgcacggcgccgtcactatatttgtattacacgagatacgctgtagtatcgcgcgacgtatgatnttttgatacaccactatatatagtgtttttntgtaaatatcccgcgcgncgagcttgtgggtagccgcgaatattattactcagaccgtcttgtatatccgcagacgccggacgtatatatatgtcacgcggcgcgcgctatatttatatacatcgacaatatcatcagacggagcgctatttcaagtcgcggcgagtgatagtaatatggtgaagggtgtgtggtgcgagaggatgtacgacctcagtgcacatcttgtcggcagtattatagaccagaccgacatcatgttgcgacatggtctagcataacanaagcaagatcatagagtccgtacaaacacgagcgctggtgcttaaaacgacaagcctatgtataacaacagcacgacgcgccggtttgcgcactaaataaataacgtggtggtggtgtatgcacaaaacaagtattacattgctgatcagcgcgaaaattaattaaccacgacgcacccattttcgatagattttatgcccacgccgcctcgtcctgtcctagcaaacaagatgtctgtatggaccatttatacgcgcgtgtgtctatcttcttcccgcccacccaccgcctattttattatcgccgggggcgttacccttaatttacatattaatcgtcaacaataaattaaatgccgggggatgaagaattagatgacgttctctaccgtccgcggatactggttatatttttgagggggcgtaataatattatttgtattcgcgcgcgcgcggtttactaacgcaagataataacccacccgcgggaatacgtatacactgttttcttgtgtgtgggcttgtggggcgcgcggggcggacccacgccccgcgcgtttttataagcgcgccgcgtaagtcagtataaacatataatacggggcgtacgcaattttaaataattgagggggggtgtatatgtataattgttacatctccgagcgggattattatagcgcgatacgacgcgcgtagaatataataaaataatatcacggccgagataaaaattgtgctgtggcggcatattgtgtgtaataaaatagtgagggagtttataacagtcccatgttttacgttgatttgcagaacatcagcacccccttattattaaatacataattagtgtggtcgcatgactatattagctgtataatatattgggttatataatcggcgggtacgtcgagtaaaaaacaccaaacgcacaaacggcgcggcggggttgcggcggggcctgaatctggagcgcgcgaaagacgcaggcgncggaggtagcggcgagggaca

SEQ ID NO: 149 - DNA, 404 bp, Glycine max
  Probeset Number=SeqID_9928
tcagctacgtaggccccccccccggttcgtttgttcgtcttgtcatcgcacgttcgtcctctctgtttcgttcagtttcccctgttcaacttgttatccacatttaaaaatggtagccaaagacaccgtcgccaagaagggaaaggatgcatcctcaaagaaagccaagaaggtcgaggaagttgaagaggtcgaggaaaccgtgaccccctccaagaacgagaagaaacagaagaaagaggagaacggatctgccaagaaggagaagaaggacaagaagtccaagaaggcagagtctgactctgaggaggagaagcctaaggagaaggagaagaaggataagaaggccaagaaagaggagcccaaggaggaacccaagtccgagagcgagtccgaggaggaga

SEQ ID NO: 150 - DNA, 1344 bp, Glycine max
  misc_feature (46)..(46): n is a, c, g, or t
  misc_feature (408)..(408): n is a, c, g, or t
  misc_feature (478)..(478): n is a, c, g, or t
  misc_feature (1098)..(1098): n is a, c, g, or t
  misc_feature (1238)..(1238): n is a, c, g, or t
  misc_feature (1240)..(1240): n is a, c, g, or t
  misc_feature (1244)..(1244): n is a, c, g, or t
  misc_feature (1247)..(1249): n is a, c, g, or t
  misc_feature (1313)..(1315): n is a, c, g, or t
  misc_feature (1324)..(1325): n is a, c, g, or t
  Peptide Sequence Number=SeqID_8082
  Probeset Number=SeqID_9929
ttgagcggcgtttgtgcgcgtatcgtgtcatgacagggtaatgtcntcgttagtgtaggaatcggggtgagagatcgcatctcgcggcgagcgttccacggcagcatcgtaggcgcgtagtgcggatgaggcgatatgtagcaacgacgctcacgacacgacgccgcgcgtgcgcgctctgcgtttcagcgcgtttcgtactaccgtatcacacgcactacgtggtgtgcgccagcgccggccttgtgtggtgggagtgtataattgaatcagtcgataggactctcagcagcgacgtcgcggtgcgtcgttctctatggtgctctaattgcgtgccgctgccggtgcgttgtgtgggcggccactcgccatcaattatatatgcagacgcccgcgctgcccgtccancacccgtgttcgacatgtgtgggcgctgcagtgggagtgctggtgtcttgcgcggtatattcatatcgtnttgcaggatggtctgaggcacggacacctacaagacggccccgcctacgctcgcgccacgcagtgcctccacacaccttttcgcggggagacatcaatgcaggattttctattgatgcgagtactgtcgtgctaccttttaatacacggcgcatcgatacctcaccgcccctgtagggcggcggtcagtccttctcacctcatcgccgctctctttcttccgtcatcatcgcaacatcgccttcccatacctatgtgcggggggaatgggaagaagaaagcaaagacgcaaaacatcgcacgcggaacggggccggcgtcgcccccgcgcctgccggcgtgcgcgggccccacgctctcccccacatcgccgtaccaccacccgtcgccgctccaccaacaaccaaccagcaaagagtaaagggcagcatcagaagagaaatagacgcacttacagtagccgcctgggatgagagcgcgcgctggccatacatcggacaggtgggcagagagctgcggagagactgtgtggcccagacgacaactacaccgtcagcagacggagcacgcggcggctgcgcgcgtccggacgaaggtgaagagagatgtgagagaacgacntcgtgttgatggtgtggtcttagtgtttgtacgtcactcggatccactgctccgacgtgtgcgcagcgtggcgcgtgtatctggtgtggccgatctcgcgcgtgacgctattaggcgagatgaggtggggggtgggcagngnatanttnnnttacatattatacatctaacccattcccgatcgtcaccccccccctgcgccacgatcaccgacnnncaaaaaaannaaacaacacccacccacaa

SEQ ID NO: 151 - DNA, 627 bp, Glycine max
  Probeset Number=SeqID_9930
cgaggacagcgtttgccagtgcttatagaccggtttcatcatacagattgcatcattccacaaggcatagcagccggcgatgattccatgtgaggcgataagaatgccggatataagtcaatagacaagccagtcaaggcatggatcatcttcatggtcacacgcatgcaggctgccgcaacggatgacagttattcatgcgcagcttgatttccaactgggtggacggcaaccttatggttttcgctgagatcgtcgagggcatggaagttgtcaagagcttagagaaggcgggctcccgcagcgagctttttctgcaagcaagtcgtcattgccgactgcggtcagctctagatccgttccagtgccggtccactgtcgtcgtcagtaccgtgttatcgtgtacgctacgatctaaataagagagtcgtgcgtcgtgtccagtattagccttgtccgttcgatgagatctccgtggttggtttaggagggttttaggtggtactcatgttgccctttgatctgaagtcagacgtacatgtttatgagaatctctccgagctaacctcggtatagcaaggcaaagctcttccttacaaatcatccgaatgtttaaacacaataaag

SEQ ID NO: 152 - DNA, 1548 bp, Glycine max
  misc_feature (62)..(62): n is a, c, g, or t
  misc_feature (73)..(73): n is a, c, g, or t
  misc_feature (83)..(83): n is a, c, g, or t
  misc_feature (209)..(209): n is a, c, g, or t
  misc_feature (220)..(220): n is a, c, g, or t
  misc_feature (378)..(378): n is a, c, g, or t
  misc_feature (581)..(581): n is a, c, g, or t
  misc_feature (607)..(607): n is a, c, g, or t
  misc_feature (1497)..(1498): n is a, c, g, or t
  misc_feature (1524)..(1528): n is a, c, g, or t
  misc_feature (1530)..(1530): n is a, c, g, or t
  misc_feature (1532)..(1532): n is a, c, g, or t
  misc_feature (1535)..(1535): n is a, c, g, or t
  Peptide Sequence Number=SeqID_8083
  Probeset Number=SeqID_9931
agtctaggacccagagtgtgtgtgtggggctagcaacgtctgatctcgcctgtgtggcgcgnggcgcgtctangaagagcacnaatgggataacaaagcagaggcggaataggtgttctatgaaatactcacattccacatcctccatcagaggtctgccacgcggacggcacgcgtcctatctcaacgcgtgcgcccgcacacgagangacggcggganaaccgttatgatcatcgtcttagatatagaatcatatacgaaagtgtatactttactagaccgctgtcccacacatataggacacatatgtcatcatcacaaccgcccgactgtcattatttatagtgtggtacatctgtgtttgatgtgatagagantgagtggcttggttatactatctatatcttcaccgtatcgctggttgtctcgttgtctctatttgactcgctatgatcgaggtacaatatgagatcagagacacagaccacactctaagtatctatagatcatcagcggtccacatcacgcaccgtgagagcgcgctctgtagaagggcggaggcagactcgcggtcggggcngaggcggcgcgcgtaccggcgccgancgaggtggaggagtacccacacgcgacgcacgccaaagacatcaaactatacgcgcgatatgactatcctcttgttctagaggacgagcccaggcgagactactacattctcacagctcgttatgcccacgctctatagtaacttatcaccacaaagagtcttctcctgctggtacacgtgttagatattgaagaaatacaacaagtgtccctaaagctcacactatactgacagataagaggccgaggactactcggaggggagtgtccggggtatcatcggagccgccatcaacggttgttatactatagagctctgagagccgcttcatgcgttgccacaatctcttgtctcaagacggcattgctgtgttacatgtaaacgcgacatggtgtaacgaataataatctatttacacagaagtccatctcaatgatacccgcaccccctctccttactccccgctctactatccaccacacctctcccacctatatcaagccactgaggcgggcttcttcgggtgtcgccgcgttagcacaaccactgtcccagctgccgcgtgtggcccacagtccggccctggggagctaagtaggcacgcaatcccaggcccagatcctctctacaagccccccttagcacacatcgcactcatgctgcttcccgtatgtatatacgtaaaacacggaggcaaatacgccggacctggcgccaaaagtgcagtacacgggtcatcgctgcgtgttcggtcgtcagccacctaggtagaatagttgctactcgtcgcttgctgccgaacaaactacctccgaactcggcggtgactctactttttattttaaactccgccgccgcccgcgggggagccccacgtcctcttgggggnngacgacgaacagagcagaaagaggtnnnnnananaanaaaaaaaaaaaaa

SEQ ID NO: 153 - DNA, 565 bp, Glycine max
  Probeset Number=SeqID_9932
ctacaggtcatgtcagtcagtacgtgtaatatgacgagcagtgaattgtaatctgtactcgctatagggcgaattgggtaccgggccccccttcgagtcatatacgtaggcgccctccccgcagtagttccacatgtcacagtcaagtcataactatctgtttgtcaggctggcattaatcatgattattgttcagatctcgtggctagtcaggataaatttactgtgaatcatctgcaaataaatcgcagtgcatccctgttaaaataccgtgatgagatcattttcatcagcaggaggatctctcctcttttcctttttggtcctcagttctctagtcaataacaaattctatctagtacaggattggtaatctgaaaagtagtatggcatcaaatcgtgaaatgttcagtaatgtggttcctctagatagtggagctggcgtgctcaggatgagatgtagtttgatgttcaatgttttttcaaggcagggtttagactttcacagggtaccagtctggtaagaacatcctacggtgttaaacacaataaagttggaacggga

SEQ ID NO: 154 - DNA, 1048 bp, Glycine max
  Peptide Sequence Number=SeqID_8084
  Probeset Number=SeqID_9933
taggtttcccggcgcggattgccggggctttcctgaccttctatgaaaaaaatggaagatagttagtacccgtagcgcatggcccatccacccacctttccttgcttgctgtcagtctcccctccagtccgggcgagcgaaaattcgaaactaactttccactcaccatccatgtcatatctgaattggcaactcattattaaatccattacgaaaacgaagaaacccaccaaaacaatggtagtagcttagctaattgcctaattgaatgaatctcaatggaacctcctctcatcaacgactccacattctcttccgctaacccttccttgtccgagatttggccctctcattttcccacagaccacactcccagtaacaagagacacctctccccctcgactgattgtggcagcaataaacatatcaaatcatcaggatcaggatcccaggatcaaaacggtgccttgaaggcgggtgaagtggacgcgacttcagtagccggtaacaagttacccgaaacaaacggcgaaacctagttccttccgagcagccacctaggcaagacttatatacacgtgcgagctaggaaggggccaagccacccgatagcccacagtctcgctgagagagctaggagagaaaagatccgggagaaggatgaaaaattccttcaagatatagttccccggctgcaacaaaaggtaattggtaaaagccacttgggctgggatgagataaattaattatatcccgccccggcagcatccaggttgagttcctttccaaggaagcctgagggcagttaattccaagattgggctgggccccaactattgaaaggtttcccttcaaaaaaagggggcacctagccctttgaccttgccgaaataaatttttgatcaacacccggcccgggtaattgttccagggtcaaagcgggagatggtggaaatgaaaataaacggcgcgttttaaaaaaagaaacaaattcagggggggtctcgggagaacacacatacacgccggtgcgctttactctataaaa

SEQ ID NO: 155 - DNA, 193 bp, Glycine max
  misc_feature (22)..(22): n is a, c, g, or t
  misc_feature (77)..(77): n is a, c, g, or t
  misc_feature (84)..(84): n is a, c, g, or t
  misc_feature (96)..(96): n is a, c, g, or t
  misc_feature (100)..(100): n is a, c, g, or t
  misc_feature (150)..(150): n is a, c, g, or t
  Probeset Number=SeqID_9934
ccccccccccaaaaagttgtangattcttgtcgttcgtagtttcccagtgtccacagcgttgccgcgaagacaaacnagagacnaagaaagagtgnttanctgaaattgaattcaatggcgacgagaaatcgaacaatagaatttagaanacacagagacgccgtgaagagcgtgcgcgctcctctatcctcc

SEQ ID NO: 156 - DNA, 1355 bp, Glycine max
  misc_feature (15)..(15): n is a, c, g, or t
  misc_feature (17)..(18): n is a, c, g, or t
  misc_feature (71)..(71): n is a, c, g, or t
  misc_feature (79)..(79): n is a, c, g, or t
  misc_feature (96)..(98): n is a, c, g, or t
  misc_feature (103)..(103): n is a, c, g, or t
  misc_feature (129)..(129): n is a, c, g, or t
  misc_feature (132)..(133): n is a, c, g, or t
  misc_feature (135)..(135): n is a, c, g, or t
  misc_feature (205)..(206): n is a, c, g, or t
  misc_feature (237)..(237): n is a, c, g, or t
  misc_feature (435)..(435): n is a, c, g, or t
  misc_feature (449)..(449): n is a, c, g, or t
  misc_feature (673)..(673): n is a, c, g, or t
  misc_feature (785)..(785): n is a, c, g, or t
  misc_feature (932)..(932): n is a, c, g, or t
  misc_feature (1253)..(1253): n is a, c, g, or t
  misc_feature (1283)..(1283): n is a, c, g, or t
  misc_feature (1350)..(1350): n is a, c, g, or t
  misc_feature (1352)..(1352): n is a, c, g, or t
  Peptide Sequence Number=SeqID_8085
  Probeset Number=SeqID_9935
ggggggggggggggngnngggaggggtggtggtggattattcccgcgagagcagcgcgcggcgcagcccgncgcaagcnacgcggcgccgaccaannnccaanttacatcgtatgaggctaaacaatanganntntgggttcgggcggtgtgctcgcgtcacccggccggcttcttctatagtaattgcggtagggtgagcgagnngacctgtgtgaggtgtgaggcgcggtgcgcncccacatacgagcacgggcgtcgtatgagtttctactgcggggatcggtgcgtggtgtatggtgagaagaaacagacgagggaggagtggatcgtcacacaatgatgaaagacagacgagaaattgacacagtgtggattcaaataaaaggagttgatggagtttgttgagctcgtggcgtggggtgtggccgagganagatgctgggggtngattggtgtcgtgcgtggtgatggaccttgatgcgtatgtagtcggtgccgcgactgatggacgcgtcgctgttatggttgttgtgtgtttttattcttcatatattgtctgccatcatcatctacttatatagattatcttttcctacaccgtcttacacggacggggcagtgttgtcaacagtgataaccacacacttataaataataaagaggagttatantagtatatcacgatagttatacttggttgtgcccctcgtggctgtgtgtgcaccttaccttgctattatgtagtcgcgtgtgtgattctatcttccctcctgtctagtaatngatggaattagtgacgtggagctacctacagaggagggacgcgtcacggatccacctccgcccgcacttcttattactaatcgcgctttagtagagcctcgcgtcacaccagatctggtgtaattcggcgatgtgtgtggttgattngatgtgtatatatacaatggttgtgtagttggagagagtaacgtgaagaacaccacacaccacacagattatattatcaatagtcggacgcggccacagcgctagtactctgatatgactgtcgctgcgcggcgcgagtcgatggtttggctcgtttagtctcacacacacactcctcgcatagtatgtgaacactggtgcgtgggacactctctgctatataactctagcgagtgtatataatccatcatgcaaatacgatcactgctcgacggcgtccacacaaatactcacgcagtgacgacacaacacacacacacnactagcggcgctcattatcatgtatgatcnacttcgatcttaacatactatatgatgatcgagttagtagccactctgtccatatatgatggtgtgngnatg

SEQ ID NO: 157 - DNA, 415 bp, Glycine max
  misc_feature (54)..(54): n is a, c, g, or t
  Peptide Sequence Number=SeqID_8872
  Probeset Number=SeqID_9936
atcccaagcaagagagctttcgtttcaatcaaaaactatggcaacgagaaggantttaaaagaactgagggagttgcaaagagaccctcctatgtcatgcagtgcaggtccagtaggagaagacatgtttcactggcaagctacaataatgggtcctaacgaaagtccatacacgggaggtgttttccttgtcactatcaatttctcgcaagattatcctttcaaacctcccaaggttgtattcaaaaccaaagtgtttcaccctaacatcaacagcaacgggaacatctgtttggacattctcaaagaccagtggagcccttgctgtggtgtgggtgaattccgatactagttgaggaggagcttctaagattagcaaaagcttgctgcaaaataaatatcctttttgtctcta

SEQ ID NO: 158 - DNA, 507 bp, Glycine max
  misc_feature (352)..(352): n is a, c, g, or t
  misc_feature (387)..(387): n is a, c, g, or t
  misc_feature (404)..(404): n is a, c, g, or t
  misc_feature (411)..(411): n is a, c, g, or t
  misc_feature (420)..(420): n is a, c, g, or t
  misc_feature (428)..(428): n is a, c, g, or t
  misc_feature (445)..(445): n is a, c, g, or t
  misc_feature (447)..(447): n is a, c, g, or t
  misc_feature (450)..(450): n is a, c, g, or t
  misc_feature (452)..(452): n is a, c, g, or t
  misc_feature (460)..(460): n is a, c, g, or t
  misc_feature (469)..(469): n is a, c, g, or t
  misc_feature (472)..(472): n is a, c, g, or t
  misc_feature (493)..(494): n is a, c, g, or t
  misc_feature (498)..(501): n is a, c, g, or t
  misc_feature (503)..(503): n is a, c, g, or t
  Peptide Sequence Number=SeqID_8873
  Probeset Number=SeqID_9937
agtaaagaataattggtgtttgatcaaccatctttttaatattcaatttcaacaacaataaacaatgtctagtgctagaatcgtaggtttgggctccttgttggccaaaagaaatgcctcttatgctttcgtgagtgctggtcgcttgcgctccggtggcaagcctgatacctccacctttgatgagaaggagaaggctcaagagaacatgtttgtgagaaagcatgaggaggaggaaatgaagaagagaaccgaggaggctgaaagaaaagccagagaggaggccaaaaagaaccaaaagaaataaataatgtacaaaataaatcgcttataaaatgtacaaacacaaatnaatgtacaaacgcaaataaaagtgatacacgtgtnttttaatctcaaaaaanaaaaaanaaatgaatncctgcagnccgtgggatccactagntntananctccggcntcgcggagngcnccagctttagtccctttagtnngggnnnntngcgg

SEQ ID NO: 159 - DNA, 1786 bp, Glycine max
  misc_feature (16)..(16): n is a, c, g, or t
  misc_feature (53)..(53): n is a, c, g, or t
  misc_feature (86)..(87): n is a, c, g, or t
  misc_feature (165)..(165): n is a, c, g, or t
  misc_feature (249)..(249): n is a, c, g, or t
  misc_feature (356)..(356): n is a, c, g, or t
  misc_feature (450)..(450): n is a, c, g, or t
  misc_feature (482)..(482): n is a, c, g, or t
  misc_feature (498)..(498): n is a, c, g, or t
  misc_feature (515)..(515): n is a, c, g, or t
  misc_feature (541)..(541): n is a, c, g, or t
  misc_feature (796)..(796): n is a, c, g, or t
  misc_feature (887)..(887): n is a, c, g, or t
  misc_feature (1068)..(1068): n is a, c, g, or t
  misc_feature (1183)..(1183): n is a, c, g, or t
  misc_feature (1207)..(1207): n is a, c, g, or t
  misc_feature (1270)..(1270): n is a, c, g, or t
  misc_feature (1386)..(1386): n is a, c, g, or t
  misc_feature (1461)..(1461): n is a, c, g, or t
  misc_feature (1472)..(1472): n is a, c, g, or t
  misc_feature (1482)..(1482): n is a, c, g, or t
  misc_feature (1548)..(1548): n is a, c, g, or t
  misc_feature (1608)..(1608): n is a, c, g, or t
  misc_feature (1641)..(1641): n is a, c, g, or t
  misc_feature (1712)..(1712): n is a, c, g, or t
  misc_feature (1728)..(1728): n is a, c, g, or t
  misc_feature (1747)..(1747): n is a, c, g, or t
  Probeset Number=SeqID_9938
ccgcccccccgcgctngtcgtccctcggcgctcgtcgtgttgtagagtgtgtnggtgtgtcatgggtggctctccttaatctcgtnnaagaagagagagagagagagaggagagcacaacgatgagagtgtagtgcgcgataggtgcgccgtggacacgccacgncatctgtatgattagtacggtgtctatagagtgcttctccttatgtcgtctgtcatacaacagcatcctcaacgcagcagcctnccacctcgcggcatccgcaactatgatcgcttgtctcggctatatatatgcatgctctatttagtcgtctactagtcatatacagcacgggtctcttattcaatgtngaagaaatgtacacagatctgtacgagatatgagacactataccacgagaactctacgacgatcacgagagcgaccgttccgcggcggtcgctnccgccatgagttaccgctgtacgtcacgagcncgtcgtataattatanactcatcgtgctatatntgtataatagaggctgactcactctnctctgatgcgctagtatacaacgatcaaatacacggcgtacagcgtgctagagacgaagagcacagcaccatacagctcgcctgacgagtctcgtcgtgcgacatcagctgagatatcaggctcgatccgcccgactgcttgtgtggtcgaagcgtgcgccctctagcgctagagccttgttgctcgccacactggacgcgcaccctactcctcacctcttatctccgcctactgatcatccgcactctgccccngtgccttcgttgtctcgcgcgcgctcacgtgtgtcgcatgcgcgtgtgagtcgtcgtagttgcggtatactcgtctagtatagacgacacnatgcgccgatacgcgatcacatggtgtggcatcaagtatcactactatagccacgacggcatgtgtatgatctctacaccacctcccatcgcatgacctcactgacttcacggacacatgattcccggctggagccatcttctcgacatcgaccactcgcgagtcgcctgtgctacgtcgnacatctctaccgacggactttatgagattgacggtagtgttatgtgcgagatgcgctgctgcgcgagtcactactgacaacgtcacatcatcaacgacgcttcgtatgcagcagntcagctgcagtctgtctcttgtgntgtatgtgatctgatctgtctgcgcgcgtgttaggcgacgtcggagctgtcgcatcgctgtgngtccaatcttgtgcgctgggacaagatgtctatatgtatctgtctgatctgacgatgacgactgcgcatcgccgacgaggtcgaacacgtcgtatcacgcacgtgatccgagcgtncagaagcgacgtccactatcgtgccatcacctgctccgtcgcatgtcaccacgcatactgatagcacgagtgccngggcaccgccncgctgtgagnctacgcacgtgcatgtaccgacagcgctgcgctcggctcgctactatatgcatcattgagtatgcngtgactgtacgtcattacacggacaacgtaggcggtactgaccgtgtcgctcgctgaganatcgacgatcgatgtatgtgacagcgtctgtanagatgcagctagacgtgtcagcggtaagcaatcgatcgtgctacagtcgatagtctagatagtctgcacgntcgtcgacgagcagcngactgacgtcgcgcgtacnactgatgacacgcgcgtgcaagacgagataagagagaca

SEQ ID NO: 160 - DNA, 1887 bp, Glycine max
  misc_feature (1)..(1): n is a, c, g, or t
  misc_feature (11)..(13): n is a, c, g, or t
  misc_feature (33)..(33): n is a, c, g, or t
  misc_feature (60)..(60): n is a, c, g, or t
  misc_feature (68)..(68): n is a, c, g, or t
  misc_feature (71)..(71): n is a, c, g, or t
  misc_feature (76)..(76): n is a, c, g, or t
  misc_feature (78)..(78): n is a, c, g, or t
  misc_feature (109)..(109): n is a, c, g, or t
  misc_feature (145)..(146): n is a, c, g, or t
  misc_feature (260)..(260): n is a, c, g, or t
  misc_feature (271)..(271): n is a, c, g, or t
  misc_feature (315)..(315): n is a, c, g, or t
  misc_feature (356)..(356): n is a, c, g, or t
  misc_feature (381)..(381): n is a, c, g, or t
  misc_feature (427)..(427): n is a, c, g, or t
  misc_feature (440)..(440): n is a, c, g, or t
  misc_feature (481)..(481): n is a, c, g, or t
  misc_feature (512)..(512): n is a, c, g, or t
  misc_feature (521)..(521): n is a, c, g, or t
  misc_feature (526)..(526): n is a, c, g, or t
  misc_feature (537)..(537): n is a, c, g, or t
  misc_feature (608)..(608): n is a, c, g, or t
  misc_feature (651)..(651): n is a, c, g, or t
  misc_feature (695)..(695): n is a, c, g, or t
  misc_feature (760)..(760): n is a, c, g, or t
  misc_feature (811)..(811): n is a, c, g, or t
  misc_feature (838)..(838): n is a, c, g, or t
  misc_feature (937)..(937): n is a, c, g, or t
  misc_feature (1025)..(1025): n is a, c, g, or t
  misc_feature (1029)..(1029): n is a, c, g, or t
  misc_feature (1057)..(1057): n is a, c, g, or t
  misc_feature (1185)..(1185): n is a, c, g, or t
  misc_feature (1263)..(1263): n is a, c, g, or t
  misc_feature (1269)..(1269): n is a, c, g, or t
  misc_feature (1280)..(1280): n is a, c, g, or t
  misc_feature (1317)..(1317): n is a, c, g, or t
  misc_feature (1344)..(1344): n is a, c, g, or t
  misc_feature (1378)..(1378): n is a, c, g, or t
  misc_feature (1446)..(1446): n is a, c, g, or t
  misc_feature (1453)..(1453): n is a, c, g, or t
  misc_feature (1456)..(1456): n is a, c, g, or t
  misc_feature (1467)..(1467): n is a, c, g, or t
  misc_feature (1471)..(1471): n is a, c, g, or t
  misc_feature (1521)..(1521): n is a, c, g, or t
  misc_feature (1562)..(1562): n is a, c, g, or t
  misc_feature (1567)..(1567): n is a, c, g, or t
  misc_feature (1587)..(1587): n is a, c, g, or t
  misc_feature (1661)..(1661): n is a, c, g, or t
  misc_feature (1713)..(1713): n is a, c, g, or t
  misc_feature (1718)..(1718): n is a, c, g, or t
  misc_feature (1726)..(1726): n is a, c, g, or t
  misc_feature (1768)..(1768): n is a, c, g, or t
  misc_feature (1774)..(1774): n is a, c, g, or t
  misc_feature (1821)..(1821): n is a, c, g, or t
  misc_feature (1848)..(1848): n is a, c, g, or t
  misc_feature (1876)..(1876): n is a, c, g, or t
  misc_feature (1882)..(1882): n is a, c, g, or t
  misc_feature (1887)..(1887): n is a, c, g, or t
  Peptide Sequence Number=SeqID_8944
  Probeset Number=SeqID_9939
ntttctacctnnnaatcttctcccgcaccatancatacaactactagtactgacaacatnggcctccncgnccacncncatcgttaatttgagtacgtacccgagcagncacaccctcacttcctgaagcctcatgtcttaacgnntaagagtctctcccctcccctcacaaatacaatcaatcatcactcttggcatgtataaggacttctcagttcagcgcctaggatctgcgagcaaattgcatgtcgtcatgtatnagagacactgncgaaccactaattagtatatactcccgtgggcatagcctagacncatcgcgtacgccatcacgcataatgcgtgattctcgagtnttctcacacctcgaacttgccgctnagcgaaatagataacaataattgatggatattgtcatatacacatncatggcatcttgnactcgcagtgtaatttagccgtatacatcgtgcacataatncataacgcaatgaatctgtctattcactccngcgaccctngtccntacgcgttganatgacccccacttgccctatcaatgatattgtatagaactcatcgtaacgcatcgttgcactactgcctcnctatcacaaagtccactgcgtatactttacgtgtacgtcgcantactcactacgtagcatataccttgttctacactaacagtacanttcgaacgaatacacagcctaacacccttctccgatatcgaaattctccctatattaatgtgaanaatatatctcgtccttaattgcagacgttacgcactggcgtatcgacaccntactcgttatccaatacctctcccctnctctgtgtacttatctgtccttgcacatagtatacacttgcacgcgtcatttccactcaattgggtcgaataattcctcaactacgtcgacccgccccnaattcatagttcttggtgagactcttactcacatactaggtgcaacagacctcattactacttctgaatatgtcgtccatagtcaatnctcntacaccgtaacacacagtgcccttcatnttgcttgttgcactctgtatctattacttagcatcaagactgcgaatacgtggttagtaaactctgatgatactacactctgctgtgccgctctctctctgatctgtattgctggttttacacacctnactcctatcgggtatgtccattacacaaagagaagtgtggtgacattattatttgatgtctataatatacacaaccgncactantcctgtcgtgnactcgtgtcgacctattcttctagcgcacacatacgnactttcgagtttgaactcttgatctanagctcgcctctcatacatttactgtatgacaccnactagcgccgcacaatatagtggtatagtgatgttattacgatatctgcacgcctgtgtgaatgtganccgctancancaaatatgtgngttngacagcgtgtcactgtgaatattcgttcaactggagcatatcacctgggnctcttctatcatctaaatgatgcacatgtatcatacactcngtttntgaaatactctctcccactncatgcgcaactagaactgagtgtgccgatcataaatatatattatgccgcgttcatcaatcgctgcgcagtctnatttagtgatactcttgcgatacgaacaacatagacagacaaatatgtcttnattanctacatgntctcatatgtgtcgtcatcccactatgatgatcgcaactacnacgtgntactgctcgtctactagaagatcatatcgagctacttaaacatcgtngtaaacatcctgtatactatcgtgtcntatgtagctactgtctataatcgacgantacacnactan

SEQ ID NO: 161 - DNA, 530 bp, Glycine max
  misc_feature (498)..(498): n is a, c, g, or t
  misc_feature (514)..(514): n is a, c, g, or t
  misc_feature (524)..(524): n is a, c, g, or t
  Probeset Number=SeqID_9940
tcgagcagctacgtaggcccccccccctttttttattatttgcaaataatgttcagggtttgtgacgtgagacgtttgagatcattgccccctctcttttctagaatgttctcttcggagcctgttcttacacaagagaccatcaaccagcatgtggtgaaggccgaatatgctgttcgtggagagctcgtattacttgctaacaagcaccagaaaaccatgcagcaaaatcctaatcactctctccctttcaaagagatcatttattgcaatattggaaatccacaaatcctaggacagaaacctctcacttttttccgccaggtcaccgcgtgctgtgaatatcctgctcttttggatcttcctaatgtgatgccagaagatgtgaaagagagagctaagaaattactcgcctctatgggaaatagcactggagcttatagcagcagccagggagttcctattgttcttaataacgttgctaaattcatcgaaganagagatggacatccancaaatgcagnaagata

SEQ ID NO: 162 - DNA, 2007 bp, Glycine max
  misc_feature (78)..(78): n is a, c, g, or t
  misc_feature (329)..(329): n is a, c, g, or t
  misc_feature (490)..(490): n is a, c, g, or t
  misc_feature (576)..(576): n is a, c, g, or t
  misc_feature (591)..(591): n is a, c, g, or t
  misc_feature (668)..(668): n is a, c, g, or t
  misc_feature (718)..(718): n is a, c, g, or t
  misc_feature (730)..(730): n is a, c, g, or t
  misc_feature (742)..(742): n is a, c, g, or t
  misc_feature (932)..(932): n is a, c, g, or t
  misc_feature (1122)..(1122): n is a, c, g, or t
  misc_feature (1131)..(1131): n is a, c, g, or t
  misc_feature (1146)..(1146): n is a, c, g, or t
  misc_feature (1182)..(1182): n is a, c, g, or t
  misc_feature (1378)..(1378): n is a, c, g, or t
  misc_feature (1384)..(1384): n is a, c, g, or t
  misc_feature (1391)..(1391): n is a, c, g, or t
  misc_feature (1398)..(1398): n is a, c, g, or t
  misc_feature (1400)..(1400): n is a, c, g, or t
  misc_feature (1440)..(1440): n is a, c, g, or t
  misc_feature (1498)..(1498): n is a, c, g, or t
  misc_feature (1528)..(1528): n is a, c, g, or t
  misc_feature (1547)..(1547): n is a, c, g, or t
  misc_feature (1549)..(1549): n is a, c, g, or t
  misc_feature (1606)..(1606): n is a, c, g, or t
  misc_feature (1627)..(1627): n is a, c, g, or t
  misc_feature (1673)..(1673): n is a, c, g, or t
  misc_feature (1700)..(1700): n is a, c, g, or t
  misc_feature (1762)..(1762): n is a, c, g, or t
  misc_feature (1765)..(1765): n is a, c, g, or t
  misc_feature (1767)..(1768): n is a, c, g, or t
  misc_feature (1781)..(1781): n is a, c, g, or t
  misc_feature (1885)..(1885): n is a, c, g, or t
  misc_feature (1889)..(1889): n is a, c, g, or t
  misc_feature (1914)..(1914): n is a, c, g, or t
  misc_feature (1946)..(1946): n is a, c, g, or t
  misc_feature (1987)..(1987): n is a, c, g, or t
  misc_feature (1999)..(1999): n is a, c, g, or t
  misc_feature (2001)..(2001): n is a, c, g, or t
  misc_feature (2007)..(2007): n is a, c, g, or t
  Peptide Sequence Number=SeqID_8945
  Probeset Number=SeqID_9941
tatgtgtgggtagggctcatgtgatccagatacagtatatagcgaccgcgtcgaatttgtgtccgcgccgcgtttttncctatgttcgctctctcttgtcgctgtgcgttggtgcgagacagcgtgtcggtggctgtcgtatgatacgcagaacgatgattatatattgtatgctggtgaagagcgcagcaaagtgattagtgtgtgaataatatacatgtgtgtatgcgagcgagctggctacatccacacgatcacataaccttctacttacacaccaccacgcaccgattcgcacgccatcgaagtcatacgtcgcaccaatattntatatcgcccctgctcgtgatagatctgataatcgacgagaagactcgcgcgtgcgcgcgtcctcacacatccgcctatacattctctatataatatattcggcctatcaacgccgccatattattatattgtatataatttccggcgcggttgatgatgntatctgcgtgttatcactagtcgcgccgcgacgtgattatcacatcggcggcgcgcggtgggtgatgcgacacagcgcgacgatcncatgaactatataanatatacttatcatcatataccaccttccacgctttatttataagctcgtctcctacggcgcgagacgcaacgtgctnggctgacgcgatgatcaagatatacatacactcattcatcatgcgagtangccagtatccangttgtgatctgnacgacgacgcgcgtacgttatcctatcttctgtgttctcacgctgcggtctatatatatttgcgcgacgccgatctacgataacacactcgtcagcggacacgcgcgaatataacatacatgacgagtggtgcggcgcgaggatgtatatataaaaagagcggcgcggtatatactggagacagacgacngcgcggtcgttctctgcatagcatcagctgtgtgtctatactatatataagcacaccacacatacgcgcgtgtgcgtgttctgacgctcgtttcctctactatctatatgcactgagaagtttgctgtatacaatgctcgacacgtgacagtattgttatatagaccacaacaacacccgacgcgcggangctctcgcngttgcgctagcacancgcgtgtcttctgttacgccaacacgacacttcatntgtacacaatacctaatgaacttgtattatactcgattctagtatcatagaataacataggtgcgagagtgcgtgctattcatatctgcgacagtaacatatacggctacgcgtccacagtgagcgagatgtggtggagtgtgtgcagagcgtacactctacgatacaccgcacgtcacgtgctgtgacgtggagngcatgncgcgtanatgtctntngtaatatatatatataatcccgcgcgcgcgctggcataanatatattagcgactcgacgatcgtgcgcggcgttgacgtacagcggcgtatgtcgaantactagtgcatgcgcgactagccgctgcgncgtcgcgcgcgacgaacanancgaaatcaccaagctatcacgacagtgcgtatgtgaattacaacagacgaaagcgcntagcgtctgcctgtgctcacncggttagctcaggctcgctaatcacaaaaatataggcgtgagtcgngtctgcgtgcgcgacgactagctaatncgtatgattaactagcactacagacgtattactcgtatcgctggcgtgcgcgtgtatatagncgncnncgatatattaaangatgagcgatgcgtgcatatatatacgcatactgcgtcgcggcgccgtgtgtctaaactatatgatatcagttgcatatctgccgcgcgacgcgcgcccgacgncgcngctcgtagtatatcgcaatgttacntgtagctaccgactatactactctgatcgtcnctcagagcggatcattaaacacacacctacatagtcgtcgnatcgacgacgancnctatcn

SEQ ID NO: 163 - DNA, 343 bp, Glycine max
  Probeset Number=SeqID_9942
agtgcatgtgtcctccttacggttctagaatcagctctggaaccagatccgttgaggttcatagcatagtctgggtcaggtgttagcctttccagcactgtctttggtttggagctctcgacactctatcgtattgctccagtcatgttggccggaattctacggcttttggcttgcttcagtatcctgtcagtgtctcttagcactctccttgattgcacgagtgagagtaggtatgggcttgcttcagttgttaagtatcaggttaagtatgcagctggtgtgttctatgatgcgcttgccttcatgtgaccggttcatcgtcttcatggcatgttggtat

SEQ ID NO: 164 - DNA, 617 bp, Glycine max
  misc_feature (156)..(156): n is a, c, g, or t
  misc_feature (201)..(201): n is a, c, g, or t
  Peptide Sequence Number=SeqID_8946
  Probeset Number=SeqID_9943
atcgtatttctgtctctgccaatgcgaaaggaacgctaattaaaaatatagaaataaacacacacaaaacaataacccataaacccagcgacgaggttttctatgttattttagaagaaaatagaaccaagagagatctcacaagaagaaacaggnaaaatcacacacacaaatatagcaagaacagtctttgagagattnggacaaaggtcaagtggccattttcattttttttctctcattgggcagttttctggtcaggatttgagttggccttggaaaaacaaatatgttgcataatttggactgtttgtccgccccggtttccgaaatttactttccattagggggaaatttaccccccaggggggattcttttccccccaaaatttttaaaaaggaattctgtaaccctctcccgggggacaccaaacaaaaaaaatttggttccctttttttcaaaattttttccctttaaaaggggtgttggaattcccccctttggggggccaaaaaaatttaaaatgttgcccgcccccccaaaaaaaaaaaaaattttggcggaggggccaaaaaccaaaacaaaggaacttctcgaaaaaaaagccccccttttt

SEQ ID NO: 165 - DNA, 2313 bp, Glycine max
  misc_feature (4)..(4): n is a, c, g, or t
  misc_feature (11)..(13): n is a, c, g, or t
  misc_feature (16)..(16): n is a, c, g, or t
  misc_feature (25)..(25): n is a, c, g, or t
  misc_feature (41)..(41): n is a, c, g, or t
  misc_feature (49)..(49): n is a, c, g, or t
  misc_feature (51)..(53): n is a, c, g, or t
  misc_feature (58)..(58): n is a, c, g, or t
  misc_feature (63)..(63): n is a, c, g, or t
  misc_feature (65)..(67): n is a, c, g, or t
  misc_feature (72)..(72): n is a, c, g, or t
  misc_feature (79)..(79): n is a, c, g, or t
  misc_feature (82)..(82): n is a, c, g, or t
  misc_feature (85)..(85): n is a, c, g, or t
  misc_feature (87)..(87): n is a, c, g, or t
  misc_feature (92)..(95): n is a, c, g, or t
  misc_feature (98)..(98): n is a, c, g, or t
  misc_feature (103)..(106): n is a, c, g, or t
  misc_feature (116)..(119): n is a, c, g, or t
  misc_feature (126)..(127): n is a, c, g, or t
  misc_feature (130)..(131): n is a, c, g, or t
  misc_feature (138)..(138): n is a, c, g, or t
  misc_feature (149)..(155): n is a, c, g, or t
  misc_feature (157)..(157): n is a, c, g, or t
  misc_feature (160)..(160): n is a, c, g, or t
  misc_feature (167)..(167): n is a, c, g, or t
  misc_feature (176)..(178): n is a, c, g, or t
  misc_feature (181)..(181): n is a, c, g, or t
  misc_feature (184)..(184): n is a, c, g, or t
  misc_feature (193)..(193): n is a, c, g, or t
  misc_feature (197)..(197): n is a, c, g, or t
  misc_feature (200)..(200): n is a, c, g, or t
  misc_feature (203)..(204): n is a, c, g, or t
  misc_feature (211)..(211): n is a, c, g, or t
  misc_feature (214)..(215): n is a, c, g, or t
  misc_feature (222)..(225): n is a, c, g, or t
  misc_feature (228)..(228): n is a, c, g, or t
  misc_feature (233)..(233): n is a, c, g, or t
  misc_feature (237)..(239): n is a, c, g, or t
  misc_feature (242)..(246): n is a, c, g, or t
  misc_feature (255)..(256): n is a, c, g, or t
  misc_feature (259)..(259): n is a, c, g, or t
  misc_feature (262)..(262): n is a, c, g, or t
  misc_feature (277)..(277): n is a, c, g, or t
  misc_feature (284)..(284): n is a, c, g, or t
  misc_feature (288)..(291): n is a, c, g, or t
  misc_feature (305)..(306): n is a, c, g, or t
  misc_feature (309)..(311): n is a, c, g, or t
  misc_feature (327)..(327): n is a, c, g, or t
  misc_feature (331)..(331): n is a, c, g, or t
  misc_feature (334)..(334): n is a, c, g, or t
  misc_feature (337)..(340): n is a, c, g, or t
  misc_feature (343)..(343): n is a, c, g, or t
  misc_feature (348)..(351): n is a, c, g, or t
  misc_feature (359)..(359): n is a, c, g, or t
  misc_feature (366)..(371): n is a, c, g, or t
  misc_feature (377)..(378): n is a, c, g, or t
  misc_feature (381)..(381): n is a, c, g, or t
  misc_feature (397)..(398): n is a, c, g, or t
  misc_feature (404)..(404): n is a, c, g, or t
  misc_feature (406)..(409): n is a, c, g, or t
  misc_feature (418)..(423): n is a, c, g, or t
  misc_feature (426)..(429): n is a, c, g, or t
  misc_feature (432)..(435): n is a, c, g, or t
  misc_feature (444)..(444): n is a, c, g, or t
  misc_feature (462)..(467): n is a, c, g, or t
  misc_feature (474)..(476): n is a, c, g, or t
  misc_feature (489)..(489): n is a, c, g, or t
  misc_feature (495)..(496): n is a, c, g, or t
  misc_feature (503)..(504): n is a, c, g, or t
  misc_feature (507)..(507): n is a, c, g, or t
  misc_feature (513)..(516): n is a, c, g, or t
  misc_feature (525)..(529): n is a, c, g, or t
  misc_feature (534)..(535): n is a, c, g, or t
  misc_feature (540)..(541): n is a, c, g, or t
  misc_feature (562)..(562): n is a, c, g, or t
  misc_feature (570)..(571): n is a, c, g, or t
  misc_feature (581)..(581): n is a, c, g, or t
  misc_feature (600)..(602): n is a, c, g, or t
  misc_feature (625)..(628): n is a, c, g, or t
  misc_feature (652)..(652): n is a, c, g, or t
  misc_feature (671)..(671): n is a, c, g, or t
  misc_feature (700)..(700): n is a, c, g, or t
  misc_feature (743)..(743): n is a, c, g, or t
  misc_feature (747)..(747): n is a, c, g, or t
  misc_feature (750)..(751): n is a, c, g, or t
  misc_feature (756)..(756): n is a, c, g, or t
  misc_feature (760)..(760): n is a, c, g, or t
  misc_feature (767)..(767): n is a, c, g, or t
  misc_feature (781)..(783): n is a, c, g, or t
  misc_feature (793)..(793): n is a, c, g, or t
  misc_feature (810)..(810): n is a, c, g, or t
  misc_feature (813)..(813): n is a, c, g, or t
  misc_feature (818)..(818): n is a, c, g, or t
  misc_feature (853)..(853): n is a, c, g, or t
  misc_feature (865)..(865): n is a, c, g, or t
  misc_feature (882)..(882): n is a, c, g, or t
  misc_feature (897)..(897): n is a, c, g, or t
  misc_feature (906)..(906): n is a, c, g, or t
  misc_feature (915)..(915): n is a, c, g, or t
  misc_feature (921)..(925): n is a, c, g, or t
  misc_feature (937)..(937): n is a, c, g, or t
  misc_feature (940)..(940): n is a, c, g, or t
  misc_feature (946)..(948): n is a, c, g, or t
  misc_feature (952)..(954): n is a, c, g, or t
  misc_feature (960)..(961): n is a, c, g, or t
  misc_feature (967)..(967): n is a, c, g, or t
  misc_feature (973)..(974): n is a, c, g, or t
  misc_feature (977)..(977): n is a, c, g, or t
  misc_feature (981)..(981): n is a, c, g, or t
  misc_feature (988)..(988): n is a, c, g, or t
  misc_feature (990)..(992): n is a, c, g, or t
  misc_feature (996)..(996): n is a, c, g, or t
  misc_feature (1021)..(1021): n is a, c, g, or t
  misc_feature (1027)..(1029): n is a, c, g, or t
  misc_feature (1033)..(1033): n is a, c, g, or t
  misc_feature (1049)..(1049): n is a, c, g, or t
  misc_feature (1066)..(1066): n is a, c, g, or t
  misc_feature (1097)..(1098): n is a, c, g, or t
  misc_feature (1108)..(1108): n is a, c, g, or t
  misc_feature (1118)..(1118): n is a, c, g, or t
  misc_feature (1150)..(1151): n is a, c, g, or t
  misc_feature (1163)..(1166): n is a, c, g, or t
  misc_feature (1200)..(1201): n is a, c, g, or t
  misc_feature (1208)..(1212): n is a, c, g, or t
  misc_feature (1242)..(1242): n is a, c, g, or t
  misc_feature (1257)..(1257): n is a, c, g, or t
  misc_feature (1262)..(1262): n is a, c, g, or t
  misc_feature (1270)..(1271): n is a, c, g, or t
  misc_feature (1299)..(1299): n is a, c, g, or t
  misc_feature (1314)..(1315): n is a, c, g, or t
  misc_feature (1329)..(1330): n is a, c, g, or t
  misc_feature (1351)..(1351): n is a, c, g, or t
  misc_feature (1371)..(1371): n is a, c, g, or t
  misc_feature (1387)..(1388): n is a, c, g, or t
  misc_feature (1426)..(1426): n is a, c, g, or t
  misc_feature (1438)..(1440): n is a, c, g, or t
  misc_feature (1453)..(1453): n is a, c, g, or t
  misc_feature (1460)..(1460): n is a, c, g, or t
  misc_feature (1491)..(1491): n is a, c, g, or t
  misc_feature (1497)..(1497): n is a, c, g, or t
  misc_feature (1511)..(1511): n is a, c, g, or t
  misc_feature (1546)..(1546): n is a, c, g, or t
  misc_feature (1562)..(1563): n is a, c, g, or t
  misc_feature (1569)..(1569): n is a, c, g, or t
  misc_feature (1575)..(1575): n is a, c, g, or t
  misc_feature (1604)..(1604): n is a, c, g, or t
  misc_feature (1608)..(1609): n is a, c, g, or t
  misc_feature (1613)..(1613): n is a, c, g, or t
  misc_feature (1616)..(1616): n is a, c, g, or t
  misc_feature (1619)..(1622): n is a, c, g, or t
  misc_feature (1630)..(1630): n is a, c, g, or t
  misc_feature (1637)..(1638): n is a, c, g, or t
  misc_feature (1641)..(1641): n is a, c, g, or t
  misc_feature (1653)..(1658): n is a, c, g, or t
  misc_feature (1675)..(1675): n is a, c, g, or t
  misc_feature (1680)..(1680): n is a, c, g, or t
  misc_feature (1687)..(1687): n is a, c, g, or t
  misc_feature (1690)..(1691): n is a, c, g, or t
  misc_feature (1701)..(1701): n is a, c, g, or t
  misc_feature (1723)..(1723): n is a, c, g, or t
  misc_feature (1727)..(1728): n is a, c, g, or t
  misc_feature (1733)..(1736): n is a, c, g, or t
  misc_feature (1739)..(1739): n is a, c, g, or t
  misc_feature (1744)..(1744): n is a, c, g, or t
  misc_feature (1789)..(1789): n is a, c, g, or t
  misc_feature (1795)..(1796): n is a, c, g, or t
  misc_feature (1806)..(1807): n is a, c, g, or t
  misc_feature (1815)..(1815): n is a, c, g, or t
  misc_feature (1839)..(1839): n is a, c, g, or t
  misc_feature (1856)..(1857): n is a, c, g, or t
  misc_feature (1900)..(1900): n is a, c, g, or t
  misc_feature (1910)..(1911): n is a, c, g, or t
  misc_feature (1966)..(1966): n is a, c, g, or t
  misc_feature (1984)..(1984): n is a, c, g, or t
  misc_feature (2006)..(2006): n is a, c, g, or t
  misc_feature (2039)..(2039): n is a, c, g, or t
  misc_feature (2092)..(2092): n is a, c, g, or t
  misc_feature (2098)..(2098): n is a, c, g, or t
  misc_feature (2115)..(2115): n is a, c, g, or t
  misc_feature (2135)..(2135): n is a, c, g, or t
  misc_feature (2139)..(2139): n is a, c, g, or t
  misc_feature (2141)..(2141): n is a, c, g, or t
  misc_feature (2144)..(2149): n is a, c, g, or t
  misc_feature (2169)..(2169): n is a, c, g, or t
  misc_feature (2184)..(2184): n is a, c, g, or t
  misc_feature (2292)..(2292): n is a, c, g, or t
  Probeset Number=SeqID_9944
ccgnccccttnnncgngctgcgctnctctctggcactgctngcccgagngnnnctgtncgcgngnnncgcgncggccgncgncgngnctcgnnnncgncactnnnncgcgcgcggnnnncgcgcanncanncgacggncgcgcgcgcgnnnnnnncncgnccggcgncgccttgtnnncgncgncgcatcctngcgnctncgnncgcgcgncgnncgcgcgnnnncgncgcgncggnnncgnnnnnctctctcgnncgncgncgccggcgcgcgtgncgtctgngctnnnncgccgcatccgcgnncgnnnctcgcgcgccgtccgngcgncgncgnnnncgncgcgnnnnccgcgcgncgcgcgnnnnnncgcgcnncgnccgcgctcgctcgcgnncgccgncnnnncgcgggcgnnnnnncgnnnncgnnnncgcgctcgncgccgcgcgcgcgcgctnnnnnncgcgcgnnnccgcgcgcgccgnccgctnncgcgcgnnctncttcgnnnncgccgccgnnnnncacgnncgcgnncggcccgtccgccgccggcgnacgccggnncgcgccgcgnccggcgtcctctcggccgnnncgcgcgcgctcgcgcgcgcgcgnnnncgggcgcgcgcggcgcggcctcgncggcgcgccgccgctccgncgcgacgcgccgcgccgcgcgcggcgcgncggcgtgcgcggccccagcgcgcgcgccgcgcgcgccgtcgcnccgncgnnctcgnccgncgcgcgngcgcactgcgcggnnnctccgctccngcggcgctcgcgcgctnctnccganctcgcactcgcgcggctgctcgccacgctcgcctncgctcgcgccgnctcgctcggcgcgccgncgcgcgtccgcgcgnccgccgctncgcgcgcgnctgcgnnnnnccgcgccgcgancgncgcgcnnnccgnnnccgcgnncgccgnccgcgnncgnccgncgcgcanannnccgncgcgcgcgccgcgcgcgcgcgcgtnccgcgnnnccgncaccggcgcggcgctncgccgcgcgcgtcgcgncgcgcctcgctctgcggcgccgcgtcgcgtnncggccgcggncgcgccgcgngcggctcgcgtcgcgcgccgcgcgcgcgtcgnncgcgcgcgcggnnnncgcgcgcggccgccgcctactcgcgccgcgcgcnncgctcgnnnnnctcgtcgtcgctgacgccgcgtcgtcgcgnctcccgccgctcctncgcgncgcgccgnnctccgcctcgcgcgccggcggcgccgcncgcgccgcgccgcgnncgatctggcgcggnnccgcgctccgcgcgccgccgnccgcgccgccgcgcgtccgncgcctcgcgccgcggnnccgcgccgcgcgcgccgcgccacgcgctctgttctcgnccgcgccgccgnnnccgcgcgccgcgnccgccgnctccgcgccgcgccgccgcgcgcctcggctnccgggncgcggcgcgcgcgncgccgcgcggccgcgtgcgcgccgcgcgtcgccgncccgcgccgtcggcgnnctccgncggcgnccggcgcgcgccggtactcgccgcgccgncgcnngcgncgncgnnnncctgcgcnacggcgnncgnccgtccgctctnnnnnncgcctcgccgcgcgcgnccggnccggcgncgnncgcgcgcctncgcgcgcgctcgctcggcgcgncgcnncgcgnnnncgncgcgncgcgcgccgccggctgtccgcgtctcgcgctcgccggcgcgccgncgccgnncgggcgccgnnctgcgcgntccgcgccgtcagccgcgccgcgncgccgcggcctcctcgnncgccactcgtcgtgtgctctcgccctctcgtccgcgctcgctnctcacagctnncgcagcgctagtcgccgcgcgctctacggccctcgctgcacgcgcgcgccactcnccgtcgcgctctcgtcgncggcagtcgcgaccgcactcgntgtcttcgtctccgcgctcggcgcgctcgtcancgcgcgcgcgccgctcgcgcgccgcccgactggcctccccctgcggccctttncgttcnctcgcgcccgccccgtncccacgcaccacaccccacncacncnccnnnnnncccccgccccgcccggcgcncatctcgactctccntcgcgcgcccgcacacgctcccccactcctctgcacctcccctccatcgcgccgcgcgctacgactacttggactcctgcgcgcgctaaagtcccgcgccgccacgcncgctgtcgcgcgcgctctcgg

SEQ ID NO: 166 - DNA, 529 bp, Glycine max
  misc_feature (142)..(142): n is a, c, g, or t
  Peptide Sequence Number=SeqID_8947
  Probeset Number=SeqID_9945
gagatttttgttaagactcgtgacgtgaaagtcatgtagtttagatgggatatgttgggagctttggcatgtgtttttcttgaaattttgtattgtaacggagttaagttcggcgagactgtgtggtttaaggtatggtatnagatatttagtgagggtgggcttgactacttgggtaatataagtatgatttatgtataaagtattcttgttatctgggttatctaagttatattgatgggtgtcgttgagggttattgtattgatggtgggtttattggtgaggtgaatgatttaatttatgtaggtggtagatttgatttattgggctttgctgatgatttagaggcttttgctgagttgaaggtgaaagagcttaagaatggtaggttggttatgttgtccatgtttggtttctttgtttaggtaattgtgataggaaagggacccttggaaaactttgctgatcactttgctgacccagtcaacaacaatgcttgggcttatgccacaaactttgttcccggaa

SEQ ID NO: 167 - DNA, 474 bp, Glycine max
  Peptide Sequence Number=SeqID_8948
  Probeset Number=SeqID_9946
atagtttgtgtggagaagcctcgtaaacggcctgtccaacaaaactccgtgctcttatttatttgtagtgtgctgttatattagtatttaaatcacaatgcgtgagtgtatttctatccacgttggccaagctggagtccagatcggtaatgcctgctgggaactgtattgcctggaacatggcattcagcctgatggtcaaatgccgtccgacaagacaattggtggaggcgatgacagtttcaacaccttcttcagcgagaccggtgctggcaaacatgttcctagggcagtctttgttgatttggagcccactgtagttgacgaagtaagaactggcacatatagacagctgttccaccctgaacaactcatcactggcaaggaagatgctgctaacaactacgctcgaggtcattacacaattggaaaggagatcgttgacttagtactggacagaatcaggaaattggc

SEQ ID NO: 168 - DNA, 1359 bp, Glycine max
  misc_feature (31)..(31): n is a, c, g, or t
  misc_feature (52)..(52): n is a, c, g, or t
  misc_feature (90)..(90): n is a, c, g, or t
  misc_feature (119)..(119): n is a, c, g, or t
  misc_feature (187)..(187): n is a, c, g, or t
  misc_feature (231)..(231): n is a, c, g, or t
  misc_feature (370)..(370): n is a, c, g, or t
  misc_feature (573)..(573): n is a, c, g, or t
  misc_feature (1048)..(1048): n is a, c, g, or t
  misc_feature (1110)..(1110): n is a, c, g, or t
  misc_feature (1255)..(1255): n is a, c, g, or t
  misc_feature (1257)..(1257): n is a, c, g, or t
  misc_feature (1339)..(1339): n is a, c, g, or t
  misc_feature (1345)..(1345): n is a, c, g, or t
  misc_feature (1347)..(1347): n is a, c, g, or t
  Peptide Sequence Number=SeqID_8949
  Probeset Number=SeqID_9947
ggtgtgcgacgcgtgacgatacgtgcactgngatagcatgagttgtgcccangcgatgcatagcgactcgcgcgcgtatgcttctgtcancgctcgcacatccgctctcagcgttatgnggtcgggtgcgtgtgagtgtcgatgtgtgagttacacgcatacgttgtagaatgtgctgcgttggatnatcgtacacagatacacgtccgtgcatgtatacaagacatgaancacatcaccgtctcaaggtcgcggcggataggataagcgcactgagatctacggaaccgttctagcccgacgcatgacgatggtccgtattcggagcagtgtatatatatgtatgtgaataatgatgatgtcatgtggncggttcgcgagtggacacagaggcgatcgataagagcaataacgggatacagatgcggatgtgccagagagatagctattaatgtttgtacacattcacacgcgatgaacatatttgatgttcgacaataaataatcacacaaccaccgcacacgaaaggctcagtgtggaggaatgatggtgcgcgcgcacgcgggcggccnccgtaccgaatacctccacagtgagttagtaatagcgctagagagctagagagtaaatagcgacattaatacaggcgaggtatatgatgttgtctcttgtcagatcgcgtcggccacacgagaacagagactggacaggcccacagcggcatgccaattcaagggaggggattgatggcggactgatataagagaaacacgcgctcataaaccagaagagacgagattcgttaatataacaacccgccaaccggccagccggctggggaggggagaggggcgtagagcgcgccggggacataggtgaggggaagaacaagacagaagagtgagactgtagaggtgggacccggagggcgacccagagaaggggatacttggcatggaggttttcgagtgtattcaatctttcagtgtgggaattgacgtgaggattgaggtgaaagaaatagtaaagcgatcaacctctcactgnagtgggggcacggcggggccgatccactgacaaagagctgcgtactaagaagcgaatcttanccggcacagacacgctatcacctcttcgtttatccgcgcgcgtcgcgctaaccatcgtgaatactgtgagagattatgttctccactcgagccagggccgcagacaagtaagttatgtcccgggggcgggtgtggccctcttttntntatatttagccgacgcgcacacggcccgggtggtccgctgtgacacgcgctacgtaatcatacatataaagcagcaaaaaangttatntnaaaatatataat

SEQ ID NO: 169 - DNA, 575 bp, Glycine max
  misc_feature (495)..(495): n is a, c, g, or t
  Peptide Sequence Number=SeqID_9391
  Probeset Number=SeqID_9948
aaagtggagtcccgggggcgcgctctaaataggatcccggctgaggattcgcacgagaacttaactaaaatcctatcgaaagcgaaagaaagaaacctaacaggcctagcgttctctaagctatcgggaggccctcgacctccacaaccccagcaccaaggggctgtgcctgtcgcgcttcccgcccatgcggaacccgacacccaggccgccgccctccgttcctgctccaggcccgccgcttctgagcgggtcccgtcttcaagcagcgtcgtgtcgcggaccttcggacaggggctcgcgcagggaactgaaacgccgataaagcgtcacgatgagacggacagctcagctgatcagtagcttgatcattcctcccgagtcagtcgatcacgctctcgatattaccgttcggctctatagcgcacaaacgtcacgactcctgtacaaacagcgtctctctctctcgcgctcgatggaagactctgccccagnagccatcgctttacacgtgtacctaacgtgaacagtgagctggctcagatctggcggcacaatcaagggtgtaatacgag

SEQ ID NO: 170 - DNA, 718 bp, Glycine max
  misc_feature (600)..(600): n is a, c, g, or t
  misc_feature (718)..(718): n is a, c, g, or t
  Probeset Number=SeqID_9949
tcagctacgtaggccccccccccagattgtggagctgatcagcaaaagcttgtcgtcgaaacaatccacaaggctcaagttttttctgacaaaatatacgaattaaatcgcaacacaggagcctatgaattcccattggtgcatcaaggtcttgtcttgcttgttcttgtcatgctcatgtatcttttcacaatgcaatttttgtacagaaaaggccataatgagacacatatttctttaaatattgaaagtttagtcaaggacttgaaacaagcagctccattgctcgctcttattggcttagcagttggagtgacttggcttttcaaaagacagacgatctattgtttgacaatgatcgttatgtgctcagctttgtggatctgcggtgctctaggagtctccctctttgtcaagaaaacaacaaagtccaacctgaaggatgaaaatgaccaacaacctgatcaagtttctaatattgaattgaatatccatgccttcgaagcagttaatgaagacttgacaatggcgtcacaagatgatggaaaagagctcttgaagggtcttgtggagtctcaagacgatgttccagtgctgaanaagcctctattctttggtttccaagctccattgtttacagtgttggctgttgctatcatggcttattgcgttaatcgcgtccaccttaacaagtttggcgaactgaacagaatgaacn

SEQ ID NO: 171 - DNA, 2253 bp, Glycine max
  misc_feature (1)..(1): n is a, c, g, or t
  misc_feature (28)..(28): n is a, c, g, or t
  misc_feature (40)..(40): n is a, c, g, or t
  misc_feature (49)..(49): n is a, c, g, or t
  misc_feature (80)..(80): n is a, c, g, or t
  misc_feature (93)..(93): n is a, c, g, or t
  misc_feature (139)..(139): n is a, c, g, or t
  misc_feature (164)..(164): n is a, c, g, or t
  misc_feature (181)..(181): n is a, c, g, or t
  misc_feature (186)..(186): n is a, c, g, or t
  misc_feature (195)..(195): n is a, c, g, or t
  misc_feature (217)..(217): n is a, c, g, or t
  misc_feature (225)..(225): n is a, c, g, or t
  misc_feature (243)..(243): n is a, c, g, or t
  misc_feature (251)..(251): n is a, c, g, or t
  misc_feature (273)..(273): n is a, c, g, or t
  misc_feature (277)..(277): n is a, c, g, or t
  misc_feature (290)..(290): n is a, c, g, or t
  misc_feature (296)..(296): n is a, c, g, or t
  misc_feature (306)..(306): n is a, c, g, or t
  misc_feature (326)..(326): n is a, c, g, or t
  misc_feature (361)..(361): n is a, c, g, or t
  misc_feature (385)..(385): n is a, c, g, or t
  misc_feature (387)..(387): n is a, c, g, or t
  misc_feature (397)..(397): n is a, c, g, or t
  misc_feature (400)..(400): n is a, c, g, or t
  misc_feature (402)..(402): n is a, c, g, or t
  misc_feature (417)..(417): n is a, c, g, or t
  misc_feature (453)..(453): n is a, c, g, or t
  misc_feature (485)..(485): n is a, c, g, or t
  misc_feature (502)..(502): n is a, c, g, or t
  misc_feature (512)..(512): n is a, c, g, or t
  misc_feature (543)..(543): n is a, c, g, or t
  misc_feature (562)..(562): n is a, c, g, or t
  misc_feature (573)..(573): n is a, c, g, or t
  misc_feature (584)..(584): n is a, c, g, or t
  misc_feature (609)..(609): n is a, c, g, or t
  misc_feature (641)..(641): n is a, c, g, or t
  misc_feature (667)..(667): n is a, c, g, or t
  misc_feature (674)..(674): n is a, c, g, or t
  misc_feature (684)..(684): n is a, c, g, or t
  misc_feature (687)..(687): n is a, c, g, or t
  misc_feature (705)..(705): n is a, c, g, or t
  misc_feature (733)..(733): n is a, c, g, or t
  misc_feature (743)..(743): n is a, c, g, or t
  misc_feature (827)..(827): n is a, c, g, or t
  misc_feature (835)..(835): n is a, c, g, or t
  misc_feature (872)..(872): n is a, c, g, or t
  misc_feature (915)..(915): n is a, c, g, or t
  misc_feature (967)..(967): n is a, c, g, or t
  misc_feature (979)..(979): n is a, c, g, or t
  misc_feature (995)..(995): n is a, c, g, or t
  misc_feature (998)..(998): n is a, c, g, or t
  misc_feature (1083)..(1083): n is a, c, g, or t
  misc_feature (1156)..(1156): n is a, c, g, or t
  misc_feature (1160)..(1160): n is a, c, g, or t
  misc_feature (1173)..(1173): n is a, c, g, or t
  misc_feature (1184)..(1184): n is a, c, g, or t
  misc_feature (1189)..(1189): n is a, c, g, or t
  misc_feature (1191)..(1191): n is a, c, g, or t
  misc_feature (1206)..(1206): n is a, c, g, or t
  misc_feature (1234)..(1234): n is a, c, g, or t
  misc_feature (1252)..(1252): n is a, c, g, or t
  misc_feature (1260)..(1260): n is a, c, g, or t
  misc_feature (1326)..(1326): n is a, c, g, or t
  misc_feature (1329)..(1329): n is a, c, g, or t
  misc_feature (1341)..(1341): n is a, c, g, or t
  misc_feature (1343)..(1343): n is a, c, g, or t
  misc_feature (1359)..(1359): n is a, c, g, or t
  misc_feature (1397)..(1397): n is a, c, g, or t
  misc_feature (1414)..(1414): n is a, c, g, or t
  misc_feature (1432)..(1433): n is a, c, g, or t
  misc_feature (1466)..(1466): n is a, c, g, or t
  misc_feature (1477)..(1477): n is a, c, g, or t
  misc_feature (1539)..(1539): n is a, c, g, or t
  misc_feature (1544)..(1544): n is a, c, g, or t
  misc_feature (1557)..(1557): n is a, c, g, or t
  misc_feature (1561)..(1561): n is a, c, g, or t
  misc_feature (1613)..(1613): n is a, c, g, or t
  misc_feature (1627)..(1627): n is a, c, g, or t
  misc_feature (1630)..(1630): n is a, c, g, or t
  misc_feature (1639)..(1639): n is a, c, g, or t
  misc_feature (1646)..(1646): n is a, c, g, or t
  misc_feature (1719)..(1719): n is a, c, g, or t
  misc_feature (1766)..(1766): n is a, c, g, or t
  misc_feature (1791)..(1791): n is a, c, g, or t
  misc_feature (1863)..(1863): n is a, c, g, or t
  misc_feature (1893)..(1893): n is a, c, g, or t
  misc_feature (1904)..(1904): n is a, c, g, or t
  misc_feature (1967)..(1967): n is a, c, g, or t
  misc_feature (1969)..(1969): n is a, c, g, or t
  misc_feature (1974)..(1974): n is a, c, g, or t
  misc_feature (1980)..(1980): n is a, c, g, or t
  misc_feature (2003)..(2003): n is a, c, g, or t
  misc_feature (2008)..(2008): n is a, c, g, or t
  misc_feature (2011)..(2011): n is a, c, g, or t
  misc_feature (2013)..(2013): n is a, c, g, or t
  misc_feature (2020)..(2020): n is a, c, g, or t
  misc_feature (2041)..(2041): n is a, c, g, or t
  misc_feature (2072)..(2072): n is a, c, g, or t
  misc_feature (2080)..(2080): n is a, c, g, or t
  misc_feature (2098)..(2098): n is a, c, g, or t
  misc_feature (2101)..(2101): n is a, c, g, or t
  misc_feature (2108)..(2108): n is a, c, g, or t
  misc_feature (2144)..(2144): n is a, c, g, or t
  misc_feature (2148)..(2149): n is a, c, g, or t
  misc_feature (2153)..(2153): n is a, c, g, or t
  misc_feature (2177)..(2177): n is a, c, g, or t
  misc_feature (2186)..(2186): n is a, c, g, or t
  misc_feature (2203)..(2203): n is a, c, g, or t
  misc_feature (2213)..(2219): n is a, c, g, or t
  misc_feature (2221)..(2221): n is a, c, g, or t
  misc_feature (2223)..(2223): n is a, c, g, or t
  misc_feature (2233)..(2233): n is a, c, g, or t
  Peptide Sequence Number=SeqID_9392
  Probeset Number=SeqID_9950
nctcgatcggctgcacgacgcagctgcntcaggcagcaantcgcagatnctacacgcgcaacgtactcgtcgacatcgantcgctaccatgcncacgctcgtctacccatctagcagcagtcccagacctatcaaccancactatcgagtcgcgctgtcgatcnacgcgcgcgctggccantctcntactatcgncgacactgctcgtatctggtcnacgacgtnctgctgtatcagcctatntatcatgntgctcgtctactatggtcatgntcancaccggtgtcctngtgctncgctatcgtnatgtgatatcgtactattcntggtcgtcttcggtagtgtagttcgtatgtcgtcntcgtactgatgtgacgtctgctantnatcttaagtntantntcatgtgtgtagatncgcatacgacgtgacgctcgacgactgtcgcatctnatgactagtagcgtcgatggatgactacgatncacgacgactatcactngacgtgtgcnactgcagtcgttccgatgcatgagcgtctanttccgtatcgcgcgtcgcnagcagatacgncatcgtcatcngacgacaggatcgacgatgcacagnccgcggctgcagtaatcatcatcgcgtgaatncatctatcacatgtactcataagtcnacagtangatggtcatntcnatcgagtcgtacgtagtnatatacgtcgttcacgagatacagcgancgtcactacnattccgactatcctgtgtcccgctcgtccgcgtcgcagcagcagcagtcgcacccggctgtcgccattcatgtcgcagcagtcncgcagagnaatagtgtctcatgtacactcattactgctcgctgtntcgtatgtgactacattcgtctgtgctctctctctcatatcantactgatcgtgatgcatctgcgacgtatgacacgtatcgtctagcacgcatntcgcgtacacgntgcatatcgagcagcncgnctcacgtacgagctatctacgtcacgcgcagtccgcgactagacacatcgctaaccatatctgcctatcatagcacgcgtctcanttcatgcgaatactcgactgactcgtattatgatcaatactggtgcgctgtgatgccatatagctacatttcntatnagtctatagttangatgtgtcagnttgtngntgtactgtcagtgantatgatcctatctcgtcctgctgctacntctactgactgtctatcngtacatgntattcatataccgactagtcagtcagcgtgtctagatacgtgctgtagtatagctctcgtcgcgtngcntcgcgtcgagcntnctcgcgctgcgtacgntactacctacgatcacatatacgtcgtcatatcctgcntcctactatagtcttancaatctcctcctcatctnncacactcaaacatctatttactactcacactcnctgctacgatngtatacgtcactatagatctcactagtatctcacgatcatcacgacttgaccaagctctatncgtcnatctcatttagcntacntcgtatatcattacctatacacttcgtcaccgacgtatatagtcgaacagangctcacggactcanccntatcgaccncatcatnatgtctacctgagtgcagcacactgtcaccacagatcgcatccacgtagcagctacgtcactaccgatggcgnatgagtgcgcgcggggcatacactacacggcgtgctgtcggcgtgcngacgacgcgtcacgcgctgcggtcntggtagagtcgacgatgccggtgtagtgcagcgactcacaacgcatgtctcagctagcttactctgtcagtncagcttcgctatctactcttctctctatcnctctcttctcnctcctacgctcgtctatcatcgagtacttgcgctgctgcgtcgtccgtatactattctactcntnacatngtctcnataggagagtgtatgagtagagntagtngtngngtgtgtnggggaagtatctatgagtctngtgtggggagaaaaagagatagagatgtggnggtcgtgngttgcggagcgagtacgnatngactgangatagctgtgcagctaagatagcagtagctcatatnggannatgnttataataattttagttatagttntcagatcgngatcgtatagatgaganactgaggatnnnnnnnananaaaatataanaaataaaaaaaaaaaaaaaa

SEQ ID NO: 172 - DNA, 1938 bp, Glycine max
  misc_feature (1)..(1): n is a, c, g, or t
  misc_feature (32)..(32): n is a, c, g, or t
  misc_feature (55)..(55): n is a, c, g, or t
  misc_feature (65)..(65): n is a, c, g, or t
  misc_feature (98)..(98): n is a, c, g, or t
  misc_feature (105)..(105): n is a, c, g, or t
  misc_feature (125)..(125): n is a, c, g, or t
  misc_feature (145)..(145): n is a, c, g, or t
  misc_feature (164)..(165): n is a, c, g, or t
  misc_feature (175)..(175): n is a, c, g, or t
  misc_feature (206)..(206): n is a, c, g, or t
  misc_feature (208)..(209): n is a, c, g, or t
  misc_feature (216)..(216): n is a, c, g, or t
  misc_feature (242)..(243): n is a, c, g, or t
  misc_feature (247)..(247): n is a, c, g, or t
  misc_feature (259)..(260): n is a, c, g, or t
  misc_feature (325)..(325): n is a, c, g, or t
  misc_feature (330)..(330): n is a, c, g, or t
  misc_feature (352)..(352): n is a, c, g, or t
  misc_feature (359)..(359): n is a, c, g, or t
  misc_feature (375)..(375): n is a, c, g, or t
  misc_feature (383)..(383): n is a, c, g, or t
  misc_feature (385)..(385): n is a, c, g, or t
  misc_feature (408)..(408): n is a, c, g, or t
  misc_feature (413)..(414): n is a, c, g, or t
  misc_feature (420)..(420): n is a, c, g, or t
  misc_feature (453)..(453): n is a, c, g, or t
  misc_feature (460)..(460): n is a, c, g, or t
  misc_feature (489)..(489): n is a, c, g, or t
  misc_feature (510)..(510): n is a, c, g, or t
  misc_feature (546)..(546): n is a, c, g, or t
  misc_feature (619)..(619): n is a, c, g, or t
  misc_feature (689)..(689): n is a, c, g, or t
  misc_feature (694)..(694): n is a, c, g, or t
  misc_feature (702)..(702): n is a, c, g, or t
  misc_feature (732)..(732): n is a, c, g, or t
  misc_feature (821)..(822): n is a, c, g, or t
  misc_feature (824)..(824): n is a, c, g, or t
  misc_feature (908)..(908): n is a, c, g, or t
  misc_feature (927)..(927): n is a, c, g, or t
  misc_feature (936)..(936): n is a, c, g, or t
  misc_feature (1004)..(1004): n is a, c, g, or t
  misc_feature (1008)..(1008): n is a, c, g, or t
  misc_feature (1028)..(1028): n is a, c, g, or t
  misc_feature (1210)..(1210): n is a, c, g, or t
  misc_feature (1254)..(1254): n is a, c, g, or t
  misc_feature (1300)..(1300): n is a, c, g, or t
  misc_feature (1416)..(1416): n is a, c, g, or t
  misc_feature (1472)..(1472): n is a, c, g, or t
  misc_feature (1494)..(1494): n is a, c, g, or t
  misc_feature (1514)..(1514): n is a, c, g, or t
  misc_feature (1577)..(1577): n is a, c, g, or t
  misc_feature (1629)..(1629): n is a, c, g, or t
  misc_feature (1704)..(1705): n is a, c, g, or t
  misc_feature (1727)..(1727): n is a, c, g, or t
  misc_feature (1729)..(1729): n is a, c, g, or t
  misc_feature (1782)..(1782): n is a, c, g, or t
  misc_feature (1785)..(1785): n is a, c, g, or t
  misc_feature (1790)..(1790): n is a, c, g, or t
  misc_feature (1816)..(1816): n is a, c, g, or t
  misc_feature (1848)..(1848): n is a, c, g, or t
  misc_feature (1863)..(1863): n is a, c, g, or t
  misc_feature (1902)..(1902): n is a, c, g, or t
  misc_feature (1915)..(1915): n is a, c, g, or t
  Probeset Number=SeqID_9951
ncgatgtacgacaacgagtacgtaggcaggantcgcggcacgccgataatacaanacgaggaagnagcaaccactgctggacggctgatggtggcgcncacaacnaaaatatgttagatagatgntcgactataatcaataacantgacacgagcgaaagtgtnnatgagagcgncgcagagagatagtagtatagcgatacgctnanncatacgnagatgtagagtgacgacacacgggtnnaatngggcggtcgagnnggtcgacatatgacgtactgatcactagtaacgacatcgacgactagacagacgataatgggggnatgtnagtgagctgaagtgatgacagntcaatancagtaccgtcgtgtgntgcatcgncnacgcaaacgagggatgatgcagnggatnncgtgcnatatgcagcatgagatatgatacgtctatgcantatgtantctatacgtgcagtctgcgacgcactatngtagatatctgcagatttganagtagacgagactggtgagatgcgagtcggaaggtnatgaagagcgcgcatatgagagacacaagcagcgaacgagagcgacatgcgacgcggtactatcggactgtangtcatactaagcgagcatgaagtgtagcgtgcttcttggtatgtctcgcgcatgctcgacgattagaacnaagancggggcgnagatgagatatcaactatacgaagcgacgnagatgcagaacgaactgcacatatgtgtcacgagtcatagatcacgtcctcgcacgatctcttactgtacgtactactcaaataagagnngngaggcgtgtactagtatcgtaagatgtagtgagagtgctattagaatgcgagtaatgacagtgatagcgtatagcaagataacngatgcactagtcgagcgcnactcgaaanagagagtgaatgatacgtcgcgactgacacgctacatagaagtgcgtcgtatcgtcgcgtatagcgtntganggtctacccgcagatatcanagcagatcattgacaacgaaggcacatcaccagtacgacaatcatacatagcagattatcatcatatcgcagacgaatactacaatagtgcggacgaactatcgcgcggtccccgtcgccgaggcagtcgactcctcgcgagttgaacactctacgtatacatcagacatctacgcttgatngccctgtgctgcttctagtgactagatcgtggaggtgtagcatnttcaactatataatatcacgatgtaagagatataggaatagctganacagtagatggcgtatcgaggagcggcgtcgtgacagcgcaccatacgctgtatataatgactatatataattatatattagactagtagacgatatagatgaataagaatatagnaggaatatgtgtcgaatactcactacacgcaccgaacaattatgtacagacgatgnacataatataatgtcagcgcgntgaacagagcgcgtagatanggagcggcagagacacaaatacgagttagacacgcagcaaagcacgaacatctaaaacgacanagacgatagtatactagtgaggcggagatgacagagtagagaggtgtgggtnttaatgtcatgagactgaaggagagtgcatcatgacatagaaggaagtggggtgtgtttggtatataacgacagnnagacgtctagtgtgtacgtggngnggcgcgaattgcaagagatcgcgatagtacggagacataaagaagcatagagnagngatanagtatgggagaagttcgcgcaagagngtgatggtggagcggcgccaagacaagaaganaagctgcaaacgcanagcgtatgagacgcgtgaggtagcgagtagacggcgagncatgacgagaggngcgtagagtagactagagtgccg

SEQ ID NO: 173 - DNA, 196 bp, Glycine max
  misc_feature (17)..(17): n is a, c, g, or t
  Peptide Sequence Number=SeqID_9393
  Probeset Number=SeqID_9952
tcatcattgtggtcaancaattcacagaacgctgtcccaagaagcagctttctgagaatgatatatgaatacgataatttatgaattagcacacacctttactgtcagggtggatgtcgatcaggtatggctaaagtcaccaatgcttacgaccttcatgcaaggaaagttatccatactgttggcccaaagtatg

SEQ ID NO: 174 - DNA, 1351 bp, Glycine max
  misc_feature (308)..(308): n is a, c, g, or t
  misc_feature (527)..(527): n is a, c, g, or t
  misc_feature (624)..(624): n is a, c, g, or t
  misc_feature (653)..(653): n is a, c, g, or t
  misc_feature (819)..(819): n is a, c, g, or t
  misc_feature (1153)..(1153): n is a, c, g, or t
  Peptide Sequence Number=SeqID_9394
  Probeset Number=SeqID_9953
cacacggaactatcagtagtcagatcgagcacctgagagcacttagcgagcgacatactcactgtctcgcgtcgttatagagccatcggtagtagcgcaatgcgctcgagcgatagaaccgtctagagacaaccggcgcagcgatgtatggctctggtgcatccctcagcccctagcgataaccgaacactattcgccgtgtttcattgaccagatgaagagtctatcacaactaatactattgctgacgcacgtacctatcagcgcgattacgtgagttaacatagtatacgcactcgagagaatantatgtcgcatgaagcgtgacagccgaacaatctacagctgacggtgtaggtgcgggagcggacgatacgcatatatgtaaatcgtcttgtagcgagatgtaagcgtccacaatccgaggcacaccctaagaacatagagtgagggagaagagtctagagtataaatcgtgggacgctggtcgcatcgtctcatagtctcgccgtgtataaatcgtaagnctacatctacagacataataaagcactacaacaaacacaactcactgacacactttcatgtcagagcctatggactaatctttactatgtaataagnaatatgactaatggaaatgacacacatanaacctccaaacaatataccatcatctctataaatatattatacagattatagtcatagatttgggctgtgacagcgttggcacacagcctaaaatgcacgaagtgcagatgacgcatcattctgcctaccgagcctcaactacacaactaccaggtaagtactagnagagttctagggatacacatcatgcatataacacatacgactgtagcaacatagagtggagtaaagatacctggtctactatcatctatgtgagatagtgtctgcttccagtctacaaactcctatactaggcataatatcgaattagacagcatagaaataccatccgaaaatatgagtggctgtgctgatgatgaagatacttatagagcgacatgacgtcattgagtacttgtatagagagcactaagcacggagcgacaagactgcagttgtaagctgtgtctaatcaccaacatatcgcgatgcaagcaagatcatgtattaatgattnagctacgtgcaatcagaagaaaaagagtacataacatagagatctcctcttgcaaggcacgcggggggggtgtgctcctcatttctatgaatggcgtgccttccctcacttcgggcgctggttcctagctttattggggaacgcagggcactgcgtgatgcaaagtattgagagagagggatgatatgggaggtttca

SEQ ID NO: 175 - DNA, 576 bp, Glycine max
  misc_feature (22)..(22): n is a, c, g, or t
  Probeset Number=SeqID_9954
aggtcttgtgtaccggtccggnaattcccgggctatcgtcgacccacgcgtccggtatattaatacctttcaagcggagagcagaaaggattctgataagcatatccgtattgggaaatcagcccaacacacagcacacattaacgtgtagacgaagtatatactatatatagactggaacagtgcatgtctgtgtaaggacaacagagggcaagcagggtactttttacatgctataaaatgccattcaataacgaaaagccttgtggaactgaggagccaatgagtgattctgatacatcaagactttctgaaagtgcaacatcttccagcgataatgagtctcccagagaaagcttcactagtgactcttcaagtaaacacacttccccttcctcaagtccaccaaagccagtgactttagatgacatgatggcaactacaagaaaccttggcaacttaatgcttgcccatgaaattgtcacaaatggaaattttcaactaaatcacatagatccttcccaaaacagcttagaaggaagagttaagcaaattgttcacaaaacattttgggat

SEQ ID NO: 176 - DNA, 799 bp, Glycine max
  misc_feature (1)..(8): n is a, c, g, or t
  Peptide Sequence Number=SeqID_9395
  Probeset Number=SeqID_9955
nnnnnnnnccccagtttaaacacccccaataaggggggttttcgtttttcagttttattttaaaaaccaggggagggggcgggggggtcgaatatttttcttcccatttttttctgggttttggtttttcctggggaaaacccatggggcacacatttaggaccagtttttgcccagttttgcccaggtgttatcatcccgtcaaaatgggagcttaaccggaattagtcctgggatagtttccggcgagttatccaaagaaaattcaagtattggtgcagagaccggcgggaaaacaccgggaataacgcttgtaatagttgtttgtaagttcaatttttctccaaatattgtaaagggaggggagattatggtgagtaataagggggtgaaaaggggccagcaaggggtcagcaggtttgttaattgttattgaaaaaccattgaaaatgcaaagaaagtcagaatttattttgaaggggaattttaggggaaattgtttttgttatcgccttgtttgtcccatgattaaacagggaagaaaacggatagtagtacttttagttttatttttgttggagtgcccccggtgggaccctctggggagtctttgggagcatctggatagcttttttttcgggggttttttggaggatttattttaacctttttttaaaaaatgggtgggggaccctttttgtttccctttttttaatccatggccccttggggtggccatcagtaggaggccattagcagtcggcttccaaaaaaaaaaaaaaaaaaaaaaaaaaaaaaa

SEQ ID NO: 177 - DNA, 439 bp, Glycine max
  Probeset Number=SeqID_9956
atcactcatcagtaaattaagagagatgacatcttctaaagtatcttccatgcttctcgttctccttcttctggttcttgtgtttccccatatggataaagcccttggtgaaaaaaaagaggcagaacatccttatcaactgactactgtccaagggatcggaaggcgcgctcttttaggctttcggccgtcgtgcccagctttcttatgtaagccaaaacttcctccaaattttcctaaagggcctttcccacgtccacgtccaattcgtcctagacctccaccccctccacatcgaaggttttccaaaggcaaaaacatatgatcccacaaacatttggatgaaactatattttctcactataaaatgtaattctggaattttctttcaaaataaaagcgatcagctacttgggatgatggtataatgatatgttgt

SEQ ID NO: 178 - DNA, 1614 bp, Glycine max
  misc_feature (36)..(36): n is a, c, g, or t
  misc_feature (227)..(227): n is a, c, g, or t
  misc_feature (503)..(503): n is a, c, g, or t
  misc_feature (655)..(655): n is a, c, g, or t
  misc_feature (658)..(658): n is a, c, g, or t
  misc_feature (728)..(728): n is a, c, g, or t
  misc_feature (740)..(740): n is a, c, g, or t
  misc_feature (864)..(864): n is a, c, g, or t
  misc_feature (943)..(943): n is a, c, g, or t
  misc_feature (985)..(985): n is a, c, g, or t
  misc_feature (987)..(988): n is a, c, g, or t
  misc_feature (1078)..(1079): n is a, c, g, or t
  misc_feature (1126)..(1126): n is a, c, g, or t
  misc_feature (1218)..(1218): n is a, c, g, or t
  misc_feature (1269)..(1269): n is a, c, g, or t
  misc_feature (1282)..(1282): n is a, c, g, or t
  misc_feature (1325)..(1325): n is a, c, g, or t
  misc_feature (1458)..(1458): n is a, c, g, or t
  misc_feature (1467)..(1467): n is a, c, g, or t
  misc_feature (1501)..(1501): n is a, c, g, or t
  misc_feature (1516)..(1516): n is a, c, g, or t
  misc_feature (1552)..(1552): n is a, c, g, or t
  misc_feature (1606)..(1606): n is a, c, g, or t
  Peptide Sequence Number=SeqID_9396
  Probeset Number=SeqID_9957
gccacacaccccacggcccttccacccccgcggccncacgcaaggcccaccaccatactcaaaacttagggaacttccaccgccgccgcgcgggagccaggctcttgacaacctaagttgtgaatatgcgccgcgagtcctgacacggtgaattgcgcagagtaaacttctcatcttctatcttatgagcaaccaacccgaacaatacacagggcgatcaacctccncgtctcttcactcttatccactatgcctgaaaaacgcagtgacacatagcacgaccgacatctacagtggctcgcaagctagagagtgagagctaatacattaggagaaaatttttgtgggccctatcgccgtgattactcgtttctcccttgtacacttttgcctcctccttttttgcgctcccgtcttgttattttcgcgccgcagccggacattctttttgtggtgccgggtcgctgacggtaggaggtaccgcatcttgagacgacaggcgnacctacaccgaactcgcgtcgagctcggatcgcttatttacgatatcacgcatatacaattattcgcagagtatacgcgcctcttattcctctactctaatatatatccgccccgcgcctgcataacgaatatatagctacatgtaagaggnaangaccatgtgaatgcacagtaccgcgacgatagagtcactaaggcgtgatcgccacacatagtatgtcctngaattatcggcnaagagctaccccacccatgaaccatacatcacctagatttagtactagaataatagtgacttccgacacgtctagatgtcctcaccgtcggtgattgcgctgcgcggcgtctgttgagatatcnagtgttgaagagactgcatgagatctcacgtccttcacccgtgcctcgccgagtatcagggagtagataccacaaatgnatctctcatacgcagagcacagccacggagacgcgaggattnanntggtggatagtcgtactacacataatgattaacacgccatcacccccacaacgcatagcgagaatgtcactcctcctaatcagatggcgnntatatacgcagttacacgttacatcacgtgacgttacacgatgctanattgattgtatatgtcgcgacaaaatggtgcaatatgtcactatcgacaccgcgcactgccggcggacaacgacgccatcattattaggatnccaactctacgtacacgctaccgtcgcacgccgcatgatgatgctttacancatgccggggcgntactcgtatttactggacgcgaacgtctcagcgatcgcttgtnatagctctaccgctacacgtaattggcgcaagtgcgcggagagatgagatactctctacgcgcatatccagatgcgcgatgtcggagatgcgacgctcacatcatctagtgactcgacctcagagtcttattntatactgcntcaatataatccatgtgctaagtgctcttgacancattctctagccacnatataacacctcgcacctctcgctctcgacaatganactgtatatactctaactgcgagcgacctaagcgcataatgccactcgctcctncgcgtgtt

SEQ ID NO: 179 - DNA, 765 bp, Glycine max
  misc_feature (274)..(274): n is a, c, g, or t
  misc_feature (310)..(310): n is a, c, g, or t
  misc_feature (344)..(344): n is a, c, g, or t
  misc_feature (371)..(372): n is a, c, g, or t
  misc_feature (390)..(390): n is a, c, g, or t
  misc_feature (399)..(399): n is a, c, g, or t
  misc_feature (405)..(406): n is a, c, g, or t
  misc_feature (548)..(548): n is a, c, g, or t
  misc_feature (722)..(722): n is a, c, g, or t
  Probeset Number=SeqID_9958
aacacgcacagatctgatctatctgaagctgaaaacgccgacgcccgacggtgatgatgaagatggggtcctcaccttcacgttgctccttcttcctattcctcctcctcctagtggcgctcttcccctcgtcgctctccgagatccggttctccgagatccgaaacgacgatcgctccatcgttcccttcgatcagtttggattcacccacaagggtcgccttgagctcagcgtttccaaatatcactctccaattccattcggacctctcgnaggtgggattcttcctctgcaccctggattcctggnctcatgtcttccagcaactggaggatggcgaganttcgtgcgcccttttcatcgatctggnntcagtcgtctacaccttncattctctncacggnnaggactctttcagcacgctctacaaagaagaaaccgacgccgatcagtacaacctcgtctttgccactggcactcggcgcactcaaagtggaccatgggacgtaaatctggcatgataatctcgacggaaaagaggacgtcngcgattacctctcctgcggaagaacaatccttcgggagggttatttcctcttcccggctgaggattccccctcgagctctttggatcagcgcctctacaagaagggttgaccgcttcgcatcattactcaggggtagccggggtatcttggaggccgagattttggggcgagcngaggaaatctactcaaggcaccgaaggcccccggtttggattt

SEQ ID NO: 180 - DNA, 220 bp, Glycine max
  Peptide Sequence Number=SeqID_9397
  Probeset Number=SeqID_9959
cacattgtatcatggtttgccccacaagattaggtctgctcttccatctcagctgcaaacagtcgatgacatgaaagaggtacaccacgcacagatcaaagctgaaatggaaaagattactcagtggctagcaccaagttgcctcaaattcagtcaagacacatcaaggtttcggatgggttggtgaatgggcaaacacaaggttagctgtaaacttgga

SEQ ID NO: 181 - DNA, 1374 bp, Glycine max
  misc_feature (38)..(39): n is a, c, g, or t
  misc_feature (173)..(173): n is a, c, g, or t
  misc_feature (355)..(355): n is a, c, g, or t
  misc_feature (814)..(814): n is a, c, g, or t
  misc_feature (816)..(816): n is a, c, g, or t
  misc_feature (932)..(932): n is a, c, g, or t
  misc_feature (958)..(958): n is a, c, g, or t
  misc_feature (965)..(965): n is a, c, g, or t
  misc_feature (988)..(988): n is a, c, g, or t
  misc_feature (1199)..(1199): n is a, c, g, or t
  misc_feature (1232)..(1232): n is a, c, g, or t
  misc_feature (1244)..(1244): n is a, c, g, or t
  misc_feature (1254)..(1254): n is a, c, g, or t
  misc_feature (1277)..(1277): n is a, c, g, or t
  misc_feature (1285)..(1286): n is a, c, g, or t
  misc_feature (1333)..(1333): n is a, c, g, or t
  Peptide Sequence Number=SeqID_9480
  Probeset Number=SeqID_9960
atatttttttgtggatatggaggtgtttcctctctccnnaaacgaccccccacaagaccacacaacaaccacaacaacccccaattataaaaagctggagaaaaaaaatgattaatccttcgataaaaagtacctaaccagcctctaagaatacaaaatcgggaccacccccnggggcgtggctgtggaatctcaatatatctatctctgttgttttaatctggcggggatattaccacattataattgttgataaaataaaaatcttccgcacaatcccggccagtcatctctttcttattttaggtatttgcagagtccggccgctattttgataagcattgtcgaaatgaantccaatttcttaatatcgtaatacaatattgtttccttttccactgtcatcttttccgcactatatgtgcaatcctaccaaaatggcgctcattaatagatctttgtggtttttgcactcggctatctcttgtcgccaacacacattcacacacgcctgttttattatgtggatataagtgtttgggtagtgagaagaacaacttctctataataaattaagaagcaccaccctgaaatacgggcatcagcaaactaaatatatctcgttcaatttagtgagtagatgagatatctaatcttgtgtctccgaaaagaacagaaaacaacaacactatattacatacaaacatttagaccgcaagcaccaccacagcacccctcacacacatccagggagcgacaaaacaacactaaacaataccctgttgccgcgcatggctgcaccccacacacaccntntattatattgttcggactatctgattaatagtgggtccccacgcacacccaccacacacactctgctgtatgaacagaatcacacgccgtgtattcagatagagagatcgacaganaacagtagcctcagtcagctcacgcnacatcancccgcttattgtgatgatcacanacgacgcagcgagccaggcgtgcgtggtggtgctcctggacactccactcactctctacctcacactcagcgcattcgcaagcactcatacacacaatatcctaccatctctactcctatcatagaatcgaccacagttgatgtataagtattgtgtcgtttgattaacattccttctatacatatcatacgatatgctcagatgcctagnatatctatctagctactactcacaacaccgaancacacactcacnaagatgtggnatagacacgtacgtgaggagaanatataaanngattgtagatcatacatcaatactatcatcaccatacatcttctcgntcgtagtctgtgtgctcaacgccgacgctcactctcctcac

SEQ ID NO: 182 - DNA, 478 bp, Glycine max
  Probeset Number=SeqID_9961
accagtgaagttgcgaagatggcgtctacgggtcttctatccagtttctcgccatcgtcctccttgcaactccgttcttctttcaacggcgattatgtatctccgtctagcagcttcatcggagcagctccgttcgcttcctcttctctatcccttctctccggtcagaagaactcgtatcctccgagaaaactccacgtgtccgccaagaaagtttctggattagaggaagccattagaatcagaaggatgagagagcttgaaaaaacttcaaaagtaaggagaaacccaccgttacgacgtggaagagtctcccctcgtctcctcgtccctgaccacataccaaggcctccttacgttgagtctggcgtgttacccgatatatctcccgagttccagattcctggtcctgaaggcattgtgaagatgagagctgcttgcgagctcgctgctcgggttctaaactttgcaggaactt

SEQ ID NO: 183 - DNA, 801 bp, Glycine max
  Peptide Sequence Number=SeqID_9481
  Probeset Number=SeqID_9962
cttaaaagaaaaattagcaggcaatgtctgagaattctgataattgaagagaaaacagccgggttcgtgaaaaatatttgatcgtctggcgtaaatctaaccttgttcgcattcagcttttcttgtggaaggatagaaaaggttgagaagagacttgtgaatggcagacatacctagacacctgcgtgcttgtttggatatggggaaaatagctttcttagctatccttgtttctggaggaatcgtcttgcaaattctggcttgtgctctgtataataactggtggccaatgctaagtgtgataatgtatgtgcttctcccaatgcctttgctcttcttcgctggatcggacagtacatctctcttcaatgaatcagacaatagctggatcaatgcagcaaagttcttgactggtgcatcagcagttggaagcatcgccataccttcgattctaaaacacgctggactcatcggttggggagcattagcctttgatctctcttcctacgttgtcttcattgttgctattctgagttacatttgcataggagatgacagtgacaactactacagctacatataaaagtgacatacaaagtcatcatcattattttctcaagctctctgctcttttaccaccttgccgacggttcaaaaaggagaatctcttcttgagagggatcactcaattgtatgtatgattgaatgaatgaatgactgaatggctgttgtaagttgaaaactttatatgtttttgtgttggttttggtgtatagaatgaaaatatttcatttttttcct

SEQ ID NO: 184 - DNA, 1425 bp, Glycine max
  misc_feature (12)..(12): n is a, c, g, or t
  misc_feature (157)..(157): n is a, c, g, or t
  misc_feature (641)..(641): n is a, c, g, or t
  misc_feature (778)..(778): n is a, c, g, or t
  misc_feature (818)..(818): n is a, c, g, or t
  misc_feature (845)..(845): n is a, c, g, or t
  misc_feature (859)..(859): n is a, c, g, or t
  misc_feature (982)..(982): n is a, c, g, or t
  misc_feature (1020)..(1020): n is a, c, g, or t
  misc_feature (1051)..(1052): n is a, c, g, or t
  misc_feature (1056)..(1057): n is a, c, g, or t
  misc_feature (1172)..(1177): n is a, c, g, or t
  misc_feature (1179)..(1180): n is a, c, g, or t
  misc_feature (1226)..(1226): n is a, c, g, or t
  misc_feature (1286)..(1286): n is a, c, g, or t
  misc_feature (1318)..(1319): n is a, c, g, or t
  misc_feature (1350)..(1350): n is a, c, g, or t
  misc_feature (1352)..(1352): n is a, c, g, or t
  misc_feature (1357)..(1357): n is a, c, g, or t
  misc_feature (1384)..(1384): n is a, c, g, or t
  misc_feature (1389)..(1389): n is a, c, g, or t
  misc_feature (1425)..(1425): n is a, c, g, or t
  Peptide Sequence Number=SeqID_9482
  Probeset Number=SeqID_9963
gttttacgcttntagagctgcgttgtgtgattctggtagcggcggcgggtcatcgatgcggcccgttggcgtgtcggcgcgtgcgcctcccatcagacgtccccctgcgtgcacgagtatgcaccggcggagggtataatagaggaatatctcccgncgaatcgtgttccacatggccggtccctacatgccgcccacacacgcggcgcggggagtggttgttatataacgggtggccgaagcgcctctccggcgtctctatccctataatttttgcagcattattcaccgtgctaactcaatcaccgcacgccctctgcctacgcccgtgagcgcgaaatcgcggcgccgcggtatgagctcggggcgtaatactgacccttttccacacatgccgattatattacgagcgacgcgcccatacgtatgtcgcgtgtagtcgcccgatatgctgcgtgcctgggtggcgcgtgagcgcggtgtgcactgtgtggtgttatcttcgcccttatgtttgtagttggaagagacgcaatctcgggcggctttttcattttctttgcccggtgtgtgttctcaccgtctgcccagcctcccgcgcctgtgtcgcgagttatgcgtggagtgcagcgaaggacgcncagctaagatgcggattggatatccacgaatggttcccgcgcacaagataggtaagcacgatcttccgtgccctcactcaataattccgcgctccattttaaggacttgtcgtggtgttggggtgttggtgttggantatacaccatctggcatcacggcacatatacagcgagatntacgttcgtatgatgttgcctagtcangcggcgtaacaacncgtaacacgcggcgtcgcacataaacgtacatacttccatactctcatcgcgacgtgacgtggagtataagcaccctcctccaatacacatgcatatactctgtatcacgtttcatgttgtgnaggtgatagttatcgtgtttaatgccgtacgaccctcntcacatatgtgtcgtctatatataggcaganntatnnagagacacgcactatgtagagtagaaggcgaggatgcggttcgatattctgggaactatatccgccgcacgtccaagctggcataaaagagcatacggagacaggaaagataagnnnnnncnntccatatctacatcgcgcgacgctttatatatatcacaacacccgnccgagccgctacacagatacgagatatctgcgatatgcccgagtacatcgctgatcgatncgaggaatgagtgagatgacatagcgttgctnncccagatgcgatgcccgtcgtcgttgctttncngtgantatatacaactagatgataaatgcagngtgtncatcgtggcgtttccgacgcgtactgtagtccacgn

SEQ ID NO: 185 - DNA, 475 bp, Glycine max
  Probeset Number=SeqID_9964
attttcatcgataagcacgaaaatggcttgttttcgttcgataggatctttaacttctctcactcattctcctcgagatgtttcacgctcctcaggcattgtcttaacttcatgttctgttcatcccatcacgcgctccaccttcactggctctcccatctccctcccgcgactccagccaccatctcaaacacctacaagaccgcgtaacctcgtcccaatcacgatgatggtgaaaccaacgctccagttcatccaaggaacagacgagatgaccatccctgacgtcaagctgactcggtcaagagacggatccaacggaatggcactcttcagtttcgaccagccatcggttttcgactcgagcggcgaggtcggggagataaccggactgtacatgatcgacgaggaaggtgtgattcagtccaccgacgtgaacgccagattcgttaatgggaaacctgaaggcattgtg

SEQ ID NO: 186 - DNA, 1505 bp, Glycine max
  misc_feature (61)..(61): n is a, c, g, or t
  misc_feature (81)..(81): n is a, c, g, or t
  misc_feature (170)..(170): n is a, c, g, or t
  misc_feature (200)..(200): n is a, c, g, or t
  misc_feature (865)..(865): n is a, c, g, or t
  misc_feature (1230)..(1230): n is a, c, g, or t
  misc_feature (1392)..(1392): n is a, c, g, or t
  misc_feature (1396)..(1396): n is a, c, g, or t
  misc_feature (1454)..(1454): n is a, c, g, or t
  misc_feature (1467)..(1467): n is a, c, g, or t
  misc_feature (1478)..(1478): n is a, c, g, or t
  misc_feature (1481)..(1481): n is a, c, g, or t
  misc_feature (1483)..(1483): n is a, c, g, or t
  misc_feature (1485)..(1486): n is a, c, g, or t
  misc_feature (1488)..(1489): n is a, c, g, or t
  Peptide Sequence Number=SeqID_9483
  Probeset Number=SeqID_9965
gggaggagtgaggcagtacagcacactgatatatctaggtgagagtgagcagtgctcgcgngacgactcgccgacgagtgngctgattacagtcaccgtgtcttatagagtgagcgcgtgcggcgtattgtgtacaggtgtggtgcagaatttatagtgtcatagagaancagatatatagcagttgtgtggtgagagangcccatccgaaatgtgtgagcggcagataggcatctcgcttcgcaacccatccgtagatttactacatgagatactggacgtcacacatgcagacgctatcgtctacgacactagttacccacgcacgctccagcgacagtcagtggccatagatatagtttgttcatcttcttatacgcggctcgggtcggtcatatactctcgtccactcttgagccacgtctgtcgtccagtgaacaagacaagagatcagagttataatatcgtacgtttattgcatgcgttcctgttctgtctgaggcggaggcacaggagggacacacacactccctctccctctcgactggcctgtctccgcccaggccgtactcgtatactgcacatcacgcctatctcgcgccccgacacgggtgggcgggtgggtgtgcgggccgacagcccacaccacatgcgggtcgcggcggggctggtctcgccctactctgtggcgtcgctaggtgtctcccctcttctaaatgtcttgcgttaggtgtgacatgtgcttcttgacttggctctgcgtgcgtggggtcttagccacaccagaacggagaggagtgacgggcatcatatacgacttggcagatcggccatgccgatagttgttttgtattatattaccctncccaacccacactcactatccgcaggtgggtgcgccggcacctcttcatgatgctttgccgtgggttggaagcagggtgctcaggtcgagggtggaagcctccatctttttcacttccaacctccatactccttacttctttatctaccatcactacactacaaaatgagaacagggagatgcggggagagaagaactctcattctcgttacctcctctagccctccccacacctacaccctctaacttttctcggggatgcaagtattatgggtgggcgggcaggctactcctgctatattcttttaatgtgtggatgcccaccccagcgctggtctcctataacacatatagtattgcgcggncttcgtgcggatgctcctgcgggcgcctgtgtcgaacacgagtgagcgtgtgtgttatcacactctccagagtagtctaatctagtaacattagatatcccccttctatctctccatttttattagtgtggggttctttgtcattaatacttctctccatanaaanggagccccccctcactcaccaccccatcgcggggggatggtgggcatctcaccataanacacacgaggtcngcgttgggggnggngncnncnnccggcggcacacaccc

SEQ ID NO: 187 - DNA, 1980 bp, Glycine max
  misc_feature (15)..(15): n is a, c, g, or t
  misc_feature (18)..(18): n is a, c, g, or t
  misc_feature (23)..(23): n is a, c, g, or t
  misc_feature (33)..(33): n is a, c, g, or t
  misc_feature (39)..(39): n is a, c, g, or t
  misc_feature (41)..(41): n is a, c, g, or t
  misc_feature (45)..(46): n is a, c, g, or t
  misc_feature (48)..(48): n is a, c, g, or t
  misc_feature (50)..(52): n is a, c, g, or t
  misc_feature (72)..(72): n is a, c, g, or t
  misc_feature (75)..(76): n is a, c, g, or t
  misc_feature (78)..(78): n is a, c, g, or t
  misc_feature (88)..(88): n is a, c, g, or t
  misc_feature (94)..(94): n is a, c, g, or t
  misc_feature (101)..(101): n is a, c, g, or t
  misc_feature (109)..(109): n is a, c, g, or t
  misc_feature (125)..(125): n is a, c, g, or t
  misc_feature (127)..(127): n is a, c, g, or t
  misc_feature (132)..(132): n is a, c, g, or t
  misc_feature (177)..(177): n is a, c, g, or t
  misc_feature (199)..(199): n is a, c, g, or t
  misc_feature (283)..(283): n is a, c, g, or t
  misc_feature (304)..(304): n is a, c, g, or t
  misc_feature (309)..(309): n is a, c, g, or t
  misc_feature (372)..(372): n is a, c, g, or t
  misc_feature (470)..(470): n is a, c, g, or t
  misc_feature (472)..(472): n is a, c, g, or t
  misc_feature (484)..(484): n is a, c, g, or t
  misc_feature (493)..(493): n is a, c, g, or t
  misc_feature (547)..(547): n is a, c, g, or t
  misc_feature (552)..(552): n is a, c, g, or t
  misc_feature (627)..(627): n is a, c, g, or t
  misc_feature (639)..(639): n is a, c, g, or t
  misc_feature (690)..(690): n is a, c, g, or t
  misc_feature (776)..(776): n is a, c, g, or t
  misc_feature (803)..(803): n is a, c, g, or t
  misc_feature (805)..(805): n is a, c, g, or t
  misc_feature (817)..(817): n is a, c, g, or t
  misc_feature (920)..(920): n is a, c, g, or t
  misc_feature (1166)..(1166): n is a, c, g, or t
  misc_feature (1243)..(1243): n is a, c, g, or t
  misc_feature (1249)..(1249): n is a, c, g, or t
  misc_feature (1472)..(1472): n is a, c, g, or t
  misc_feature (1512)..(1512): n is a, c, g, or t
  misc_feature (1528)..(1528): n is a, c, g, or t
  misc_feature (1530)..(1530): n is a, c, g, or t
  misc_feature (1566)..(1566): n is a, c, g, or t
  misc_feature (1588)..(1588): n is a, c, g, or t
  misc_feature (1656)..(1656): n is a, c, g, or t
  misc_feature (1716)..(1716): n is a, c, g, or t
  misc_feature (1791)..(1791): n is a, c, g, or t
  misc_feature (1802)..(1802): n is a, c, g, or t
  misc_feature (1840)..(1840): n is a, c, g, or t
  misc_feature (1865)..(1865): n is a, c, g, or t
  misc_feature (1886)..(1886): n is a, c, g, or t
  misc_feature (1888)..(1888): n is a, c, g, or t
  misc_feature (1930)..(1930): n is a, c, g, or t
  misc_feature (1980)..(1980): n is a, c, g, or t
  Probeset Number=SeqID_9966
ggggtgcgcgtgtgnttnggttntgttctgtgntttgtntncctnncncnnntctctatatgtacatctganacnngngctccccctngttatncgtcggncgcgcgangaggaagtgagccgtncngatgnttagtgggcagctctcgatatgtctgtcgttgtggagggacgcgnaccccccgtaatcacaccaccncactactacagcatatatctatgtgctactaagagtcatagcgctcagcacgctactctcgctatatgtacgtatagagataanagttatgtaatatgtatgaanattgnacaactcatcacaacacactcgctacaccgctattaacactcacataattatgggagacacanctccctcgatacaaggtacatagtctcagtctcgccagaatagatctgttgccttacacacgtgtgagatgacgtgtgtgatcgagtagtagagaganantcgaccacaagngggaggcgngcgacggcgcagcgctcatcacacagccacaccctctcactccactccgccgcnctcanaggctcacacatgacgagagtcagcacgcagacaacgacattgcgcgatacgaatatacagtcgacgccatcgtngcaacgcattgnagacaacgcacactaatatctacatgcgcctcacaacatcatactcgcctntccatactgctatttatctcgtctacaccgctctcattgatgcgtctgaccactctctgcgcgacgtctatcagctctgctcctancttagtggcatgatagacgtagaaganancgaaaggtgtgnttatccgtcgtgacgtcattcgttgtactctatggttgcggcattctctatcttaccgcgcctccacggcgctatcacatgtgcttcgatgtcttccatatantagtcaccgcgccatgtgtctacatgctgcatgtactctcacttcgcgcctctctgctctctcgtctggtggctgtatggtactatatcttatagtgaatggtgtagagtatgtgcggctcgctcgtgtcgtagattagtacgtgtacactactgcttacattgctgcagtactcactctcactctaccatataccacaaatatacatctatcatgcgtgactatgtattatatcaagcgatgctncgagctcaagtgcctactgcatctctcatatcacgatgtgcatgcgcacagacacctctgactggctgcgcgtgtgngcaagntatagcgcgcctgagttgctccgatagcagatgactctcgtctcacggctcgtcgccgctcgacgacatccccatccgcagttcgattgccttcaccggatactcagcactcttatatattagttatatttatgctattacatctccgctctcctactctcatatgcttgagctcaactatcgtgtcacgcgctcttactaagcttgaagtataattgtttanacccacaccccccgactctcgctgcaccacgctcgcaggncgctcgacgcgcgtantncagtacatgcgtagtgctgatacactctctgctctntagagacgacgctatactcacntcgcgcgcgtacgacatcactttggccgcgtctgctgtcttcgtactatgtcaatccttccgacatanactctcatggtaatcgtctgagcacagcgatcatctgacgcaacgtcgagtcgtatcatnattacatgtgttgagcgcgcacgtcgagcgtgcacgactacgcgagcagacttatactacttgcgcgcgtgcttncgcatgcagcncgcgacgcactagacttcgcgctccctactacactgancgcgcacaagctgaacgacctacgnccgaggatgagatgcagttcnancagtctacttatatatacgactcctacgactattccgcgcgngacatcagacactgcacgctcgtgtgagctgatagcgacgacgtcctcgn

SEQ ID NO: 188 - DNA, 1494 bp, Glycine max
  misc_feature (6)..(27): n is a, c, g, or t
  misc_feature (29)..(32): n is a, c, g, or t
  misc_feature (71)..(71): n is a, c, g, or t
  misc_feature (74)..(74): n is a, c, g, or t
  misc_feature (114)..(114): n is a, c, g, or t
  misc_feature (117)..(117): n is a, c, g, or t
  misc_feature (119)..(119): n is a, c, g, or t
  misc_feature (159)..(159): n is a, c, g, or t
  misc_feature (186)..(186): n is a, c, g, or t
  misc_feature (213)..(213): n is a, c, g, or t
  misc_feature (239)..(239): n is a, c, g, or t
  misc_feature (280)..(280): n is a, c, g, or t
  misc_feature (308)..(308): n is a, c, g, or t
  misc_feature (342)..(342): n is a, c, g, or t
  misc_feature (415)..(415): n is a, c, g, or t
  misc_feature (442)..(442): n is a, c, g, or t
  misc_feature (444)..(444): n is a, c, g, or t
  misc_feature (460)..(460): n is a, c, g, or t
  misc_feature (462)..(462): n is a, c, g, or t
  misc_feature (488)..(488): n is a, c, g, or t
  misc_feature (492)..(492): n is a, c, g, or t
  misc_feature (494)..(494): n is a, c, g, or t
  misc_feature (496)..(496): n is a, c, g, or t
  misc_feature (711)..(711): n is a, c, g, or t
  misc_feature (860)..(860): n is a, c, g, or t
  misc_feature (912)..(912): n is a, c, g, or t
  misc_feature (962)..(962): n is a, c, g, or t
  misc_feature (1083)..(1083): n is a, c, g, or t
  misc_feature (1113)..(1113): n is a, c, g, or t
  misc_feature (1185)..(1185): n is a, c, g, or t
  misc_feature (1190)..(1190): n is a, c, g, or t
  misc_feature (1231)..(1231): n is a, c, g, or t
  misc_feature (1406)..(1406): n is a, c, g, or t
  misc_feature (1450)..(1450): n is a, c, g, or t
  Peptide Sequence Number=SeqID_9484
  Probeset Number=SeqID_9967
gggggnnnnnnnnnnnnnnnnnnnnnncnnnncccccccccacaccacccacacaccaccaaccacaacanaanaaaaacagactcgcggcgcctctacctcccccgccgaggnggngncgccgtcctcagcagacatagaagacgatgcacgcctagngcggcgtcgcgagggcagagcagcagnagacgcgcgtctgaagccatgctcacncgctgtggagatagctatcctctccncacagtatattctagacacaacagcgcggcacgcacgcacnagacgtgtacgatgtgctctatactgtntgcagtgttatactgcccacgcgagatcctcgcncacgcgagataccatgagagagatctctctgtcttcgagagagctgcaagcgcgagagtggcaagagcgagcnagcgccatcgatcggagactctctctngnagtaagagtcggtatncnagcagaatcagtagtatagtctcacnatcnananaactctcactcataaagtatgctagagcgagcagaaagagtctcgtccacgtcaggtacgtgtgctcctctgttatctgattagtctgtctggtcgatgtaaagtgttccgtcgcgttgttcctgtgcctctgcctctagattcacaggcgtgcgagagggcacggaggagacacccaccaccagcgcgcgcgcgagcctccgcctggcactcancctcacatctctcacacaaagaaagtatgattttatatctctaattatgtagtcccgcggtcggctcacacttactctctttgtgactctccggcatgtaacacgccaacgtagtagtgttatatctgttgatatagattatactcctncctaggccctatgataggaagaagacacactcagccaaggggcgtctcatcntcttcgcctccccctgacatcagaatctggacatgagagagctcgctcgncagagcatagacgcgcctcacacatgctgcgatagctgtggctccacaacactagagactccggagagagacgatcgcagattaccttccttcttgtatccatgaatactatacaccacgngcaccgcgcaacacactgcctccatacagnagtgtgcatgcgggacgatgctatacgaagacagctgccgacccgcaggatgtctcgcactgtaagacgccntcacntctgccggtagcaatagaggagttgacaggtgcgagcgctntctaatacccgtaggaactcgatagtcccacctcgctacagcacaaccataagcgagctcatgagagtaggtatacactctatctagcgcttgtacattctacgatcttcacgcgcatccacatcaacaagcaccgctgaagtaaaatgatctcagctatcacacacaacgacgnagtgcgcgaacgcgcgtacatcagacgcactgccgcaacactgncgagagagcggccagcgcgctaacgatacgatcccagcaaagag

SEQ ID NO: 189 - DNA, 979 bp, Glycine max
  misc_feature (1)..(56): n is a, c, g, or t
  misc_feature (106)..(106): n is a, c, g, or t
  misc_feature (240)..(240): n is a, c, g, or t
  misc_feature (271)..(271): n is a, c, g, or t
  misc_feature (298)..(298): n is a, c, g, or t
  misc_feature (979)..(979): n is a, c, g, or t
  Probeset Number=SeqID_9968
nnnnnnnnnnnnnnnnnnnnnnnnnnnnnnnnnnnnnnnnnnnnnnnnnnnnnnnnacacccagcatctggcttttataaacggcacaagcttccatttgcgcatngtctccttcttttctctcttcggtgtgcagtgcttccttcctgcaatcggttggttcagtgaacggttaggttgggtgaaggtgaaggtgcattctggtgttcggtgttgcggtgatcgtcagcggtatacggnatacgagatgtctggcaattaaaaagatttngtatgctactgatacaaaggaaactgngttatattaagttcaggatttccttaaccaaactatggagcagaaagtgagagctgttactcccaggagtagcttctgtgaagcctgtcagctacgtaggcccccccccccagaaagtgaaggccgattattcccaaaagccttctgtgatgacgagactgataatccttccctatgacatggttgtagctgtgtggtgctcttgtttgcttcatgtaagcctggatggataatcaaaggatattctcgctgatctttccaataaatggagctaatctcaccctccactttcaccttttcaagaagaatctttctgtgaacgttgctttaaaatggatgttgtgcaggcctgctgtataaattagctgcaggcacctgaatactcttgtgaggtgtgaaatattatttctgattcaaaatgagtcagctgctttgttcaattttgctttgatgtgaaatcatcctgaattgaattcttctataaatctgcaaagtctgtatcccccataccctgtacctgtacatttttttccgtgttacatgagtgtatctagagtaatgataggatgatgacagtatctgtacaaaactaagtaatagttggaagttcataatagttttttgatgtgatatagttcatataggatttgtgcacgatcatgattagatcattggaacatn

SEQ ID NO: 190 - DNA, 575 bp, Glycine max
  Peptide Sequence Number=SeqID_9485
  Probeset Number=SeqID_9969
gctttttttttttttttttaagaaaaatgacactgtatttttttaatatcagaaattagctgatccgacctcatggaccaagtgttcaacatgcagctgcttacatacactgagaatacacatatactacgtactgcatagctcacaaccattgatgagtgttgtcaccacccagatcagtagcagcaataaacaatcctcattggccataaataaaataaaacaaaacaaaaacataaaataaaataaaaaatcctgcatagtccacccattgtcgcatgcaaacttgtcatatttttttctgaaccaaaccacctattaatgatgaaactcctcacatagatgtatccctacaaatactaaatcgaacttaagccatatatagaaagtcactaagaccaattgacatgcaaccagccaatatgagaaaagaaacacaggtcaagaaaccattagtcagtgggaatcaaaatgaaagcctatgcagtcattaattggctctcaggaggcccaaatgcaactcgcatgtagatgaatgaagcgagatagatagcaagtcctaagttataaacgtg

SEQ ID NO: 191 - DNA, 1599 bp, Glycine max
  misc_feature (1)..(1): n is a, c, g, or t
  misc_feature (4)..(4): n is a, c, g, or t
  misc_feature (27)..(27): n is a, c, g, or t
  misc_feature (164)..(164): n is a, c, g, or t
  misc_feature (307)..(307): n is a, c, g, or t
  misc_feature (344)..(344): n is a, c, g, or t
  misc_feature (381)..(381): n is a, c, g, or t
  misc_feature (396)..(396): n is a, c, g, or t
  misc_feature (442)..(442): n is a, c, g, or t
  misc_feature (896)..(896): n is a, c, g, or t
  misc_feature (962)..(962): n is a, c, g, or t
  misc_feature (1032)..(1032): n is a, c, g, or t
  misc_feature (1162)..(1162): n is a, c, g, or t
  misc_feature (1165)..(1165): n is a, c, g, or t
  misc_feature (1192)..(1192): n is a, c, g, or t
  misc_feature (1194)..(1194): n is a, c, g, or t
  misc_feature (1217)..(1217): n is a, c, g, or t
  misc_feature (1317)..(1317): n is a, c, g, or t
  misc_feature (1334)..(1334): n is a, c, g, or t
  misc_feature (1388)..(1388): n is a, c, g, or t
  misc_feature (1390)..(1392): n is a, c, g, or t
  misc_feature (1405)..(1406): n is a, c, g, or t
  misc_feature (1448)..(1448): n is a, c, g, or t
  misc_feature (1507)..(1508): n is a, c, g, or t
  misc_feature (1558)..(1558): n is a, c, g, or t
  misc_feature (1570)..(1570): n is a, c, g, or t
  misc_feature (1574)..(1575): n is a, c, g, or t
  misc_feature (1578)..(1581): n is a, c, g, or t
  misc_feature (1584)..(1586): n is a, c, g, or t
  Probeset Number=SeqID_9970
nctnacctctagtagtctcgctgcacncaacacagacatcgcatgacctacgcgcacaggtagtgagggcatgagggtgatagagtgtgcggcgtgcgttgtgatcagatagatgagacacattgtgtgcctatagagaccgatcagtgtacctgtgtctacgnttttgtattatagtgaggtgttagacacttacagagtatgactatgctcacttaatgcatcataatctctaacgtagtgtgcagtcagagatgcgtatcagcctcatcgagtgcgtttactccgagtagtgtgtagacgactncacacgctctgatctatctgtagacagatagacatantgtccgtgtggacgaggcgcgcgcaagctgcagggangctatatgtgtggtncaagatcgtacctacgcgactcatagaatacgtagtatctcatacncacacatatctgtgtgttacgtgctgagcacgataggatcgtctctgtgttgtatcttgcgtctcttctcgtgagtcatggagtttgtcgtgttgccggtcatctcgcgtcgctccaccacgtcaccgagacgtgagctatgaaggtgtgtcggagcgacagttaggtgtcgacggtgcagagacgaagcaaaatcacagggtattgatgaataggtgagatgtggaggccgttattatttgaagtgactgatacttagtgatagctacgtgtgttacatacatatcacttcttcagcgtgttccattgatcagtattacgtctcgagcggtcgtcagaatcgtccttgtcgctcttcctagcgctgttatcgatgactcggttgagctgagtatacattcgcgcttcgtgcatctgctctcatgtatttcactctctcctacctctttgtacntactactcctcattgtcgtcagtccacgatatgctctctattctatcttactatctctgagtacgnacggcagacgtgtagcatttccaacacccacagcccatccatgcaactatactaagcatgatttaaaatntcatatatggacgaccctcattcactaatcaacacataacaccaacattcaattccacactgctcctatgacgacataggagagcattagagatgtgtgtacagggcgtgatagggtcatcgcgagatangtnatgacggctgacatgtgagagcgtagnangcgcgcgacggccggcagcgacngagcgacagcgagcccgcctctctctactcctgcggacgcacaacctatagtagtgatatgtctacgtggagaacagcacacacgacacactctacacangtcctgccagcactccnccacactcccacacacgacgtcgcagctaccgccgtgacaggcgagagtcgcanannntctatcattcttnnctgctggtcttctaattattgtatactacctccgcttactangatatctctcatatataatagttatatatacaccaatctcttacctagccttatctttnnatactcattgtctgtgtgttgtgtattgtgatttagtaatataatcattnatacaaattacncaannaannnnccnnncccaccccacacc

SEQ ID NO: 192 - DNA, 706 bp, Glycine max
  Peptide Sequence Number=SeqID_9486
  Probeset Number=SeqID_9971
gacttcgtcagtttgtttaggaggcagagttagtcatggctagaggtctttgccgcatggtaatgcgttgtgaacccaattcgtttacagaacctcgtccataccgacctcccgtacgcaaacacaacctcttccaacaaaagagattggccgaactacgtgaaggatctcaagtctcggtggagatccaatcagataagagtctgaagggaactgaacaggatcagaccactcttgtctcaggaattgatattcaggaaaagtcgtcgtctgatgttgttgctagcacctcgaagcctcagacgccatcaccgagtttggtcgggatgaagaaaacactaggttctcaagtctcgttgctacgttgttctacctgtatgcaaataatccagtccgataagagtctaaagggatcttctgatcaggatcagaccactcttgtctcccaaattgatatacaggaaaagttgtcgtctgatatcgttagtagcacctccaagcctcatcaaggtaagcatctccgatcaagttcaaagatgcacaagcccaaagcttttctaaagaagaagaagaagaagaagaagaagaagagctcacgcaaagctgtatccaccacctaagttaccaccactatctatttcctctctttttctttttttttgtacctttttatgcttgatcacgacttaagttatgttgtgcaatc

SEQ ID NO: 193 - DNA, 837 bp, Glycine max
  Peptide Sequence Number=SeqID_9574
  Probeset Number=SeqID_9972
catcctcgtcgttatcactaatctgtgtagcaactgaagacgagtagatgatatcgacacgaggtaacagtactagaccaatagtgtagtattctgggagagagagagaggacgatgaaaccgggtcatttagcatagcgaactgtgaagagctgaccggtcccgtgtggtgcctgagggtgtgaaactccgtagagaagcctatgatcgcgtgagagcccttttgaaaaagcatgagaaggcattacatgtgctggcaaatgcattattagagtatgagccgcttagtgcagaacaaataagcagaatacttctcccatatcgggaaggatggctgccagaacttccgtgaacccagaagcacgcagacaggggatcctggtgcgtgagtagtccctcctctatccccttccagttaatgtcagttagatcttaaaataagcactgcacagtatacctataagccttccaggtagttttcttaatgtggttttgacagcatccctcttttgcgcaggccacacttatggtaataagcatatagtataaagaggcctcagcgttgcagatatgcgaacgcacagttccaaggcactacagcaagggtccgttattagagaatgttggtcccctcctaagatcctgagggcaagatctccatgttacagttagctcatatgtaggatattggctattcccagataatgggtgtgtatagcactacgcgagtgtaactcatggtcaagtaagggtaccaatgcattaatgctgtggtaggaagtaccactgcgtagaatattatttatatatcccagtcatacgatagattgtgggttt

SEQ ID NO: 194 - DNA, 422 bp, Glycine max
  Peptide Sequence Number=SeqID_9575
  Probeset Number=SeqID_9973
ctttctcagatttagggtttctctcagtttcggctcggtcccagaaccaagatcgcagggcttcaagatgccgtcgcacaagtcattcatgatcaagaagaagcttgccaagaaaatgaggcagaacaggccaatccctcactggattcgtcttcgcactgacaacaccatcaggtacaacgcaaagcgtagacactggcgcagaaccaagcttggattctaagctgtcttacttttgcctatttgtgaaagctttgttctttccaagacattgttttcctttgtttggttctttagcgttttgttttttcagttttgacttgtggcagttacattgttcacagttgtgtaagacgatctttaatcaattatgtttccagattaacaaaaaaaaaaaaaaaatgttaaaaaaaaaaaaaaaa

SEQ ID NO: 195 - DNA, 700 bp, Glycine max
  misc_feature (539)..(539): n is a, c, g, or t
  misc_feature (544)..(544): n is a, c, g, or t
  misc_feature (612)..(612): n is a, c, g, or t
  misc_feature (644)..(644): n is a, c, g, or t
  misc_feature (659)..(659): n is a, c, g, or t
  misc_feature (664)..(665): n is a, c, g, or t
  misc_feature (680)..(680): n is a, c, g, or t
  misc_feature (697)..(700): n is a, c, g, or t
  Peptide Sequence Number=SeqID_9576
  Probeset Number=SeqID_9974
aagtggacatttgacagcgtgtgaaagactattaggtgctggtgccgatgtgaatgcatgtacccgatctggtggagtaacaccacttattcgagccgctttaatgggtcatgaaaaagtcgtacagcttctacttcgaaagggtgcagatgtattccatcaagacaacgacggcaacacagctcttcacaaagctgtacagaataatcatcaaaatgtcataaaattactattagattcgtctagcgattcaaatcgtttggaaggcatttgcaataacaagggccataaagcaaaagatttatcaaaatagtaactgaaaaaaaactcatctttaagaaaattataaatgttggcatttacttttctttatctttaattagccaatttacggcagcttcttaagttttatctgtttcagtattttaaaaagtgcgctttactaaatagaacaagagagatcatgagcttacgatttattgcttaatttcattatttttgaagcatttgccattgcaattcaaaatctttttagttanaattnggaagaattatctaaatataaattgtgctaaattattcatttcaagatcagtaagttgccattaatanaggtgctttaacccaaaatcggtactgaattntggatctagggaaanaaatnncgcattgggttttgnaaaaaaaaaaaaaaaannnn

SEQ ID NO: 196 - DNA, 467 bp, Glycine max
  misc_feature (417)..(417): n is a, c, g, or t
  misc_feature (445)..(445): n is a, c, g, or t
  Peptide Sequence Number=SeqID_9577
  Probeset Number=SeqID_9975
catagtcatccactgccaccgaggccaaggcagcatggtagtattcataaaaaggctttcaatgcttatgaatactcattggaggaccaagcctacgacaaaagttgctcctgcttctaacacgtttacctttcaacacaacaacaattacctcttcctttggagaacaatttggaagagttgcaagggtttttaaggaggtccttttcctgatctggggaaccggtttttgatttgccaccctggtcccaagtttcaaaattttgtccccattggcttaatttaaaaaaacttttttaactcttaaaaaaaaaaaggtctttaaaaatcttgggggaatttttttcccctccccccaattccccccttttttgggagagctgtgtgtcgccccctctctatttttaaaaaaaaatntttggggggtgtaaaaaggattgtgggngagaaaaaaattcttttttttt

SEQ ID NO: 197 - DNA, 1463 bp, Glycine max
  misc_feature (418)..(418): n is a, c, g, or t
  misc_feature (1403)..(1403): n is a, c, g, or t
  misc_feature (1463)..(1463): n is a, c, g, or t
  Probeset Number=SeqID_9976
ggtgccccccactgcccccatcatttaccgcttggctatctacgcgccggagccctcccgccccctgtcctgcttatttactcccctcctcgctccggattaccgatattatgttttgtccccgcgcgggcccctgccatgtggggtcttcgtttccctccccccctatccacaagatatgctctttccacccccccatgctcaccaccaaaatcaccccgaccactttttactcccaatgtaaaattataatacagcacccaccacccgcaactatcatcccctcgagcagtataaattcctccatccctccccttatttcttatattccgccccccttcacacccacccgttatgatatctccccgcctttttgagaaccgcgtgtgccgtgttcccccctctcccccccacccanccacaaaaacatttatattccacatgctcttgtcatttaaacttatcatcgcccagccaacccgggccatccctgatccatataaaaatattatattgtcgaagacgatccacccggcgcccgataacccatctttttatttctttttccccacgccctattctattcgccccctccattctatattactgctgccccctccgataaaaaacaacccgtcgctgggggcaataaaatgaacacggcgggtatactttcccagacaccatttgttgctctgatcacctgtgcggtcggcggataactagaataaattcgggtgtcgtcccacccttaccatctctctaccacaaaagttgttgtcaacccacgcgacgctattattcagacaaaaacgcgctgattgctagcttcgtaccatccttttttcgttacatcgactcgtgtcgtacacttgccaccgcctgtttaggctggaaattgtaagacagagtgttgctgcaacctgtgccaatgcgtacgcgtgcgccgcatatgtggcccgctctctacccccaaaaagcgcagcctccgaggcctcgggcgcggcggatgtatcattataaataaacataccgcgcgccgcacataatacacgcgcgtcgcgtgggatacacacggaagttacatatacgtgcgtactccgcccgcacgcggagaatggtatacaactaactatcgtgtcagaaaatatggcgtgaccgggcgcgctcgtttgccgctctcacaaaaatctcgcgcactgtgtctcctgcggattatggaaagacggagctcacctgacgccgcgcgggtgcgtgttagattcggcgtgttatagaacctcacttcgcatctccataacggcgccgcgcgcgcgtagctatatatgcgcgtcatcacgtcgccgcgcgacctatgctgctctgtaagtatggcattgactgagagtataatctcgtcgtgntcactctacacactatatgaaagagcgcacagatattgcggtaccgacgcgtacgcatgn

SEQ ID NO: 198 - DNA, 1364 bp, Glycine max
  misc_feature (94)..(94): n is a, c, g, or t
  Peptide Sequence Number=SeqID_9578
  Probeset Number=SeqID_9977
ccgcgacccaccaaacgcccccctccccactcccctcgcgagtgacgagtcccgcgtacaccccgcagaacagatgcgcgtcgccggccgcagnggggtacaatgtatctcccaactgcgaggaaaagaaagtataccgtattttttccccaaacccactggcgtccacgacaacaacacgaaagccaaatatcgccacactagatgcagcacaccttattcgtcaccctgactcagatagtagtcaagatcagctgtttagtaataatttgacacacgggcggaagacggatagcgcgggcaggtgcggctctcgcagaggatacagcgcttgatgtactcataaaagcacagccatctaatggcagccggacatacacaaactacactacgccacccgccacacacaacttaacagtagctcagcacactttatttatttaccgctcgcgtgccccgccgccggcggtcgcatgaactctgagcgtataccgaccccacaccgaccccgcccagactgccgccgcgacgaatcctcacaacacacacgctcgagcacacccagcatgacgcgcaaaaatgattctcctatacgctattatgccgacccgacgcacgaacgaatatagccgccatgcagaccgccccctcacgcaatatatgaggtatatcaccgcacaacgactgaacaccccgccgaccatgacctccatcagctgaatgctgccgcgacgccccacgaggaactcttctcgcgccgcatggcgcccatgcagccagttattatgactatcccgcgccactacctcgctgatacctccatgactctaaacaccggccacatcaacagcgacacacgaagacgagctcacctcgacgtcgctcgagcgcgggcccagtagccgcaaagcggccagtacacttattaataaggctcgcagtcaccgctttaatctactacacacaacgtgaatatagagaggcgaggccgctcacgctcgcgacagggcgcacataccgagatatatagtatcagagactcctagcgccaacacctgctcgagcacgagcaaggacctcgcaacagggagatgatagaagatagccgacgacgctccgtgcgaatgagacgacgagcacgcaaacacttgacgatgcgctcgcccagtcggaggatcgacgcacacgtaatatatacctttgcgcgcttcacccgcacctcgtccgcgcactgctcacacgcgctgctgtccgcaacacacagtgagctcgcgtatgcgtaggaagattacgatgcccagcgacccagacagatacatgcagcgtcgaacacaaatgcaatgtcgcgttgtatgacgctgacg

SEQ ID NO: 199 - DNA, 1737 bp, Glycine max
  misc_feature (1)..(1): n is a, c, g, or t
  Probeset Number=SeqID_9978
ncagctacgtaggccccccccccgctttgttaattttatttgtgctatcacgcctatcatacattattgtattgtaccactttataaagcagagggatttaaagcataagaatgcgtcgctgccttagttcatgttttgtcgcgagaggtaaggacaaggatgctcaggggaagagggcacaaccccagactcacactgtaaaaaaagttcatgtgtccaccgatgataatggccttagtaatagtggctcacactcgccaccaagagagaccaaaccaattgggctttacggatacgtgcaagagagacatggacatagtctctacacgtggaagcaagccttcttgaaactagagagtggttatctcttatgttatagtactggtgtctcgggttccccctgcaagatgctccctctgcatatatgcatggttcgcccgttgaaacgttctggcttccgggtgatctgtgccactcaattctcgctcacctttagggctaaagatgtagcggaaatgagagaatgggtagctgagattcaggctggcattgccgaagccttgaccgctcagtctgccccagctgcctgtactggtagagatacgttgtcagcattgcgaagcaagcatactgccaacagatactgtgctgactgtggagctccagatcctacgtgggtatcgacttccctgggatcattaatttgtatcgaatgctcaggagtacacagaagcttagggtcacatatatcgaaagtgagatcatttgagttggaccattgggatccaaaagacgtgaagactgacgggatcggaaattctgaagttaatacattgtatgaggcttccatacctaaacactgtaccaagccagacattaattccgacagagagacaagagaaaactggatcatggataagtatgtgcacaagcgcttcacaaagaagaccttgcacacaaacaatactcgccgtccatccacacctaatattaccctctctgttgttcctaaatctggaagcacttctaatcttcctgatgtctcttctcttcctctttccaacgccacatctacggccgccggtgccccatcactctctctcactctctctccaaaagagtccctctctccatcgccccatttggctcatgacttcacaagtaaactgccacctagtttacaaggcggtgtagttaggccacgtacgcctgactgtctaccgacttcccatatcggttccaatgtctttaataagaagatgccatacggagccgccaccgcagtggacttatcagcaaggagaggatcagtgggatcattcttatatgcccccaacaacactcgaacttctgcccgccgtagttcgatgtttcaaaatcagcgcgtaatgtagaaagattctctctctttctcattttttctattattctctcatccatccattccgctactattcttgggttctctatcggcttaaatatttttgttttatcttatatatatcttttttatcggaacacccctctggatagtagttttttttttctctcattcatgaatgattgaatatggactattgtaaagattcttctgagctttttgctctactttgtaaaaacttgtaatttttgtatcactacattcaaccccaaattaattattagtaaataatttctaatcaaaaaaaaaaaaaaaaaaaaaaaaaaaaaaaaaaaagaaaaaaaaaaaaaaaaaa

SEQ ID NO: 200 - DNA, 1353 bp, Glycine max
  misc_feature (22)..(22): n is a, c, g, or t
  misc_feature (249)..(249): n is a, c, g, or t
  misc_feature (353)..(353): n is a, c, g, or t
  misc_feature (468)..(468): n is a, c, g, or t
  Peptide Sequence Number=SeqID_9579
  Probeset Number=SeqID_9979
catgtgtcacatcgacgcgcgntcagcggatagacggatcgcagctgtataaattgatattcatagtgtccgtgtatacaacgcacgcgcgtcgcacgttgtcgattagttaagatattgtgttccttgcatgtgcccctcgcaggccgccgtcggctcgcatctcacccttatatatgatatgtgatgcgcgcaccggtgcgagtcggaatcatattaacagtagccgcataccgtccggaggtggantcgtaatatacgatgtccgtatagcgcatttggcgccgagagacgtgcgcgggagtatcatattaataccacgcacgaaggtatatctgccgataagtgtgtgnggtacagacgccgccaaatcagccccaccgcctccccccgctggccgcgcgtatacagatagaatatcaacactccgatggcaatagtggaatagcgggcaacgttcgcgcggtntttgtccagcaccgcgacacggaatgtagccgataaaatactgcggcgcgcccggttcgtgtatatacacgccgccgccagctattatagatcgagtattcggtctgtatatgcgcgtcgattcgcgcgactctcctatacatctcccgtataccgagagcgggcggtagaacggctcacgaatatagcgaagcaccggagtgaatcattgctatagtatccatcgcgcgaatacgaaagtcgaaatcgagagggttaatgacacggcgtccggcggcgtgttatgaggatcaaaccgtcgcggcggcgcccgagcaagtcacaacgcgaaccacccacaccgccgtaccaatacgagctcagtagtcgccgcggtgcggctctataggaagcattactattaggggaggatattaaaaggtaaggcgacgatgggaaagcgtaacatatagcgcgtaggggatttggagaagctcaccgcgctaattcggtgcggggcggcgtccctacatttatagacggcgcgcgtcggccatgtgtacgctttacaccgcgctgttgatagcgcgccgcacaggtagacggcccttggttaaatcgtcacagccgtactactattcccgatgagttggctgagtaacctcatatattatatatgcgcagctagcgtgtgtgcgagaggcgggacgtttatagacaggtcacctaggagtcgctcgcgcggtgatccggattatttgtatacgtatatacatacgtatactatgggtaaaaatagtcactgttccttacgcggcagtaggaggtgaaaaggtgggcgacggcgggcggaccgacgaagtgctgttgatgttgtgcagaaataaatcagatgagcggccactc

SEQ ID NO: 201 - DNA, 1472 bp, Glycine max
  misc_feature (31)..(31): n is a, c, g, or t
  misc_feature (80)..(80): n is a, c, g, or t
  misc_feature (1133)..(1133): n is a, c, g, or t
  Probeset Number=SeqID_9980
ccttcacccactgcgcactctcaccccctantaacatctgcagagcctaagaccatcaccaccactacaccacaccattntggtgatagtaatcgataccataacataattcttcgatccgaaccttacaactatattaaaaattagtactactcccgataagagataccacttatatactggagactgtacgactaagtacataatacacgcatcgccctgcaataatacatatcgctatgtgtgagacgagaaggctgcccgcgataaatgacgtgacatcatatagtaaatatctatagctatcctcctcacattgatatgtccaatttatattattcccacgctactcctatattctcactattgctgtgatacccacctccactcttatgacactctcatatgacctagatatatgtattagaactatagccacgaaatacgccgactaatcctatatgaatctatctcaactatgcaacgtaagagtaagtcactgccctacatatacactacagcctcttagtgtcaaccacccactcttcccctgtactccctacaaattccagcttccctattctcatttatatagatgtcgctattcttttataccacgatacaacaaatgagatatagataacacgacacgcactatcggcgcatattacatctatggcatccacccaatccccttaaatatatatgtgtggtgctgccatatactcaatagatacataatctattcgctcaatctggcgagcgcgcgacctatgttacgttggtgcatgaatctcccgcgcatattcgctcaatatctgttagcgtcgcctactcgcggagattacttcttcgccgggctactgtattcttactcttgataatccctaactcgcagaccattgcaaccccaagagctggtgtgtacgtctattctctatggatatacccccggaccacaacatcgcttaatatcccctcactctggattaaatgtataatacactagtttggctcaatagatatatactatcatttagtactcataactcacactcacctcaatgctctgcgcatacagtatagtatcacctcgccactaccgattcgctgcaaacatgtaggaacacatnatacgaggtcgctacaattaatagtaggccataagtccatcgctctgttacatacgatatgacacaacgtaatccatagccgagtatacaacccacatccaatcgtcacgcacattatctaatactctcacggcgtgcactattatataccatgccacgcaacacactcctgcaacaacctctgtgcatccgtattacatatctattctgtgctatatgcactacactatcacaaacgatactcgtcactacacagtcgtcgatacacatatcgtgtctcgcatgaactctcacgacgttaatacgcataggaatacgatataatacgctcatatatgc

SEQ ID NO: 202 - DNA, 1576 bp, Glycine max
  misc_feature (1)..(4): n is a, c, g, or t
  misc_feature (1576)..(1576): n is a, c, g, or t
  Peptide Sequence Number=SeqID_9580
  Probeset Number=SeqID_9981
nnnnaacaacgaggtttctccaccaccatagccattattcttctgcgtcaaaaatcttaatcttcttctgtctctctgcatttctcgccctcgccctcatcgccaacctcttccgcgcctccctctccactcactatctcgccatcgccaccaactgggtcgacaccaacgcaccccttcttattccgaatctcaccgccatacctcacaacaacaacaacaacaagggaaaagatgggaagattgcaaaaaggaggggtcccgagagattcctttcggctacatttgcagacttgcctgctcccgagtggcattggaagcagatgccctcggctccagtgcctcggctagatgggtgcactcgcagatggatgtgttcgatttcagcagcaacaagtgggtagatcagattaaaatgccaaaggaaatggctcattcacatttgggcatagcatctgatgggaggtatatatacattatctcaggacaatatggtatccaatgcagtgggcctactaccgcatccttttcgttagacactgcaacaaagaaatggaaacctttgccaccattgccagcccccaggtgcaccattaacatatgcatcagtactgcactcactcatttgctgtttgtcaatgtgtgttgcatgttattttttaaactgcagataaatgcggatgatgggacagcaattgtggtcataatgtggttattgcagctataattgtggcaccagattgcaatttaaaactatcgagctgctcgagccgaatcggctttcgctcgagacgaatcggctcgagttcatggatgagactgttgatggtacatcaaaaaaggactggacgggtggaagagctgcttccttcaatataattcccagcagcactggagctgctaaggctgtaggaaaagttcttccagcactgaatggtaaattgactggcatgtccgtacgagtagccactgtagatgtttcagttgttgacctcactgttaggctagagaagccagcaacctatgagcaaatcaagaatgacaactttgtaaaacttgtttcctggtatgacaacgaatggggttacagttcccgtgtgattgatttgattgtccacattgcatccgtggcttaaagaattgagtctgagcttggatatcatcgctacaccgctccaaatttttatcttaatcgagtttattttagtgtgaattcggaataaacactttgtgttgctgtgagagatatcattgaaaaacagtgcaatatgttgagttggtagacggccttataggtttttcctctcgtaagggacgattgactattctgtttcgttatcataatcatctagtataagcaacattttttgttctccaaaaaaaaaaaaaaaaaaaagccctcctacaacaacttttgcttccttttaagaggagtaattgcccccttgttggaatgatcagtattgctgcttgctggaagaaaatattatcctgctatcactccccacaacataccacgcccgcatcataaaaaagtactcctgcggcgactaatgagggaacctactaccaatan

SEQ ID NO: 203 - DNA, 1999 bp, Glycine max
  misc_feature (94)..(94): n is a, c, g, or t
  misc_feature (108)..(108): n is a, c, g, or t
  misc_feature (181)..(181): n is a, c, g, or t
  misc_feature (235)..(235): n is a, c, g, or t
  misc_feature (314)..(314): n is a, c, g, or t
  misc_feature (353)..(353): n is a, c, g, or t
  misc_feature (391)..(391): n is a, c, g, or t
  misc_feature (427)..(427): n is a, c, g, or t
  misc_feature (450)..(450): n is a, c, g, or t
  misc_feature (467)..(467): n is a, c, g, or t
  misc_feature (495)..(495): n is a, c, g, or t
  misc_feature (513)..(513): n is a, c, g, or t
  misc_feature (841)..(841): n is a, c, g, or t
  misc_feature (843)..(843): n is a, c, g, or t
  misc_feature (1109)..(1109): n is a, c, g, or t
  misc_feature (1128)..(1128): n is a, c, g, or t
  misc_feature (1207)..(1207): n is a, c, g, or t
  misc_feature (1295)..(1295): n is a, c, g, or t
  misc_feature (1366)..(1366): n is a, c, g, or t
  misc_feature (1428)..(1428): n is a, c, g, or t
  misc_feature (1502)..(1502): n is a, c, g, or t
  misc_feature (1513)..(1513): n is a, c, g, or t
  misc_feature (1525)..(1525): n is a, c, g, or t
  misc_feature (1536)..(1536): n is a, c, g, or t
  misc_feature (1563)..(1563): n is a, c, g, or t
  misc_feature (1603)..(1603): n is a, c, g, or t
  misc_feature (1640)..(1640): n is a, c, g, or t
  misc_feature (1688)..(1688): n is a, c, g, or t
  misc_feature (1709)..(1709): n is a, c, g, or t
  misc_feature (1734)..(1734): n is a, c, g, or t
  misc_feature (1747)..(1747): n is a, c, g, or t
  misc_feature (1941)..(1941): n is a, c, g, or t
  Peptide Sequence Number=SeqID_9581
  Probeset Number=SeqID_9982
cgctcgctgccctctcgcctctggctgctcgcgccgctgttgcgtggtgtggatggagtggggtgggggtgttgggtatgtaggtgtgtgtttngttggtttaaaaantaaatataaattatattctttcattgagagaaacatacactacgagcgaatcatgagtaaggtcaaggaacgnatccactatcactcacacaacaacaccactacgacaacatcacatgtcacatantcactgtacctctcaacacctattataattatgatcatataagtatatctaagacgtagtagtgtgtgtatagatatcncgcgtgtgatagaagagacagcgggcgcagacgaggganacgaggcagatatacaggtaggtgtagatgaatgaagnacagagaagacggacgatgacacatcacacccgcgncacaactcaccaacacatcaccntacatcacggcccatancctaatccatgcgcaagcgacgagagtngtgcgtcgcgcggcgcancacgacatacacacgcacatcaactctacctagcgagcgcgggcgcgcgcctgacggatgaattaggtgtgtagtgggacgtgatctgtgacgacgttcggtacgtcatgagatcgcgtgtgtcttatgcattgcggatcgacgtcgcatgaaggtgtgctatcgtacgtgattgcgattcgatctacggatgagcgcgcggtcgcgccgcacacggaagccggcgcagcaacgtcggcggcgtcgtgtggcgactgcgcgctgactgagtcgacatatgctgctggtgtacgatcgaactagcgttgaggtagtcactctagtgcgncntagctcgcgatctatgctctctactacatgtgcgtcgttgaacgtcaccctctgttaacacgtatctcacgcgcgtctacatgctatctacaaatcggtaggctcgatagacgctgccgcttctagcgcgagtggtgtcatgattgttgatgtttgtcaacacgagttcggacgtctgaacaacctctctatcccagtctatatatataagagcaattacacacgatgacaagagactgacgaatcgagcatgcaatcacaacganatgagatagacaatatgangtgtaatataatgatgagagagtaatcgctactatctcacatgagcactcgcggtgagcacgcaggcagtatccgcggngagatgtgatgacagacagacgctatgtcgactagatgagagtagagagatagctggagctgtacgaactaacgtgagacgtagcagngaggagagagcgagtagtgagaagacgcggagcatagtcaagaagcaacgcacatagggtcaaagtataangatagaataatctatactgatactgtggagaacgtgagatatatgcaatgaagtacatactncatatgctgtcgagatattgtgaggcatctatgatggatctgatctatatgcagtgtcatatgtactaggatcngcgcacgtgtngatcgtagcgtnctgttctcgtnttaatagatcgcgcatcctgatcgtgngtagctagagagcgatacatgacgactacgatgaacgctnacgtcgtctcgcgttactcgcgttgctatctcgttgngggtcgatgagagtgtgatgactagagtacataatacgcaagactaantcatatcgtaccgatacacantactgatgatgtttgcggttgtgancggactcgcgtantgtagatagatcacacatctcgctgagttctaagcataactgacgtcgcgtatcccagcgttccatatgatatgtccaagcaaatattactactcaactgtagtgtacgctgaggagtgtcacgtaggtgtggttgcatagatttgctgtatacgatggctcgtgatatcatcgactgatcttgttgttgactntgttgaagtcgactctcttttagatactgtgttatgttgcatgcgtcacgcgctagcg

SEQ ID NO: 204 - DNA, 1612 bp, Glycine max
  misc_feature (21)..(22): n is a, c, g, or t
  misc_feature (163)..(163): n is a, c, g, or t
  misc_feature (240)..(240): n is a, c, g, or t
  misc_feature (539)..(539): n is a, c, g, or t
  misc_feature (701)..(701): n is a, c, g, or t
  misc_feature (882)..(882): n is a, c, g, or t
  misc_feature (1102)..(1102): n is a, c, g, or t
  misc_feature (1106)..(1106): n is a, c, g, or t
  misc_feature (1216)..(1216): n is a, c, g, or t
  misc_feature (1303)..(1304): n is a, c, g, or t
  misc_feature (1368)..(1368): n is a, c, g, or t
  misc_feature (1370)..(1370): n is a, c, g, or t
  misc_feature (1374)..(1374): n is a, c, g, or t
  misc_feature (1452)..(1452): n is a, c, g, or t
  misc_feature (1553)..(1553): n is a, c, g, or t
  misc_feature (1597)..(1597): n is a, c, g, or t
  Probeset Number=SeqID_9983
tgactcctgccactctctccnntccttcctcgccaaaccctcctcaccttcctgcccttcaccaccctagatatgttaccttaagtgataggtagactgcgtcacccccccctacgcagggtgcgcacgcgctgatacgtattgaaggccttcttctttcttntctcttgttgttggtgtacagcgacgcagatatatcgatgtatagtgacctcagacgatctattcttctctcgtcanctataatatcacacagtcatcccgctacggctatgtcttacaccgtaatcgtcatacgatacaatctctctggccggtccggcagtatgactatgcctaatcatcttcatatcaaactacagttacgaggtcaataatgcataaacagattggaccagatattactatatcaccgcgacggccgacccggcgctccttactattaatgccaggttgcatagtcgtacgactgatcgtaataccctatctatcgagttttgtctcagcgtacatgtgctggcaacacgcgaccccccggncacacagagcatatccacacttgtcgtcacgcatgaagtcaccgacagtacagtcccacccgacaaatctgactagacctcttaactctatgccttgtgtctgtacactctatcgcgtccgctacggcaacccgtcctgcgaacgctctctatgttctcttnagttattcgggatcggcttggcgctgctgctcgccttcatgcctgttctgttctccgagtgcgtgtcaacatgaacatgcagagcgttcgcgacaaccggctatctacgctcccttcgaccggattctctctctcgacgctccgcttaacaacggtggcgattacgcggaactatcgctcnccgtgcgctattagtctcttctgttcatcagcggtctctctccacacgtgcttgtgtagaacgacgagtatcatctgtctcggtaccttggcgcccgcgacgactattctatctagctatatatatgtatattcgagtatgcgctgagctgtgtctatatgtagatatagtgatatagtgtgcgacatatggtgcatacagacttgcacacaatagaggngtcnctctatcattgtcgcagcgtaggactatacatcgcgctacatatatgatagtactccactacctgattcttatgccacatacctctgtgtaatatgctactagacgcttngctcatctctaggtgtagagtgcactgtgctcatgtatatcacgttctcgtggtatctatccttgcacgcgaccgcttgccacattnncacgactcctatactactttacacactctctcctctcatgatacaatgtgactaccacccgaanantatntcttgtatatgacggaacgtgatacactactatgctcactgtgattctacggaagccacccaagtgcgatcggaagcntctctattcctgtagatatgcataacgtctatcgcgaccgtgacgcgcatcgcagcgactaagtgatgatgcttcctctgctcttctatcgctgcactgtnatgacagacctcgctggctcacgatacatctcctcatcgtatgntcttattctcttcta

SEQ ID NO: 205 - DNA, 814 bp, Glycine max
  misc_feature (601)..(814): n is a, c, g, or t
  Peptide Sequence Number=SeqID_9664
  Probeset Number=SeqID_9984
atctttcgattcgtttgttctaacagttcccactcactttcgcaaaaacgcattgtgtttctctctttccgcggcgtagatctgagcagtttgggaaaccctaactgctctcaccactcactttgctttttttcctctccgatcaacgacctctttcgtcgccctaagtcatggcaggacttgcacccgagggatcacagttacgatgctcgtcaatatgataccaagatgaatgagttgcttacatctgatggacaggatttttcacatcctatgatgaggttatgacagttttgatgctatgggcttgcaagagaatctcctgaaagcatttatgcttatggttttgagaagcatccgttattccgcaaaaaggaatatttcctttctgcaagggattggatgttaaacaagaggccccatttggaaatgggaaaaaaagaaactttcgggttttggaattccgcgaaaacttggaattaaggggggctgaaaccccaccccttggttttaacaccaaaagaggagtttggtccccaaattgaaaaggttttggcgcccccttgagaattattttggggggaaagggccccccttggtnnnnnnnnnnnnnnnnnnnnnnnnnnnnnnnnnnnnnnnnnnnnnnnnnnnnnnnnnnnnnnnnnnnnnnnnnnnnnnnnnnnnnnnnnnnnnnnnnnnnnnnnnnnnnnnnnnnnnnnnnnnnnnnnnnnnnnnnnnnnnnnnnnnnnnnnnnnnnnnnnnnnnnnnnnnnnnnnnnnnnnnnnnnnnnnnnnnnnnnnnnnnnnnnnnnnnn

SEQ ID NO: 206 - DNA, 535 bp, Glycine max
  misc_feature (473)..(473): n is a, c, g, or t
  misc_feature (498)..(498): n is a, c, g, or t
  misc_feature (501)..(501): n is a, c, g, or t
  misc_feature (508)..(509): n is a, c, g, or t
  misc_feature (516)..(516): n is a, c, g, or t
  misc_feature (519)..(519): n is a, c, g, or t
  misc_feature (522)..(522): n is a, c, g, or t
  misc_feature (526)..(526): n is a, c, g, or t
  Peptide Sequence Number=SeqID_9665
  Probeset Number=SeqID_9985
tgggtcccccgggctgcaggaattcgcacgagaccattacctagaacatcctaatcgaaaaaaaaagtgtatatagatatcgattgtagtgagctgtatcttccatctttcaatacattggattaggtttataatttaaaaattttactcaggaaaatgagtggctttagagcagcaggaatgactacattcaagtgtccaacatttgtgctaagctgctaaggcgagctctaaagccaaatttgaagacagagggtctaaaacgaggacgcaacctgttgtgagggttcactcccatgggaaagatggggaaggcaatcactggaaaaataaagagattcccgtaaagattaagaggacgacattaagggaaaccccgcagcaggtccaacataaagtcccctaaaaccttcttagtattggaattgggtaattattttaaagctggtttttactccctatttaaaggaggngattaatcccaaaaaaacgcaacanacnaccaccnnacacccnaanaancacncacccccaa

SEQ ID NO: 207 - DNA, 1895 bp, Glycine max
  misc_feature (1)..(1): n is a, c, g, or t
  misc_feature (31)..(31): n is a, c, g, or t
  misc_feature (62)..(62): n is a, c, g, or t
  misc_feature (68)..(68): n is a, c, g, or t
  misc_feature (119)..(119): n is a, c, g, or t
  misc_feature (219)..(219): n is a, c, g, or t
  misc_feature (238)..(238): n is a, c, g, or t
  misc_feature (241)..(241): n is a, c, g, or t
  misc_feature (255)..(255): n is a, c, g, or t
  misc_feature (280)..(280): n is a, c, g, or t
  misc_feature (342)..(342): n is a, c, g, or t
  misc_feature (422)..(422): n is a, c, g, or t
  misc_feature (680)..(680): n is a, c, g, or t
  misc_feature (780)..(780): n is a, c, g, or t
  misc_feature (783)..(783): n is a, c, g, or t
  misc_feature (812)..(812): n is a, c, g, or t
  misc_feature (916)..(916): n is a, c, g, or t
  misc_feature (979)..(979): n is a, c, g, or t
  misc_feature (1044)..(1044): n is a, c, g, or t
  misc_feature (1330)..(1330): n is a, c, g, or t
  misc_feature (1356)..(1356): n is a, c, g, or t
  misc_feature (1480)..(1480): n is a, c, g, or t
  misc_feature (1522)..(1522): n is a, c, g, or t
  misc_feature (1627)..(1627): n is a, c, g, or t
  misc_feature (1630)..(1630): n is a, c, g, or t
  misc_feature (1678)..(1678): n is a, c, g, or t
  misc_feature (1776)..(1776): n is a, c, g, or t
  misc_feature (1781)..(1781): n is a, c, g, or t
  misc_feature (1861)..(1861): n is a, c, g, or t
  Probeset Number=SeqID_9986
ntctactcatatcggttgtgcctgcgcacgncatgtgataaatcacacccacagtgctgacnccgatntgtcgcgcacgcagcatcaatcagtcctctgctcacgcatcgaggtcgtantctcttcatcgctatacgtggcagtacctacacgctgcatacactcgtcccacgtccgctcgccagtcgctataggcacatcacatctcactctcagtgngcgcaccacagcgagtgtnctntactggtgtattcnagtagtattgcatacctagtgtctngtgacgcactctcacgctcactatctattatccactcagtgctggtacattgcatatttatnagcacagcggacaccatatcgtgtgacgcctcatgttcagtatcgcacacagctatgtcgtcgcgtcacgcaaagacgtncggcagtacgtctctcatctgaggcatctggcagctaacgggcgacaagacagaagtgggacataataccactaaacggctgaatcatcgagtgtccaactatacagctgtcactggagccctgaccgtgcagcactgacgccaccgtgccatcgacgtgggacagtgatgtctcgcgcggcctatcgcttcatcagcttgtacgcgtgactctgctacaacaccagagaatgacggttgcgcgatacgtgtgagtcnacgcgttgtgcacgcatgttgctctatcatctcagagacaatagaacagatatgtctacgcttatagggctcgccatgcgcgccacattctccgcgcacncanacggatacgtctgacctcgctatatatcntactaccgagtgtcgctgtacatcgtggtctacacagtaactagatgcatagatagctaccgcactcgatactatctcgactatataataataatatataaacncagctcgtcaccgcaaacatactagacatagagtatgaaatcatgataccacctctatgacangcacgccagagacgcgccagctacgactcccgcgtgcctcctacataatacgtagacacgctctntgtgctcatgattttacgctacactcctcatcatactattcaccgcacgacttcaccaagcgtctatgaaaattctcgcacgccagttaccgttatgctcactatacaatgtgatcacgagatctcagtgcgttagatagtattcaagtatatgtccatatgaggtagtaatgcagtaatggatgtgcagcaaggcgggtatgtagcgacgcagacgaagatcatggacgagaagactcgcgcgtgcctcgtcgccactctactgcgctgtcgtgtgtcaccacangaggcagcactcacagcgattagccnatccctgagagtatccgccgtccacgctcactctacatatgtaatgacgcgtagaagtagcaagagctgcactcacgacgccggctcactacatgacgcgctcaccgatcgtgttgctctcaanctgtccctacgctctccacgcttatcatctcgtatgtcaatngtagtactatctatgatcgctcgtgtggtcgctgcgctggctgcacgacgcgcctacgagtgcttatctcctctcgcccgttcgtctgtgtgccactatacaggnganacaatatggattgaggtgtctctcacgtaggtgacatttctctgctgngtagaatatcagactctcaccaacgcgcgggccggcggacacgatccacgaagcgttagatgttgatgatataaggacgagtgatctgcatacattcntcgtncagaatagagtatggcttcctccatgtttatagtaaaagatcaaaatattaagcgcttatgcatggccgatctcctagcncgccataactactactcacatctcgcagatactc

SEQ ID NO: 208 - DNA, 479 bp, Glycine max
  Peptide Sequence Number=SeqID_9666
  Probeset Number=SeqID_9987
gtcaagtttaacgtcgtgaaaggatctggtgtctctcttttcgctctcttcatcgataaaaaagagaaacaacgacttatatttgcctatcacatgcgtttgttttcaatattttctctcatgtattatttaatttatagtttttaatgatgaacgggttttatcaacaactccctacctcccccagtaatattactgaactccatttaaaatttcatacaacatatctcagcttgcctctccaagacatgcttctgtgccaatttgaacttggagcactgcaaagctagagttagtgttaatgctattttagcataatatttgatcaaacttttgcatgaactaatgtactctagataggaaactagagaaggctgtttatgcttgagctgtctttgtattctacaatgccattagttcccagttaaggggtcgaacttttaactcaaaatgtatgagtagtattttactatattgcc

SEQ ID NO: 209 - DNA, 1747 bp, Glycine max
  misc_feature (17)..(17): n is a, c, g, or t
  misc_feature (58)..(58): n is a, c, g, or t
  misc_feature (83)..(83): n is a, c, g, or t
  misc_feature (124)..(124): n is a, c, g, or t
  misc_feature (131)..(131): n is a, c, g, or t
  misc_feature (144)..(144): n is a, c, g, or t
  misc_feature (160)..(160): n is a, c, g, or t
  misc_feature (210)..(210): n is a, c, g, or t
  misc_feature (230)..(230): n is a, c, g, or t
  misc_feature (232)..(232): n is a, c, g, or t
  misc_feature (251)..(251): n is a, c, g, or t
  misc_feature (278)..(278): n is a, c, g, or t
  misc_feature (283)..(284): n is a, c, g, or t
  misc_feature (406)..(406): n is a, c, g, or t
  misc_feature (449)..(449): n is a, c, g, or t
  misc_feature (469)..(469): n is a, c, g, or t
  misc_feature (476)..(476): n is a, c, g, or t
  misc_feature (504)..(504): n is a, c, g, or t
  misc_feature (576)..(576): n is a, c, g, or t
  misc_feature (595)..(595): n is a, c, g, or t
  misc_feature (621)..(621): n is a, c, g, or t
  misc_feature (659)..(659): n is a, c, g, or t
  misc_feature (687)..(687): n is a, c, g, or t
  misc_feature (691)..(691): n is a, c, g, or t
  misc_feature (703)..(703): n is a, c, g, or t
  misc_feature (806)..(806): n is a, c, g, or t
  misc_feature (812)..(812): n is a, c, g, or t
  misc_feature (827)..(827): n is a, c, g, or t
  misc_feature (829)..(829): n is a, c, g, or t
  misc_feature (883)..(883): n is a, c, g, or t
  misc_feature (983)..(983): n is a, c, g, or t
  misc_feature (985)..(985): n is a, c, g, or t
  misc_feature (1094)..(1094): n is a, c, g, or t
  misc_feature (1096)..(1096): n is a, c, g, or t
  misc_feature (1142)..(1142): n is a, c, g, or t
  misc_feature (1368)..(1368): n is a, c, g, or t
  misc_feature (1403)..(1403): n is a, c, g, or t
  misc_feature (1515)..(1515): n is a, c, g, or t
  misc_feature (1524)..(1524): n is a, c, g, or t
  misc_feature (1528)..(1528): n is a, c, g, or t
  misc_feature (1534)..(1534): n is a, c, g, or t
  misc_feature (1555)..(1555): n is a, c, g, or t
  misc_feature (1566)..(1566): n is a, c, g, or t
  misc_feature (1604)..(1604): n is a, c, g, or t
  misc_feature (1628)..(1628): n is a, c, g, or t
  misc_feature (1630)..(1630): n is a, c, g, or t
  misc_feature (1633)..(1635): n is a, c, g, or t
  misc_feature (1650)..(1650): n is a, c, g, or t
  misc_feature (1672)..(1672): n is a, c, g, or t
  misc_feature (1686)..(1686): n is a, c, g, or t
  misc_feature (1688)..(1688): n is a, c, g, or t
  misc_feature (1690)..(1690): n is a, c, g, or t
  misc_feature (1692)..(1693): n is a, c, g, or t
  misc_feature (1695)..(1697): n is a, c, g, or t
  misc_feature (1703)..(1705): n is a, c, g, or t
  misc_feature (1707)..(1708): n is a, c, g, or t
  misc_feature (1710)..(1714): n is a, c, g, or t
  misc_feature (1717)..(1723): n is a, c, g, or t
  misc_feature (1747)..(1747): n is a, c, g, or t
  Probeset Number=SeqID_9988
cgatgtatgtatgtacntctccacacgctactcgttgattaagagtctatagtgaatnaactgtataatctatatgagcgcangggcatgtctttattagtagtatgagttcgcataccaaagntacggcntcgacacgacgtncatcatgacatggacncgactccagctcatgccatccccgcacgctcgatagcgacgccgccgacnctcccgtccgctgcctcctncncctgcgtactatgcgttcncactcgctcgtcgccgaagtgcatctnatctnnccaccacacacatttacatataccaacgcatctctagtctgtgtctgtatgtagttgtgaatgtgcgacgcagattgttgtccagcgcgatcctcgtgctatatagtcacgactcgcttctntacgctatggtgcactcgtctacctcgtcacgttgtacggatncgagacacgcgtagtcgtgntcaacancatgcatacgtagcgcatctcactacgntccaactacactgatatacagctagcacgcaattacgcgagaggcggcaatatcagtgtgtgttctcggcancctacactacctatctcgntcgacgctataactatcatatgtatnttgatgaaatcagataacgaggaccatgacatgcaagnagtcatcatcatatcctcatgactctanctangccaggtagggngtgtgtatactcatactcatcctcatacaccgaacacaccactcgagcgctcgccactaccacttgcatatgacataatactactcacagcgactctctgttngcagtngcgtgcatccgttcngnaattcgtatagtttgtgtgtctatagttctgtcacactcaaaatatatgacatnactcgctcttactctgcactcgtcatacaagagttgtattagcataatacatatgtgtatcgatttattatttatactattttatcaatcataagacacntnctcatcggtaatgaccataccactcatattcaacacagagatctccagttatgctatcgacgtatcacacacatgcacacatcgtctcgactataaactaacactcatntntcttcagcagcgccgtctgtatacaatatatgatattaactatcanatcttcaaacacgactactacaaacagtaagagcgtacacacttattacacaccgtcaacgacctactacactctctacacggtacgcacgcattgaccatctatctgatccactcctccatctctccacatgtcaacatagtatccatcacaactacaacactctaatatcactactaactatcctatttactctacacacatctagacataatattagtatttntattctaagtgacacaccgctgcctctcatctacnaccagtcgctctcactcagtctacacatatgtaaatagaatacatacatcatcatgtataatagtatagataatgtacatgtactcatacgatagcatatacatgtacacanaatcatgantatnatattncacgctctatgtcgcctcagnctataaagaanaagagacacttacatctactacacataatatcactatntccagtctactatttgtaattacngnttnnngcccctcctcgcccngcacaccacacagccgcacaanatcaaggaaccacncncnanntnnngtttcnnngnngnnnnnccnnnnnnnccccccacaaaacaccccaaaaan

SEQ ID NO: 210 - DNA, 538 bp, Glycine max
  Peptide Sequence Number=SeqID_9667
  Probeset Number=SeqID_9989
attccattccaaatccatttgagcttcacaacagctagtgtgtccgtgagcttctctcttccatgtgcgtgtgtgtgtaagcagcactagtgagtgtgtctgctttgctagcgtgctgagcgcaggcagtagtagcacttggctcttccgccggtcgtgtatcagtgtactcgagtgctagcgagtagttctgggctaacatgacaaacaccgtgaagggcgttggcctggatgctgccggcgaggtgcgtcgctacccatgtcggagatgaggtgaggcggcgcaggtgtcggtagcggtttgaggatgattctgcgatcgtgatgtctcacgggcggaataggggaggctgcgggatcatgggccgagcgctggacgtttctacgccattggaataatcttgttcgttagtaattagagattaagggctatgattagagcactaaacgtgttggggtgctaatcatcgaaaccacgtgggctcttagattagggtggactgatggcggtgattaattggatcagctctttttggtc

SEQ ID NO: 211 - DNA, 602 bp, Glycine max
  Probeset Number=SeqID_9990
gtttggcaggattcatgtaatgaaaacgtgaaagatgattcttgctcatgaaacatccttgcagtgcacatacaggtacctaatgtctccttgaacggctatcattggactggtcactataatgcggcttccaagaaatgacaacgaggactattccctaccatcatggtgattactccactctacccttccttaatcattccactctctctaaattcaatctatcaattatcgctctaaacccatggaacacgccttcctagccatcgccgccgccacacgccagcttcttcgtggttatgctcctcctttctgccgccatcctcctctgccagcaccaccgcaactccaccaaagccccaacccgcagcacctcccagattcgaacccggtgggtcccccaccgggacccctcctcccgctccgtcctggaaaactggtcctccgaccccacctgatcaagatctcctgggaggagctagccccggccaccaacaactatacccctcacctcatcagaagcgatggcagctccagcctcgtttacaaggcccgattctccacggggccacacgtgggcggcaaaaaaccctcccccaacc

SEQ ID NO: 212 - DNA, 1780 bp, Glycine max
  misc_feature (85)..(85): n is a, c, g, or t
  misc_feature (176)..(176): n is a, c, g, or t
  misc_feature (178)..(178): n is a, c, g, or t
  misc_feature (192)..(192): n is a, c, g, or t
  misc_feature (196)..(196): n is a, c, g, or t
  misc_feature (219)..(219): n is a, c, g, or t
  misc_feature (295)..(295): n is a, c, g, or t
  misc_feature (365)..(365): n is a, c, g, or t
  misc_feature (522)..(522): n is a, c, g, or t
  misc_feature (642)..(642): n is a, c, g, or t
  misc_feature (799)..(799): n is a, c, g, or t
  misc_feature (874)..(874): n is a, c, g, or t
  misc_feature (1065)..(1065): n is a, c, g, or t
  misc_feature (1121)..(1121): n is a, c, g, or t
  misc_feature (1137)..(1137): n is a, c, g, or t
  misc_feature (1197)..(1197): n is a, c, g, or t
  misc_feature (1210)..(1210): n is a, c, g, or t
  misc_feature (1238)..(1238): n is a, c, g, or t
  misc_feature (1291)..(1291): n is a, c, g, or t
  misc_feature (1298)..(1298): n is a, c, g, or t
  misc_feature (1348)..(1348): n is a, c, g, or t
  misc_feature (1433)..(1433): n is a, c, g, or t
  misc_feature (1437)..(1438): n is a, c, g, or t
  misc_feature (1443)..(1444): n is a, c, g, or t
  misc_feature (1502)..(1503): n is a, c, g, or t
  misc_feature (1505)..(1506): n is a, c, g, or t
  misc_feature (1543)..(1543): n is a, c, g, or t
  misc_feature (1549)..(1549): n is a, c, g, or t
  misc_feature (1580)..(1580): n is a, c, g, or t
  misc_feature (1619)..(1620): n is a, c, g, or t
  misc_feature (1631)..(1631): n is a, c, g, or t
  misc_feature (1652)..(1652): n is a, c, g, or t
  misc_feature (1654)..(1655): n is a, c, g, or t
  misc_feature (1659)..(1659): n is a, c, g, or t
  misc_feature (1662)..(1662): n is a, c, g, or t
  misc_feature (1665)..(1666): n is a, c, g, or t
  misc_feature (1670)..(1672): n is a, c, g, or t
  misc_feature (1727)..(1728): n is a, c, g, or t
  misc_feature (1744)..(1747): n is a, c, g, or t
  misc_feature (1754)..(1754): n is a, c, g, or t
  misc_feature (1766)..(1766): n is a, c, g, or t
  misc_feature (1771)..(1771): n is a, c, g, or t
  Peptide Sequence Number=SeqID_9668
  Probeset Number=SeqID_9991
caacatattgatactaatagatgatgtcgctgtagttgcgggtgattatcacgtaaacgtggctcacatccgacatcacgctgcnccgcgtcctcctcttctggttcccacacctcgcgccacgcgcgcagaagtcattggttgtttatggtatatctgatcgttatacgaccacngngccttcctatcgcntggnggggcgtcgtcggcagcgcgcgncacagcagctagacaatgatattatcgtacagatatagatgtcacacgcacgtgcgatatatgtggagacacgcgnctgggtgtatgcgcgcgcgcgtatgtgttagacgctacgcgcacacagcagagatagtacgtgagttaantaagaaggacagagatagagcgtgagcagggtgagtgaggaggttgtgttggtggtgcaccacgcacacggactcgctctccactccactgtcttcagacatatactcttctctcacagcgcgattagctgtacatcgactgtagcaagcatcgtgntgatgaacccacgaaatcatatatagtatatgacacagcgcagcgtcgtgtcggcagcatatgagatagacgtcatgagacaatgagtaagcgagtagtagcgtcagagaggtcgacgtnggcggtgttgacattgtatatcgacatgtcgagctcacgcgcgctccatagtagacggtgggtgtgatgtgagcggtgagtgcgggtcgcgtgtcagcgcggggtggcgctagtacagtcgcaccgtgcggttgtgggtgaggatgtgtgcgctagnctgcgggcacgtaagattgtacacgtatatgtcgtgcactcagtcgagcgtagttgtgtatttactgatagactntgcacaagcactctaccgcagcatcagttctcctatattctactaattcattaagttaatccacatacatagatcttcagaacgcatataagagaaagatcatcatagcatagagcgcaaagtaaatactaacaacaacgtagcgagagaaatagatactagtaggcgagcttcgagagatgtttgcgagntcattgacattcgcatcgtctcccagacgtatcactagatgtagtgactaagcagntatacgaggcgtagtnctggcggtgagcgcgacagctgagggacagtcgagaggtttggccgtgtggcggccgcgngcgggcagagacncggagtcgacggacgcgtgacatcaatngcagcgcataccggctagtctgaggacgagaagaggatgataacggagtatgnggtgagngcgaagagagagagagaacgcgcgcgagagatagcggagaaaccggcagnatagcacaaagcgcgcgccggtcgcggcgcgcgggcggcgcgactatcactagataatcaatattacacgcgttaataacatcanttannataannactaaataatataacatgaaagtgtaatagtatgatatggtctgagggggacgataannanngcatcaatatattgtaatatacacatacattcataantatacnccatactactacatctcacgacgactgagangagacatgacgtacctagagacgcccggtagcccaccgnngcactctctcntcatgtgacaaccgagcacantnntacncgncgnnacannnaaagagacaaagagaaagtaggatacagctgaagtatgaaaagatataatggagnnccagaggtggcacaannnntccagantaggacgcgcanaacanaaaaaacac

SEQ ID NO: 213 - DNA, 920 bp, Glycine max
  Probeset Number=SeqID_9992
gtcgcatgcacgcacacggatgctcgattctggcgcgcataatatatcaagattcttttaattgagcaacgaatgctctcaagcaattcaaatggtcataacttgtcacacgaaagtccgatttaggcgcataatatatcgagacgctcgaaattgaacaacgaatgctctcgagaaattcaaatggtcataacttgtcacacggatgtccgattttggcgcatcacatatcgagacgctctaaattgaaaaccggaagctctcgagaaattcataacttgtcacatgaaagtatgattctggtgcataatatatcgagacgctcgaaattgaacaacgaatgctctcgagaaattcaaatggtcacaagttatcacacggaagtctgattcaggcgcataatatatccagacttttgaaattgaacatcggaaggctctcgagacattcccatggtcaaaacttttcacacggaagtccgattctggagcatcacatatcgagatgctttaaattgaaaattggaagctctcgggaaattcagatggtcataacttgtcacacgaaagtccgattcaggcgcataatactaactgagacgctcgaaattgaacaacgaatgctctcgagaaatttaaatggtcataacttgtcacacggaagtccaattctagcgcatcacatatcgagacgctgtaaattgaaaaccggaagctctcgggaaattcaaatggtcataacttgtcacacgaaattccgattctggtgcataatatatcgagacgctcgaaattgaacaacgaatgctactcgagcaattcaaatggtcataacatgtaacacggatgtccaatacaggcgcataatagatcgggacgctcggaattgagcagcgaatgcactagagtcgacctgcaggc

SEQ ID NO: 214 - DNA, 1498 bp, Glycine max
  misc_feature (10)..(11): n is a, c, g, or t
  misc_feature (14)..(14): n is a, c, g, or t
  misc_feature (18)..(18): n is a, c, g, or t
  misc_feature (81)..(81): n is a, c, g, or t
  misc_feature (182)..(182): n is a, c, g, or t
  misc_feature (246)..(246): n is a, c, g, or t
  misc_feature (482)..(482): n is a, c, g, or t
  misc_feature (609)..(609): n is a, c, g, or t
  misc_feature (728)..(728): n is a, c, g, or t
  misc_feature (955)..(955): n is a, c, g, or t
  misc_feature (1138)..(1138): n is a, c, g, or t
  misc_feature (1140)..(1140): n is a, c, g, or t
  Peptide Sequence Number=SeqID_9669
  Probeset Number=SeqID_9993
tttatgttgnngtngttntctgttccggaactccaactgtaagtcccgcatatcctatatttcttcatttgtgtaaatagntagactgtgtggtccccccccccacccttctcccgcatactacaatacaatagatgaggatatgtcggtcttccctcctttattaacttctaacataactnttatccctccccccccccacaaatttataagatatgcatatacaaataataaataaacacatcnttatatctataccacccttcaatacctatggctctcgtcactccacacaataaaatatatatacactagattagcataacatttattagatgttcttaactccatataaacaattaacataatacactacatcaatcctgatcttgatactagttaactgatattacagcagtacttctcacatgtactaaataataaaaacagtctccaacacccaatcctataactcgtcgtgngcggaggtgattattttgtcactaagaagaaaacacctacaatacataacattaacaaacgagctcctcaccacatatagctcaaatgttatatgaaataaaagctaaagaggagagccgaggttancagatacaacaacactcacaatataacaacgaaacaatacacacactatacacactccattccaccataacacatcacctccgacttgctctctgggtgtggtgttgtgagatggtgcntggttcatggcctctagctatacgtaaacatcgtagagacagccactcataacaaaactctactcgaaactaagacactcacaatacgaaacgactgatactcaactgtacgacagtgcacgatcaccagctcagtcgtcacctactccatttcgatacaacacccaaccgcgcttatatataaattgagcgatacattcataccacagccataactgtctagtganttcattcgacattcgcatccatatttctagcaatatatcctccgcacgttgtctatctgcatgagactatattaatacttctacaactcgtcgcacctgctagagtatggatgatatcacatctaactctcttctccagtcccactcctactcctgacacctgattatactgtctgataattntntatagatcctctatccacactgcttcacagacaatctagctacgcctatacggactatgctatcgcgagtcacccactactcaccgatcagtacatatatttcactctctcaagttacgtcgagggtactcgcctctcgtcatgtcacactcacatatctcttgtatgtaatatcgctattccttatttagacgaaatctcacgacacacacgtactaactgcaagagaagctagacattataatcaacagaccacataacgacttatctccttatcatctttatcagcgcactgacgatattataacgaaagaaccactgccaatcgacatatgcaaccaacgactgcaccaccgga

SEQ ID NO: 215 - DNA, 671 bp, Glycine max
  Probeset Number=SeqID_9994
ttcgggtaaaaccaccgaagaaaatccaaaagccatcaaatctgggtgatgctgctatcgtcaatctggttccaaccaaaccattgtgtgttgaatctttccaagaattcccaccgttgggtcgtttcgctgtgcgtgacatgagacagaccgttgctgtcggcgtcatcaaggctgtcaacttcaaggatgcatcaggcggcaaartcascaaagctgccgaaaaggccgccaagggcaagaaatagcaacctaacaacaacaacaacaacaacaacaacaaacaaaacttcacatcaattcttttaacatccacgtggtttttgaaaaaatgttattacttcttccatcgcaaagaattccgaagaatagcgtacgagctaaaattcattccgtattaaaataaagagaaaactgtttatttttatatacacatacattcaagcatccattaaagaatgattctttttttgaaacaatacgttttattttttagataaaataataaaaaaaaacattaaatytaattaaatagtaggaatgccccaaacggtaacattattttcaattatccccgcattttataatgaataataaatcaataaaaacacattatgaattgacattaaagaatttaatcactactcgaaataaaagaagttgattgcacg

SEQ ID NO: 216 - DNA, 1596 bp, Glycine max
  misc_feature (99)..(99): n is a, c, g, or t
  misc_feature (110)..(110): n is a, c, g, or t
  misc_feature (167)..(167): n is a, c, g, or t
  misc_feature (196)..(196): n is a, c, g, or t
  misc_feature (487)..(487): n is a, c, g, or t
  misc_feature (679)..(679): n is a, c, g, or t
  misc_feature (687)..(687): n is a, c, g, or t
  misc_feature (705)..(705): n is a, c, g, or t
  misc_feature (768)..(768): n is a, c, g, or t
  misc_feature (785)..(785): n is a, c, g, or t
  misc_feature (838)..(838): n is a, c, g, or t
  misc_feature (912)..(912): n is a, c, g, or t
  misc_feature (938)..(938): n is a, c, g, or t
  misc_feature (958)..(958): n is a, c, g, or t
  misc_feature (964)..(964): n is a, c, g, or t
  misc_feature (1078)..(1078): n is a, c, g, or t
  misc_feature (1236)..(1236): n is a, c, g, or t
  misc_feature (1267)..(1267): n is a, c, g, or t
  misc_feature (1271)..(1272): n is a, c, g, or t
  misc_feature (1296)..(1296): n is a, c, g, or t
  misc_feature (1317)..(1317): n is a, c, g, or t
  misc_feature (1344)..(1344): n is a, c, g, or t
  misc_feature (1352)..(1352): n is a, c, g, or t
  misc_feature (1373)..(1373): n is a, c, g, or t
  misc_feature (1472)..(1472): n is a, c, g, or t
  misc_feature (1490)..(1491): n is a, c, g, or t
  misc_feature (1493)..(1493): n is a, c, g, or t
  misc_feature (1501)..(1501): n is a, c, g, or t
  misc_feature (1507)..(1507): n is a, c, g, or t
  misc_feature (1540)..(1541): n is a, c, g, or t
  misc_feature (1557)..(1558): n is a, c, g, or t
  misc_feature (1561)..(1562): n is a, c, g, or t
  misc_feature (1567)..(1567): n is a, c, g, or t
  misc_feature (1573)..(1573): n is a, c, g, or t
  misc_feature (1576)..(1576): n is a, c, g, or t
  Peptide Sequence Number=SeqID_9670
  Probeset Number=SeqID_9995
gtagatcatgcgcatagtaggacgggagtcatatcatagtatacatgtagatgacaatcagaatatcatcaatgaattatgaatacgcaagctatatantaagagagtcnttgacgatagcatatcagaatacgagagagagatcattgcgatcagacacacattcnaatgagtcacgacacgagaacactctctncgggtcaccagttcaacatgatgtgatagttgcttgtgctctcgtgctcatgactcgtcacaatggtatgagtatatttgctaatattattacatatatgtatatatatttcataatagcaatgttcgtactcataacatgtgattcaatgctagattcagtggtagttatcacactaactagtggcacagtaagccacagagcacgagtggctgagtgccatgcgcggttgtcggtgtctgcactgccctatctctgtctcgtacgctagtagtgcgtgtagttgtgctnccacacattctctgataatgtatacaaatgtatactagataggtgtctctatgtgcggtgctataatcagtgcatccttattcatctactgttgttggtgcatgcatcattcccgtcaactatacacgagacatacaccctaatcacgcgacaacgaagcagatgatgttgcgatcgaaagacagcacatcncaacagantctaactcacacatcatntctatgacgtgtgcagtagcctataacacatcgagacagagtgagatcgtgcgagtataggtntatgttgtgctcatctntttcatatataatgtactataattagtatagagatcaatatacatcgctctanttattgttgctacaacactatatcgcgcctcgatgccgttcggccacacactctcctatcgctctcttccatcncctgcactcgccgcacggtgactgtngtttgtcgtttgagtgatgntcgcgnggtcgtcgactcgtgtagtactgctcatctctcatctgcatccctatctctctctctattatttgtgatgctcatcattattcaataaacaaaaggagataaaagaggtgaacnaagggcgcgtcgagcgacacgcacacagacaaagaacaaacgaggtgagacgggtgtggcgtcgcgggcgctggtcagaaagacacacaacaccagcaccaacactaagtgcgagggtggcgggtgcgtggcgtgtgcgtcgacacactcgctcgccncctctactgacgctgtggctctggagggtgnccannctgcattgacaaatagtcgctccnattaacttgatgtgggggtgngtagagagtgatagtggtatcatactnctgcacangcaccactcctatcactgatnagatgatagagagaaaaaagatatatatgtctctcatttcttgatattactctatgctatatcctcccctatttctgtctcccatctctctctatattnccctatactctatttttnncnttctgtcntctttnccctcagagaggaagtacaccgccagcgcccannaacacacaccctcacnnccnnccacncccacnacncgcggaggcacataacaata

SEQ ID NO: 217 - DNA, 300 bp, Glycine max
  Peptide Sequence Number=SeqID_9755
  Probeset Number=SeqID_9996
ctgcagatatgcatatggcggggaccatttacctaatagacgcatgctgaacaacaagagagccaactatagaggttactgggcttcatgtgcaaccctttatcatgggccatcgacaactgatgctatagtggccattgctacggctaactggtggaagaaggcctacacattgaccagattatatttttatcactgctctgaagaccattaactccaccctctggttcatagcagaaaacagagatggccatgctggttctgccctcatagctgattaggctcccaaaaccaaggcga

SEQ ID NO: 218 - DNA, 1589 bp, Glycine max
  misc_feature (18)..(18): n is a, c, g, or t
  misc_feature (59)..(59): n is a, c, g, or t
  misc_feature (68)..(68): n is a, c, g, or t
  misc_feature (144)..(144): n is a, c, g, or t
  misc_feature (262)..(262): n is a, c, g, or t
  misc_feature (289)..(289): n is a, c, g, or t
  misc_feature (336)..(336): n is a, c, g, or t
  misc_feature (624)..(624): n is a, c, g, or t
  misc_feature (667)..(667): n is a, c, g, or t
  misc_feature (941)..(941): n is a, c, g, or t
  misc_feature (1231)..(1231): n is a, c, g, or t
  misc_feature (1361)..(1361): n is a, c, g, or t
  misc_feature (1363)..(1364): n is a, c, g, or t
  misc_feature (1366)..(1366): n is a, c, g, or t
  misc_feature (1405)..(1405): n is a, c, g, or t
  misc_feature (1442)..(1443): n is a, c, g, or t
  misc_feature (1445)..(1445): n is a, c, g, or t
  misc_feature (1507)..(1507): n is a, c, g, or t
  misc_feature (1512)..(1512): n is a, c, g, or t
  misc_feature (1516)..(1516): n is a, c, g, or t
  misc_feature (1541)..(1541): n is a, c, g, or t
  misc_feature (1555)..(1557): n is a, c, g, or t
  misc_feature (1561)..(1561): n is a, c, g, or t
  misc_feature (1563)..(1566): n is a, c, g, or t
  misc_feature (1568)..(1568): n is a, c, g, or t
  misc_feature (1570)..(1572): n is a, c, g, or t
  misc_feature (1576)..(1576): n is a, c, g, or t
  misc_feature (1585)..(1585): n is a, c, g, or t
  Peptide Sequence Number=SeqID_9756
  Probeset Number=SeqID_9997
tgcgtgggagtacgaatnaaatccggtgatgcgtagtaggagtgggtcagatgcgattntgggctgtntgtaattgtcatgattctgtcttaaggttgattatcgttttatcgatatttattctttatatgtgttggcagtctngtgtggtcgcgcgtggtgcgagtcagtcggaggctcataagaacattctagctctgtgttacatgagtagtacagagtatagtgcgtcggtgtgtgctgctcggcagtagtagtctcnggtgctcggtgtgcttcgttatgcttngagtgtgtgtatagtgctggagcttgatcagactgttactacaatanagtatacagattgtagagaccatgattgagatacgctcgcggcattgttagtattacagattgctaggattcactcgcacataggcatgaggagggcagatgtgagctgattacggtgtaatcagtgttaggtcagtgttagtctactatgtcttgtgatctgcgtgctttacgtatcatgtttatgcgtagatgcaacggtggtagactcagatgtgtatatattgaccgacatgggatatcgtgacgatagagttcaaatatactgaatggtcagcgatggcgtgnggggtgatgttgtacttgtcacggtgatcatttaacttgctgntgtatagtatcatcagtcacgtgtacgcattgtgcgtgacgtcgtagcgcgtatcgtgtgagcagacggctagtagagaggtgtgtgtgcgtatctatacaatatggagtagtgtgacgcgcaatttgggatatatatataatatatactctacatagattcgtatgcgactcacactcgcacagctatgtcgcgtcgcttagcccccgcaacactccatttttcttctgtacgtgagtattgtaagtgagtgtttgtgtcgtcttggagtggnttgttatgtttgtggtttggtggtgtgtgtgttctgttcttttgtgttgtgattttatgtgttggattaatgttgcacgcgattcagtacactttcattctactacaatcacccttccatccgttcattccattagtttcttacacatcatatagtcgtatattaataatatcattacaacctgatcagagaggcagggcgtcttcgtagcgatcgttatgaggagcgctgttatatctagtgatcgataatatcaattatggagtcatgttatatatatatatacaganttatgtattgtgatgcctacacctactcacttggcgtgtattgtatcgctgatcgtgagctgtgccgttgtgtgcagcccgattcctccgctcgcatgctcccatattagcctacctgtgacttcccgcncnncnccggagagacagaaacacaaccagatagacaagaggggnggcgggcggcggcgcggcggaagcgagggacgggcgnngngggggcgttgccgcgttaactaggggagggcgagatctagaagtaagaagaagagagagggnagagnaacnagccacacggacaacgacccaaccncacacaaacgaccnnncccncnnnncncnnnacancaacacccncccc

SEQ ID NO: 219 - DNA, 668 bp, Glycine max
  Probeset Number=SeqID_9998
cgagctttcgcaagcattttcgtcccattcaagccacatcatgaaaatgatgatgctgaagattcaactgaacgatcaatctcaaagcgagatatctttgaacgatttggacgattgaatgaattggctcaagcccaagctcaaaaggctttctctgatctccaacgagttttcgatgatttattcaagaagcacccaggaagtcacggaatcgaaattgaaattgaagacggtgaagttactactgaacgaatcattgaaaagcgagacatcttcgatttcttcggaagaatcaatgaaaaggcccaagacgaagccgctaaagttttcgctcaactccaaaagactttcgacgatatcttcaagcaccatgatgatgaagatgaagattcaactgaatccagcattgtaaagcgagacatctttgatttcttcggagaaatcaacgaaaagatccaagaccaagctggaaagttcttcaatcaattccacaagccaggtccaaagccaggtccaaagccaggtccaaagccaggtccaaagccagcccctaagccagcccctaagccagttgaagaagatgatgaaatcgaagttgtaacctctgcttaggcaccaactatttatagttatcattaaaaccgtaattaataaacttaaaaaaaaaa

SEQ ID NO: 220 - DNA, 518 bp, Glycine max
  Peptide Sequence Number=SeqID_9757
  Probeset Number=SeqID_9999
gcttggtgtgatcaacttctttggaatggtattcaccttgttagtgccagcaatcaaagggaaaatcactggaagagttgagtggggagaatgaagatgatggtgctgaggctatagagatggcagggtctgctaagacggctccagtttaaccaaagcctatgatcaacaaagtatttcataattctagtgatgctattattgtgcgacaatattacttcgggttttctacagctacatgcacaataatgaagtagatatattgttctcgatgctgaactctaaaaatccttatacagggtgtgtatttcattgtcgttactgattacagtgtatgccttgaaggaatcataagccagaaactaagctaatgaagggtgcctaataagaacgagttgggggtcccggtgctcatatctcccatgtgatagaattataatgcgcgcttacttgctgcggatagaaaaaatgggggaatgcaaaaccctggcgatcccaacatttaccgctgggaggag

SEQ ID NO: 221 - DNA, 623 bp, Glycine max
  misc_feature (301)..(301): n is a, c, g, or t
  misc_feature (429)..(429): n is a, c, g, or t
  misc_feature (550)..(550): n is a, c, g, or t
  misc_feature (622)..(623): n is a, c, g, or t
  Peptide Sequence Number=SeqID_9758
  Probeset Number=SeqID_10000
cagagaccggatacattgatacaagaccgctgacgccagctcgacgaaaacctcttgcgacgcgcggccggaggcgccacgaaggttgtgcgcgcctgaaccctgcaatctcaaacccgcaagcgagccaaaaactgactcgcgctcaatggcttagaaatttttcacgcacgactttgtatgtcgtcgtctatcagctcaatggcagggtgttgccgtgacaacggctggcgtctgcttcgctaatgtttgcatcgacggcgaagggttcgcccttgatcagggcggcattcatgcatgncgtacagtctcaaaaatgtatcggagaatgtcactatcgcggaatcgaagttcaagccacgctcaagcgacatcgaccatgacagagtttctcaacatcaacatcacagcttcgcttggcgggggtgnggggttgaacaatttatcctgcatttcggggcaaccttcggcacaaaggcggccgaactggtcctgggtttcgacccctttccgcggtcgtcgggatgccaaaactcgttccagggccggnaaaccgcgggaacaattgccatgcaatccggccgttccggggatctcgcacaaaaacaatggatccatctgnn

SEQ ID NO: 222 - DNA, 1355 bp, Glycine max
  misc_feature (40)..(40): n is a, c, g, or t
  misc_feature (112)..(112): n is a, c, g, or t
  misc_feature (204)..(204): n is a, c, g, or t
  misc_feature (216)..(216): n is a, c, g, or t
  misc_feature (257)..(257): n is a, c, g, or t
  misc_feature (554)..(554): n is a, c, g, or t
  misc_feature (632)..(632): n is a, c, g, or t
  misc_feature (634)..(634): n is a, c, g, or t
  misc_feature (666)..(666): n is a, c, g, or t
  misc_feature (1231)..(1232): n is a, c, g, or t
  misc_feature (1235)..(1235): n is a, c, g, or t
  misc_feature (1266)..(1267): n is a, c, g, or t
  misc_feature (1293)..(1295): n is a, c, g, or t
  misc_feature (1299)..(1301): n is a, c, g, or t
  misc_feature (1327)..(1328): n is a, c, g, or t
  misc_feature (1330)..(1330): n is a, c, g, or t
  misc_feature (1338)..(1338): n is a, c, g, or t
  Probeset Number=SeqID_10001
ccacacagcagacaccaccacgcgccacttacacacccangggggggcgtgaccactcttcctctcgccactgcccgatatcagcaccacacagtcgtacagagacatggantccgaggcacagtgacatactcactgccatacgatgtgttgtgtgtctgaatatcatgtctcgcaagtgcacattgccacgcaacctcgcanggtgctagggtngcgaacatactccacatacataagaaatatgtattccgtanattgaggtagaacagcgcactgcgcgcagacgagtgcaccgcacttgcacagtcttatgctagtgggatggcaatgagggcgcgagtgcatatgtggagtgagtgtctcacaacacaataagtaagtagactacaggtggaagtagactgcgggggacatcatgtgcccagaagaagaaaactacatacgctcattaaccacagggtgaattaccagataagaggtatacttattacaaacctagcggagctccgccaacacattatgacgcactttttattcaacattagtagagntgttgtgaaacacgagggtttgggttgttataatcaatatagacagggcggtggttaaacgagtaattcatcggtgtntncccctcagcacaacccacactggcaagagcanaagcacacgtatttatactttctactgagctcctgcgtgcttcgagtgcgaccatataattatatactctgctctgaaggatattctgtgtgcctatatatacacctctcttccgacatcatatccaaagtctttgacgactgggcgccctacatccgtgataccgacggtgtgcatcttggggcctctaagatttttatctatatgctatactccagagaagcacatatacatttggctctgtgcgagcgcacatggacgacatacatgttggttatgctatataagatacgtgacgcctcacatgctctatatcgattctagagtatgacgccatagatatacactctgagagatatgttgcctgtctctatttgacagcgtgtataatggtattcaagtcgcgtgttcgcgccggggagtgaacttacactgctatgctgtcatctcatgttgcatagttgcttgtgttctattcggcacgatccgtggcgctctatactatagtatggaggtgagggggggggagcgtgggcattgagcgttaggcctgatccttcgaagnnggncgggcgcgcccgggggtccgcgagtgtcgtnntggtgtggtcgggcaaaagagggggnnngggnnnggggaggggggggggggggggggggnngnaaaacganacccaccaaaaaaacaa

SEQ ID NO: 223 - DNA, 1794 bp, Glycine max
  misc_feature (1)..(1): n is a, c, g, or t
  misc_feature (4)..(4): n is a, c, g, or t
  misc_feature (19)..(19): n is a, c, g, or t
  misc_feature (27)..(27): n is a, c, g, or t
  misc_feature (45)..(45): n is a, c, g, or t
  misc_feature (62)..(62): n is a, c, g, or t
  misc_feature (74)..(74): n is a, c, g, or t
  misc_feature (87)..(87): n is a, c, g, or t
  misc_feature (90)..(90): n is a, c, g, or t
  misc_feature (137)..(137): n is a, c, g, or t
  misc_feature (159)..(159): n is a, c, g, or t
  misc_feature (168)..(168): n is a, c, g, or t
  misc_feature (203)..(203): n is a, c, g, or t
  misc_feature (208)..(208): n is a, c, g, or t
  misc_feature (309)..(309): n is a, c, g, or t
  misc_feature (311)..(311): n is a, c, g, or t
  misc_feature (343)..(343): n is a, c, g, or t
  misc_feature (345)..(345): n is a, c, g, or t
  misc_feature (387)..(387): n is a, c, g, or t
  misc_feature (549)..(549): n is a, c, g, or t
  misc_feature (551)..(551): n is a, c, g, or t
  misc_feature (579)..(579): n is a, c, g, or t
  misc_feature (581)..(581): n is a, c, g, or t
  misc_feature (585)..(585): n is a, c, g, or t
  misc_feature (658)..(658): n is a, c, g, or t
  misc_feature (686)..(686): n is a, c, g, or t
  misc_feature (716)..(718): n is a, c, g, or t
  misc_feature (720)..(720): n is a, c, g, or t
  misc_feature (725)..(725): n is a, c, g, or t
  misc_feature (767)..(767): n is a, c, g, or t
  misc_feature (791)..(791): n is a, c, g, or t
  misc_feature (801)..(801): n is a, c, g, or t
  misc_feature (851)..(851): n is a, c, g, or t
  misc_feature (870)..(870): n is a, c, g, or t
  misc_feature (873)..(874): n is a, c, g, or t
  misc_feature (883)..(885): n is a, c, g, or t
  misc_feature (887)..(887): n is a, c, g, or t
  misc_feature (893)..(893): n is a, c, g, or t
  misc_feature (898)..(898): n is a, c, g, or t
  misc_feature (908)..(908): n is a, c, g, or t
  misc_feature (1039)..(1039): n is a, c, g, or t
  misc_feature (1054)..(1054): n is a, c, g, or t
  misc_feature (1075)..(1075): n is a, c, g, or t
  misc_feature (1077)..(1077): n is a, c, g, or t
  misc_feature (1115)..(1115): n is a, c, g, or t
  misc_feature (1165)..(1165): n is a, c, g, or t
  misc_feature (1214)..(1214): n is a, c, g, or t
  misc_feature (1239)..(1239): n is a, c, g, or t
  misc_feature (1345)..(1345): n is a, c, g, or t
  misc_feature (1379)..(1379): n is a, c, g, or t
  misc_feature (1443)..(1443): n is a, c, g, or t
  misc_feature (1453)..(1453): n is a, c, g, or t
  misc_feature (1523)..(1523): n is a, c, g, or t
  misc_feature (1621)..(1621): n is a, c, g, or t
  misc_feature (1714)..(1714): n is a, c, g, or t
  misc_feature (1722)..(1722): n is a, c, g, or t
  misc_feature (1734)..(1737): n is a, c, g, or t
  misc_feature (1741)..(1743): n is a, c, g, or t
  misc_feature (1763)..(1764): n is a, c, g, or t
  misc_feature (1772)..(1773): n is a, c, g, or t
  Peptide Sequence Number=SeqID_9759
  Probeset Number=SeqID_10002
ntcntgcaactaacgctgncatcgatncgctactgacgacactgnaatgatactatatattntgttacactatncaacccaacaacntgnagagtatcattagtaagcagacagcaactctcgcactcacgtatttncgcgtagtagttgcacacacgncctccgcanctatagtcgctgcattcgatatatctcagacaganctacngcccacgttatatatattcttcgcccgacacatacactcatacccacagtatgatatagtgtatgcacacatcgatcgtcagcatcgctgcgcatatcttntntcgtcaagacgcaatgtagtatatatcgcgcncntcactctacccagatatatgctcagccacagccactatagtnatatgagaaccaagtctgcgagtcgccatgacagatttctcgcagcagagaatccccagttgttgtgttccagcaccgtgtgtcaacatcgtataattacgacagtgcgtgtgagtcagtcacacatcctctatattatacgcatgtgcattcagacaagtnancatcacttaacccgagctagtaggtgtngntgtntgactttactggttcatatctttgagtatataatacatcacaccaccacctcactctccactctgactatcangcacctgttcacatcatgcacgcatgtngcagcatgcatgacgtataccacattattnnngnggtgngtcgtattggtgtgtggtgtgtgtctgccactcacacacgcntcttctcatcttattcacaccacncgatcgactnatatgctgtgctcgcgtttcgtcgtgtgttggtgttttattaatataccntactgtatgtctcttttgnttnnctccttttnnntntatatnaattntatgtatttnttgtcgtaattctctccacaccagtacatatactatagacacatacgtaccgtacataagctccctcttcggcgctcaccactataatatccactactcaccaccacgtcagtagacgtcgccccggacgncgagtcatagaaatnaacacaaaatcacaacactcnancacacttggcacacgacatcatgtctttagtcacatancactctacattctgatcgccacgcgactactacttcttgtgtatgtgtgnttctatctagtcagaactagatatgtcatatcactatccactccatacntgcgctaacaccaccattttctttnggctacccatcacatctcgactatcgtgtgaggtatcgccgtctacatactatatatatccccacacagcttctttgtaatgttaccagcagaaagaaatctcctnacacagactattcacacgacagatagacttggtngggaggcgagagtggaggtgtgtaggtgggttgtgctagtgatactcgtcagccatctctgttntcatttacancacgctagagtatcacgtatccacgcactagcgtcaattatacacctccctcactctcatgatatgatanttatagtatactcacagcaacgccatctccatatgtgccagaagtgtagtctacacacacatcacgctctatcggtatagtgccgcgcgcgtggtcgnccacggcatcactatatcaccactgctagtaatgggtgaggggcggtctttatctccgatatttaatacatttcggaattcaaaatatactcnttttatgntctccgccccgnnnntttnnncacaaatacacacacccagnncgggcganngggggggcgggggacacacca

SEQ ID NO: 224 - DNA, 690 bp, Glycine max
  Probeset Number=SeqID_10003
actccatcgcttcccttttactctgtctccccctccccacaccaaaagcagcaagcaagcgcaccaccaagctaagctctgctcagctttgttggaaactcgcctcgacacacccacaatggcggcttcagtagcttgctccttcttctttgacgcggagctgctcggtgagccaggcatgcccgcgctggacgcgtgcgcgctctgcgccaagccgctggcgcgcgacagcgacatctacatgtacaagggggacacgcccttctgcagcgaagagtgccgggacgagcagatgcagctcgacgccatctccgccaggcaggctgcccggaggcagcagcggttctcgtcgggaacggaggcccggcgcgggcaccatgagtccaggaaggtgtccgtcgcgagctagccggttaggctcctcgcctagtaaagtagagcccggcttgaatcaatgggatcttaagaatcaccgatctggtgagacgaaagaggcagatctctccggtttgtctcgcctgaaccggagaagcaatgaaggatctgagaaaagttcatgtgctgaggctccggccatctgggtcgcccgcggacgcatgtttgtttgaggcttttgagccgcgcttggtgcagcaccatatgtaaatctaaaccactttgaatccctgtttggatacaattttttgccct

SEQ ID NO: 225 - DNA, 487 bp, Glycine max
  misc_feature (469)..(469): n is a, c, g, or t
  Peptide Sequence Number=SeqID_9760
  Probeset Number=SeqID_10004
aaccgtaatgagaaaaaaaattacgaaggttacagatctcttctcctcctcctctgtctcctcctctccttattcaattttgctcagacatgggctggtcgaaccccaacccttgcgaatgagacaccctccaatgcgacaggagcagctgcgtcacgaggatccagctcagacagaaagggatccgcaacactctccctcaggatctccataaactctccgagcttgtcatcctcgagactcacgtcagacggtcggagaagacagagcagcaggagaagacagagcagcggggtcggagccgagctcgtcgttctcgagactcacgtcagacgttagagaagacagagcagcggcatcggagaagacagagcagcgcggtcggagccgagctcgtcgtcctcgagacttatcagacgtcggagtagacagagcagcggcgtcggcgaagaagagcagcagtgtcgangatggtactgaagcggga

SEQ ID NO: 226 - DNA, 2320 bp, Glycine max
  misc_feature (1)..(1): n is a, c, g, or t
  misc_feature (30)..(30): n is a, c, g, or t
  misc_feature (34)..(34): n is a, c, g, or t
  misc_feature (40)..(41): n is a, c, g, or t
  misc_feature (73)..(73): n is a, c, g, or t
  misc_feature (76)..(76): n is a, c, g, or t
  misc_feature (103)..(103): n is a, c, g, or t
  misc_feature (156)..(156): n is a, c, g, or t
  misc_feature (162)..(162): n is a, c, g, or t
  misc_feature (193)..(193): n is a, c, g, or t
  misc_feature (237)..(237): n is a, c, g, or t
  misc_feature (250)..(250): n is a, c, g, or t
  misc_feature (252)..(252): n is a, c, g, or t
  misc_feature (259)..(259): n is a, c, g, or t
  misc_feature (282)..(282): n is a, c, g, or t
  misc_feature (288)..(289): n is a, c, g, or t
  misc_feature (300)..(300): n is a, c, g, or t
  misc_feature (321)..(321): n is a, c, g, or t
  misc_feature (323)..(323): n is a, c, g, or t
  misc_feature (328)..(328): n is a, c, g, or t
  misc_feature (333)..(333): n is a, c, g, or t
  misc_feature (351)..(351): n is a, c, g, or t
  misc_feature (353)..(353): n is a, c, g, or t
  misc_feature (370)..(370): n is a, c, g, or t
  misc_feature (374)..(374): n is a, c, g, or t
  misc_feature (388)..(388): n is a, c, g, or t
  misc_feature (393)..(393): n is a, c, g, or t
  misc_feature (396)..(396): n is a, c, g, or t
  misc_feature (420)..(420): n is a, c, g, or t
  misc_feature (426)..(426): n is a, c, g, or t
  misc_feature (428)..(429): n is a, c, g, or t
  misc_feature (435)..(435): n is a, c, g, or t
  misc_feature (438)..(438): n is a, c, g, or t
  misc_feature (447)..(447): n is a, c, g, or t
  misc_feature (463)..(463): n is a, c, g, or t
  misc_feature (479)..(479): n is a, c, g, or t
  misc_feature (486)..(486): n is a, c, g, or t
  misc_feature (516)..(516): n is a, c, g, or t
  misc_feature (535)..(535): n is a, c, g, or t
  misc_feature (540)..(540): n is a, c, g, or t
  misc_feature (550)..(551): n is a, c, g, or t
  misc_feature (582)..(582): n is a, c, g, or t
  misc_feature (591)..(591): n is a, c, g, or t
  misc_feature (617)..(617): n is a, c, g, or t
  misc_feature (628)..(628): n is a, c, g, or t
  misc_feature (644)..(644): n is a, c, g, or t
  misc_feature (669)..(669): n is a, c, g, or t
  misc_feature (695)..(695): n is a, c, g, or t
  misc_feature (708)..(708): n is a, c, g, or t
  misc_feature (719)..(719): n is a, c, g, or t
  misc_feature (766)..(766): n is a, c, g, or t
  misc_feature (825)..(825): n is a, c, g, or t
  misc_feature (854)..(854): n is a, c, g, or t
  misc_feature (875)..(875): n is a, c, g, or t
  misc_feature (890)..(890): n is a, c, g, or t
  misc_feature (960)..(960): n is a, c, g, or t
  misc_feature (973)..(973): n is a, c, g, or t
  misc_feature (1024)..(1024): n is a, c, g, or t
  misc_feature (1072)..(1072): n is a, c, g, or t
  misc_feature (1230)..(1230): n is a, c, g, or t
  misc_feature (1250)..(1250): n is a, c, g, or t
  misc_feature (1272)..(1272): n is a, c, g, or t
  misc_feature (1274)..(1274): n is a, c, g, or t
  misc_feature (1317)..(1317): n is a, c, g, or t
  misc_feature (1322)..(1322): n is a, c, g, or t
  misc_feature (1325)..(1325): n is a, c, g, or t
  misc_feature (1413)..(1413): n is a, c, g, or t
  misc_feature (1464)..(1464): n is a, c, g, or t
  misc_feature (1497)..(1497): n is a, c, g, or t
  misc_feature (1562)..(1562): n is a, c, g, or t
  misc_feature (1567)..(1567): n is a, c, g, or t
  misc_feature (1671)..(1671): n is a, c, g, or t
  misc_feature (1731)..(1731): n is a, c, g, or t
  misc_feature (1764)..(1764): n is a, c, g, or t
  misc_feature (1782)..(1782): n is a, c, g, or t
  misc_feature (2029)..(2029): n is a, c, g, or t
  misc_feature (2062)..(2062): n is a, c, g, or t
  misc_feature (2064)..(2064): n is a, c, g, or t
  misc_feature (2149)..(2149): n is a, c, g, or t
  misc_feature (2182)..(2182): n is a, c, g, or t
  misc_feature (2218)..(2218): n is a, c, g, or t
  misc_feature (2310)..(2310): n is a, c, g, or t
  Peptide Sequence Number=SeqID_9761
  Probeset Number=SeqID_10005
nctcgcatcatcgcgccttcatgcactgcngtancactgnnatccagcgcagccgcatagtcgatgctgacanctnataagtcgtagcgcagtcgcagtcgangtaatgcagtacgacccagcagtcgctcgcatcatcaatcctagtcgacgtanccatangtcatgctcatcgacatcgatcgtagcgtcngatatcagtacgaccacatcagtcatcgcatctatgtcgtcgantcgtacattgagntncatcatnggctgcgacagtcctagatcgtnaacgtnntgatgatcgangctacgtagcctgcctcagtnanctganctcantcggacccagcggactgncntatatagagtagcgcgnggantgacgctgatgtangagantgncgtgtcactaaatagcagtacagnactcantnnctgagnacnatacgatancaccatcatatgtacntcatactctcgtgatngagcagntacgtgtgtagtaccgagtatcatcgtatnacatcgcacgtgctactantgtcngtcagtagtnnagcagtacgatctaatggtcacgtcactcantgatctgcnatcgacgtgttgatgtagcagagtcntcggcgatcgnacatgactgactgtcnacgtcgatgcagtcgcgtacgactnatagcaacgcacgcagctcatgcgcnacacgtgtgacgntcgctcactancgtcgtgcgtcgcctgcatcgtcaatcagcatccgctacactgactnctcggcgtcgagagtagtcccagcagcagacctacgctctctacatcgagacgacgcgntagtcgttagtgactagatccaggtacgngtcactctgcatcaatactancgagtcgagtatgcngctcgtcgtctctacatgtacacacatactccgacgagtatatgcgcactcagtccagcgtcatagagantgaccagagagtnaagagtgagtggagcagacaaacgagagcgacgtaagtgattagcatacgngtagactgccagacgcgatgcatacccagacgcgacgtctacactagntcgagagccgagtacgagttcgagatcgctagcccgagacacgagacagcgctcgactagagacgagtcacgcgcccatcatcgttctcgacgggcgtatctcatgctgcagtgtactacatgtctcttctcatacatcacaactatactagtatcanagcacgagacatcatgacancgacatcatgcatgatgttgtncntatcatcattgtcatatctcgtctgctgatgagcactgtatcngtacntantcgactaggcgatgaaagatataacgcagacgtgcgtatgctgcgcgtgtgtgacgatgatccacgctgagatagtgacgtagactcncactacctacagatacatacatgcgcgactgcagtatgcatgaagatcgcntctgcattcgtactggtccagtagtcgacatcncgtcaccgagggtgacgagatagtcacgcacgatcgagcgacagctataagcgtaggttcgcgantgacntcagtgtatacactctagatctagctcaagtcataacacaattcagacacaaaatcacatatagatcatcgcgttcctcgcacacgactcgtcatgtagcggtnacagcgtatcatacatatgcgtgcgaggcacactatgtccttgtcagatctcacctatanacatgccgcaccctcacgacacgtgccacagcncgatagtgtgacgaaatntaagtctgcgctcggcgtctcgtcgtgctgtgacaacacggtgtgcgctgacagctcaccatcgacgcatcacgtcatagactatacatactctcactgccacgtagcattattcatcatacatcgtcagtcgtgagatgaacgtggacgcagtgtaatatatcactacgtcctacgcgctctgtagtgcggcgcgtgtaagcagacacaagtagaggcagttcgtgtgtcatgcgcactgcttgcngcacgggagagtatgtgtctgagcgcaccttgnanagacagcgtagcactcgaagtggtggcggagagtatacacatagtccactacgtcctcgtcactatcattcctactcccatgtgncggagtgagacatcggtgcagcccggcatacgncagcgcccaccacacactcctactacacgccctctnatagctagagcacgaaccgagagaacagtcgaatgcagagagagtataagagtgctgctagtcacaatatgagcctacacgccacaggcgcncgtcgcgtgg

SEQ ID NO: 227 - DNA, 619 bp, Glycine max
  misc_feature (601)..(619): n is a, c, g, or t
  Probeset Number=SeqID_10006
gcagccaaattgcgcgccagcatctcaaccgatcgcgcaacaccgtcgaaagagatcgtttccgcgctgcccgcgccgcgcgaaggcagcaacaccacgcactattccgtcgtcgacagcagcggcaatgccgtcagcaatacctatacgttgaacttcagctacggcgtcggcctcgtcgccgacggcaccggcgtgctgctcaacaacgagctcgatgatttcaccgccgccgtcggtgcctccaatgcctatggccttgtcggctacgaacccaacctgcccgggcctgggaagcggccgctgtcttcgatgtcaccgaccatcgtgctgaaggacggcaggccagtgctggtgactggctcgcccggcggcagccgcatcatctcgaccgtgctccaggtgatcgtgaacgtgctcgactacaagatggatgtggcggccgccgtcgccgcgccgcggctgcatcatcagtggcttccggatgaggtgcgcgtcgagcgcggttttcccgacgacgtgctgtttgagctcaaggcgatggaccatctcatcgtcgaaccgatgggacagacgtcggccaattcgatgacaaccgggnnnnnnnnnnnnnnnnnnn

SEQ ID NO: 228 - DNA, 1850 bp, Glycine max
  misc_feature (11)..(11): n is a, c, g, or t
  misc_feature (241)..(241): n is a, c, g, or t
  misc_feature (1522)..(1522): n is a, c, g, or t
  misc_feature (1565)..(1565): n is a, c, g, or t
  misc_feature (1778)..(1778): n is a, c, g, or t
  Peptide Sequence Number=SeqID_9762
  Probeset Number=SeqID_10007
tcttcgtatcntgctctcctctccccaacaccccccacgagtcagccgcgctatagacgcccgcttctaaaacatggcttgcgcacaccgttcatgtcatgcgtcttgtgtgtcgacctccccgcggctgcgtctcgtgtcggcattcgttctcccccaagggcgcgggtatcgttgcgtggtggtggaatgagggcagatcttcttaccgcgtcaacacctaactacaactctacagacnatacgcactcgtcgacgtaggtttgatgaagaggacgcgcggactgactatgccacgatcgatagcttgctctctattgtctcctcgatgatatagttcccgctatatgatatctcgccctccgctatttctatattatattatgtcacacctcacacctatactctcatatgtatcccgcctagctcgtttctccgcctagctcgacaggaggcgtgacgagccaattgtgcctaaagatactgataatgttgagctcacgcgtctatgactgactgatcctctttggctcacccatggcgagggagacgtcgatgtacgcggtatgtacgcttgatttcctcgatctacacttcgacttctgcgcgcacggccgtaggtgtagtcgcttaccacgcgtcatcatctacctccactacatagttgcgcaactccgcatcactcacatcatgtcaaattatgttagagtagcatatagctaccacccatccaccgttgtcgcgcgattattagtctcattgtgagacacgtgctgttcccctccgccaagattgacgtcgccgacgagaccatcacagctgtcgatcgctgctcgcacgtcacgctcgctaccaccagttatctacataccgcagcggtgtgtcgcaagatgcttacacggctggatgtaagctgaatatacttgacctcgcacacagtcgccacacgcggcggagtgacctgatgacccatagccagtgtgcgagtccccgctcacatgtatgtttgctacttagcactgcatgctctactacaccgctctcgtctaccctagcctcctcgtgatgtgcgctgagtctagactatactctcgtctaagagcgcaggtcgtcaccgttcgcgatcatatctctatcctcatcacacttccatgacatctcgctgtttaaactctctgcagcgcgcgtactgggctaggtcagcgagcacgcacgtctagccgctcgcgtactgtagtgctgtaccaacgcagactaggcgggtacttcgcatgcgagcgctccaccgatgctagcatacactagcactgactacgccgcgaccgcgagcttacactcgtttaatatactaacataacatatcgctcctgctgtccacgtgtcatatcacaggtacatctcgcatcgcgcgccgtctgagtagactctgccacatgcgcgctgcacaggtgtatcgtcgactctacataccaacacgcactatcgcccgagcagtcgcgcagctacacgccagcgctacgtncactacgccgcaatgtgtcttctatcatcatgcacgtcgtctnccgagccacctatgatcgttggtacggagccgcatatctactagtcacacgtgcctagctctatcgatctgcgtgtgtatcggacataggagtcactctgtgtcaggtgcagtcaatgtactcgacgcaaagtcgcagcgacagtatagtagtgatgagtccgctagtacgagcagacgcgctcgactatctgacgacacggcgaccgcggancgtagatcgcgttatcagtaatgtcatgtagataccgagatatacggcacttatatgctgataaaatctgac

SEQ ID NO: 229 - DNA, 518 bp, Glycine max
  Peptide Sequence Number=SeqID_6080
  Probeset Number=SeqID_10008
gtgatgttcaagctttcagaaagatcagtctattcacgatagttaacccttcaatttgggggaaatttccatgtaaaatcaatgccagattttgaagtggtttttattttgcatgaatcttcaattgaattttatattaaaaaaaaaaaaaaaaaaaaaaaaaaaaaaaaaaaaaaaaaaaaaaaaaaaaaaaaaaaaaaaaaaaaaaaaaaaaaaaaaaaaaaaaaacataaaaaaaaaaaaaataaatgggcggccccccctaaaaaaaaaccaccgcctctaaattgaaaaaccccgggaaaatttaaattttggggcctcaaaaaaaattcgccttgcccagcttttcccattcggaagaggaaaaaaaaggggggccgcccccacaattgcccaaaaccaaaaacgcttttttccaaatgggttacaaaacaaaaggccccccaaatcatgcttttcaaccgaggtggaacccaccagcagggggaaccctacccttgcctgcgcccaaaaac

SEQ ID NO: 230 - DNA, 785 bp, Glycine max
  misc_feature (117)..(117): n is a, c, g, or t
  misc_feature (607)..(607): n is a, c, g, or t
  misc_feature (615)..(616): n is a, c, g, or t
  misc_feature (631)..(631): n is a, c, g, or t
  misc_feature (635)..(635): n is a, c, g, or t
  misc_feature (652)..(652): n is a, c, g, or t
  misc_feature (657)..(657): n is a, c, g, or t
  misc_feature (659)..(660): n is a, c, g, or t
  misc_feature (662)..(662): n is a, c, g, or t
  misc_feature (667)..(667): n is a, c, g, or t
  misc_feature (669)..(669): n is a, c, g, or t
  misc_feature (685)..(685): n is a, c, g, or t
  misc_feature (689)..(689): n is a, c, g, or t
  misc_feature (700)..(700): n is a, c, g, or t
  misc_feature (710)..(710): n is a, c, g, or t
  misc_feature (717)..(718): n is a, c, g, or t
  misc_feature (725)..(726): n is a, c, g, or t
  misc_feature (728)..(728): n is a, c, g, or t
  misc_feature (732)..(732): n is a, c, g, or t
  misc_feature (737)..(737): n is a, c, g, or t
  misc_feature (744)..(744): n is a, c, g, or t
  misc_feature (749)..(751): n is a, c, g, or t
  misc_feature (756)..(756): n is a, c, g, or t
  misc_feature (764)..(764): n is a, c, g, or t
  misc_feature (767)..(767): n is a, c, g, or t
  misc_feature (772)..(773): n is a, c, g, or t
  misc_feature (775)..(775): n is a, c, g, or t
  misc_feature (784)..(785): n is a, c, g, or t
  Probeset Number=SeqID_10009
cgggccccccctcgagtcagctacgtaggcccccccccgaataaaaacttacgaaccaatcttttaacaaaaactaaaactttaacttttaacaatgcccggatctatggtattcanaccaattgaggctaacctcactcacaacactgacttgctcaccaagatgaacccttactgctctttcgttgtcggcagcaagagaatcaacagccaaatctgcaagaagggtggtaaacatccccactggaatgatgctgtcactgtccctcttgccaacgaatctaagattatggttgaagttatggacaaggataagcttagcaaggatgaccacattggctcattcgtcattgatcttcaacaaattgaaactcaaggccaatccagcagatggtatcccttatactacaagaacaagcctgcaggtgaaatcttgcttgaagcctccttccaaggccaatctggactctctggatctggcttgggacaaactggcttaactggaactcactccactggtttggccggtgcgggtatgccggactggtttgctggagtaatcaactggctcgctgacaagaaacacttgacaaagcttcttgataangaccatannatctgattccacaanaatnaactcttttctaacagntttgnannanaattntntaattatcccgtttgngagngttcaaatttngaaaaaaacntgaaccnncttttanntntttntgacntccttcnaaccnnnttgancaaagctnganctttnntnttccctaann

SEQ ID NO: 231 - DNA, 1510 bp, Glycine max
  misc_feature (1)..(1): n is a, c, g, or t
  misc_feature (46)..(46): n is a, c, g, or t
  misc_feature (145)..(145): n is a, c, g, or t
  misc_feature (200)..(200): n is a, c, g, or t
  misc_feature (213)..(213): n is a, c, g, or t
  misc_feature (272)..(272): n is a, c, g, or t
  misc_feature (316)..(316): n is a, c, g, or t
  misc_feature (335)..(335): n is a, c, g, or t
  misc_feature (373)..(373): n is a, c, g, or t
  misc_feature (425)..(425): n is a, c, g, or t
  misc_feature (511)..(511): n is a, c, g, or t
  misc_feature (1007)..(1007): n is a, c, g, or t
  misc_feature (1249)..(1249): n is a, c, g, or t
  misc_feature (1384)..(1384): n is a, c, g, or t
  misc_feature (1390)..(1390): n is a, c, g, or t
  misc_feature (1401)..(1401): n is a, c, g, or t
  misc_feature (1493)..(1493): n is a, c, g, or t
  Peptide Sequence Number=SeqID_6081
  Probeset Number=SeqID_10010
nggcgagagaggggcacagaagggggagagcgaggaggggagaganggtgagagaggagcagcggggagacgcggagcgcgtaagtgatgtgagagcatgaagtgggatgagaggagtaaagcagacagagatcacacagcatantatgacgacaccgcgcaccgtgctcttgtttttgcagcacgcgcatctcatacgncatcattatagtncgcgtcggataacgcgcgcaagcggagaagtcgcgagacgaggtatggatgagtatatngtctgaccacacggtggcgcggtagaggagagaagtgtaggagnttgtgtcgcgagctcatangtgtcgctcaacgccctctgcacgctgagtgtgtgttnttatcgaacaccacacgcatatacatacgcacaggagaagaagagggtaaanagaatgtagatatagtaaatgcagcgcgatgatagtatgcagagggatgtaaatatgagacgacaagatgataaacgaggtacaanatgtcagagcctgcgagagaagagaacgtagagggaaagaatctcaaggagagtggagagaagagagataggagcgaagaagatgagcggcgcgcaaagacggtgatataagcacagcagaagatgtagaataagtagaggtatgagacgagacgagtagaaggagggacgctgagagaggccagataagaaaacaccccactaacacgtcattgtggtgctgcccacatctcgtgtcagcccacaccaggatattgaggtgggaaggcggcgggtgagattaggtgaggggtttgatgttggattgtcgcactggtggggacgtattgaccgcgcgatcgtatgcggctgccggggatgtggagtggttatgccactcggttttatgaacggcgcccactgtatattaccaccatctctccaactatgtatatatatatagcgcatataaattatttatgcaccagactactaatttgttatatagcagagtgantgagcggcagtgtatttatatgaggcgcgagtacacccaaaataagaagtcacggaagtaataaaagagagacagaagaggagggaggtatactagccgcgagggggtgggtgggcgcgcgctggtgagggtgtgtgttgtctcctctatatccaatcgtaatcccccctcattatttaatgtggtcctgtatataaacctcagagacaatatgtatataagtatataccaggataagatgntaataagcagagtttaaataccccggtataggctattattacacacgttgtttttgtatgccctgtgatggtttagagaagtggggtccgtctgggaggtgtctagggtgattggatatggtcaacagagggacnaaaatnatatatatacntctctgagtatgcgccggaatagaggatggtctgtggaaaagatagaataatgagatataccaacaaatagtaaaatgtcaacctctaatantaaattaaaccacacta

SEQ ID NO: 232 - DNA, 2059 bp, Glycine max
  misc_feature (31)..(31): n is a, c, g, or t
  misc_feature (56)..(56): n is a, c, g, or t
  misc_feature (133)..(133): n is a, c, g, or t
  misc_feature (135)..(139): n is a, c, g, or t
  misc_feature (143)..(144): n is a, c, g, or t
  misc_feature (176)..(176): n is a, c, g, or t
  misc_feature (180)..(181): n is a, c, g, or t
  misc_feature (185)..(186): n is a, c, g, or t
  misc_feature (189)..(192): n is a, c, g, or t
  misc_feature (197)..(198): n is a, c, g, or t
  misc_feature (229)..(229): n is a, c, g, or t
  misc_feature (231)..(232): n is a, c, g, or t
  misc_feature (377)..(377): n is a, c, g, or t
  misc_feature (395)..(395): n is a, c, g, or t
  misc_feature (441)..(441): n is a, c, g, or t
  misc_feature (479)..(479): n is a, c, g, or t
  misc_feature (488)..(488): n is a, c, g, or t
  misc_feature (492)..(492): n is a, c, g, or t
  misc_feature (564)..(564): n is a, c, g, or t
  misc_feature (655)..(655): n is a, c, g, or t
  misc_feature (677)..(677): n is a, c, g, or t
  misc_feature (700)..(700): n is a, c, g, or t
  misc_feature (712)..(712): n is a, c, g, or t
  misc_feature (720)..(720): n is a, c, g, or t
  misc_feature (769)..(770): n is a, c, g, or t
  misc_feature (774)..(774): n is a, c, g, or t
  misc_feature (788)..(788): n is a, c, g, or t
  misc_feature (808)..(808): n is a, c, g, or t
  misc_feature (834)..(834): n is a, c, g, or t
  misc_feature (848)..(848): n is a, c, g, or t
  misc_feature (864)..(864): n is a, c, g, or t
  misc_feature (952)..(952): n is a, c, g, or t
  misc_feature (975)..(975): n is a, c, g, or t
  misc_feature (1025)..(1025): n is a, c, g, or t
  misc_feature (1111)..(1111): n is a, c, g, or t
  misc_feature (1133)..(1133): n is a, c, g, or t
  misc_feature (1142)..(1142): n is a, c, g, or t
  misc_feature (1217)..(1217): n is a, c, g, or t
  misc_feature (1231)..(1231): n is a, c, g, or t
  misc_feature (1238)..(1238): n is a, c, g, or t
  misc_feature (1241)..(1241): n is a, c, g, or t
  misc_feature (1291)..(1291): n is a, c, g, or t
  misc_feature (1301)..(1301): n is a, c, g, or t
  misc_feature (1325)..(1325): n is a, c, g, or t
  misc_feature (1335)..(1335): n is a, c, g, or t
  misc_feature (1363)..(1363): n is a, c, g, or t
  misc_feature (1366)..(1366): n is a, c, g, or t
  misc_feature (1404)..(1404): n is a, c, g, or t
  misc_feature (1421)..(1421): n is a, c, g, or t
  misc_feature (1428)..(1428): n is a, c, g, or t
  misc_feature (1455)..(1455): n is a, c, g, or t
  misc_feature (1477)..(1477): n is a, c, g, or t
  misc_feature (1481)..(1481): n is a, c, g, or t
  misc_feature (1494)..(1494): n is a, c, g, or t
  misc_feature (1506)..(1506): n is a, c, g, or t
  misc_feature (1544)..(1544): n is a, c, g, or t
  misc_feature (1691)..(1691): n is a, c, g, or t
  misc_feature (1713)..(1713): n is a, c, g, or t
  misc_feature (1717)..(1717): n is a, c, g, or t
  misc_feature (1784)..(1784): n is a, c, g, or t
  misc_feature (1860)..(1860): n is a, c, g, or t
  misc_feature (1889)..(1889): n is a, c, g, or t
  misc_feature (1966)..(1966): n is a, c, g, or t
  misc_feature (2003)..(2003): n is a, c, g, or t
  misc_feature (2010)..(2010): n is a, c, g, or t
  misc_feature (2026)..(2026): n is a, c, g, or t
  Probeset Number=SeqID_10011
gacggacacccacgcgcgcggcgaaggagcnaggaaggcaaggaacacaataggangagacacacacacgcgccggaggaggcgcccaccccgcctgacacatgggagggcacgcgcagggggggccccccgnannnnnaagnnggtgtattaacagacaaaaaaaagaagggggngggnngggnnggnnnnaaaannagagtttttcacccgacagcagagagcgagngnngggggggagagaaacacgaaccacaacgccggccagccgcgacgccagcacacacacgaacgacagagcgagagagcaatggccgcacccccagcgacacccgcgaacagaacagcagcgacgcgacaacgcaaggacgcacgcngcgggcgagaagagaggncggggaggaggcgagagcggcaacccaccaaacagccgccacaccnagagcggagcgcaccgacaagcgggcggcggagcgcanagaaggcanggcnccacgccacgcacacgcgcacaacgcgcgacgcggagcgcgcagacgaaccagcgagacggcacgccgccgngccgcaagcgcacacgcgagcaggaacgccaaagggagggcgcagagggcggcgcaggggaggagagcgagcgagcgacggcagagcggcnagcgggccggcggacgcgcgcngcgccgagccgccaaacagcgcngacacacaccancgcacgcngaacggaggagagaggacaaacaccgcagcgagacgacgagcagacgcnnagangggaggcgacgacnacgcgaggcaacgggcacangacggcacggcgcaaggaacaacggncgccacgaacacancgaaaagacgacacangtgcgacgagagaaaagaggaagagacaggcgagcgagagaacgacggcgccgcccgcccgcacgcgcgcgcggcgcgcgagcacgancacagcagatgcgcgctcaacanattatgagacaccagcggcaacgcggcaccgcgagaggccgctcgcctgngcgcgtcaggacaagactgcggcgatatcccggcgacgagcatagcgacaacgtaaagcacacacaacatctacacgtgttcgcgnaacgccacacagcgcgacgtcncatgcacgngacgtcacgcggaccactcatctgcgcatagctcgtgacgagacgacagcagaatacctgtgaatgcaccgccgncaccacgccagacncgaacgngcnagatgcgcggcgacatacaagccaaggaagtgcacgacacacgacgctcncgacgatctngagtcggcggtgcgcgatcgctgnactaagcaanaccatgctacacagctgcgccagtcgcncancagacgacacgctgcgcgagatgccacgacgtcaccantgaccacgcatgcgacncgacgcngacatgagcgccgtgaatgagagatgngagaaggtcgatgatgcgcacngacnacgcgtctcgcanacagcgatacancgcgccgccgcaggctatccaacgaagagacgcacagngcggcgccagcaccgcacgcgcgcagcgcgcgcacgcgcgctctagccacggacgggactgccagcggcgcagcagcgcagacgagtacgcagtcacgaggcgcgtatatccactgcagctgcgaacgacagagaaatcggcagganacgcgcgagacagccggcgcgngcangcgacacgaagcgtgcgcgcgcacgagacactcacacacagcgcatagtggatccattcagagcacnacgcaccgcgtgcagacaaccagcacagccgagatgtagcgaggagacgcatatatcataccaacccgagcgcggnacgacgcgcgatcacgcggatcgcagccncgaggacgcgctgagcgcgcctctgcacactccgcgattgaatcacgaacgatctgacaacacgacgcctcagctangcgcagacgcgtcgcacttgtatacgcaacgcgcacntagaaangaagagtgcatacacngcatgaactcatgcgcgcccacgaccgcacggc

SEQ ID NO: 233 - DNA, 844 bp, Glycine max
  Peptide Sequence Number=SeqID_6082
  Probeset Number=SeqID_10012
aagcattcagctagcttcagtacaaggaaagaatggatcagtctcatgtagtactagtactccagttcatatgtcctcctcgtctgttcctaggcatccgtggtgctagtttgggctaacaataaccgtctcgtctacacgaccactactgcagcaatccatccagaacaccgaaaatggatggagcaaggcgctccacagatgcctccgacgagcaagagccgaagcgtccgtgccttgcagttgcaggcggccgcaatggtggtgcaggtggggccggcggcagtgatgcgggtgacgacgacagccacggcgatgcgggtggggacggcggtgatgcgggtgggggcggcggcgttggccatgccgccgacgaccccccccccgcccccccccccccccccccccccgtcccccgcgcccccccctcccccctcctgccctcccggcgctccgggcccttgtcccctctctactatttcttatcctcttgcctccccgcatctctccgcgacccccctgcgaccctcccgatccgctcccccttctcatctagactctccctattcctccactcctctcctcccttcttcccctcccatctctctttcctccccgttgcattccccccccggtactcctctcagacgcctcctaccccctttcatccgccggtggcgatctcccccgaccgggcgctggtctcattcacgcttatggttcctgtctttcactctcatcacttctccttctccgcccctctctccctactctcccccgtcaccctctcgccccttcccattgcctttcttctcgcactatttttgtctctcttcggctcttc

SEQ ID NO: 234 - DNA, 1887 bp, Glycine max
  misc_feature (1)..(1): n is a, c, g, or t
  misc_feature (6)..(8): n is a, c, g, or t
  misc_feature (25)..(25): n is a, c, g, or t
  misc_feature (32)..(32): n is a, c, g, or t
  misc_feature (39)..(39): n is a, c, g, or t
  misc_feature (41)..(42): n is a, c, g, or t
  misc_feature (50)..(50): n is a, c, g, or t
  misc_feature (68)..(68): n is a, c, g, or t
  misc_feature (72)..(76): n is a, c, g, or t
  misc_feature (79)..(80): n is a, c, g, or t
  misc_feature (83)..(83): n is a, c, g, or t
  misc_feature (88)..(91): n is a, c, g, or t
  misc_feature (95)..(97): n is a, c, g, or t
  misc_feature (100)..(100): n is a, c, g, or t
  misc_feature (157)..(157): n is a, c, g, or t
  misc_feature (236)..(236): n is a, c, g, or t
  misc_feature (252)..(252): n is a, c, g, or t
  misc_feature (263)..(263): n is a, c, g, or t
  misc_feature (267)..(267): n is a, c, g, or t
  misc_feature (287)..(287): n is a, c, g, or t
  misc_feature (457)..(457): n is a, c, g, or t
  misc_feature (549)..(549): n is a, c, g, or t
  misc_feature (703)..(703): n is a, c, g, or t
  misc_feature (776)..(776): n is a, c, g, or t
  misc_feature (877)..(877): n is a, c, g, or t
  misc_feature (879)..(879): n is a, c, g, or t
  misc_feature (892)..(892): n is a, c, g, or t
  misc_feature (902)..(902): n is a, c, g, or t
  misc_feature (921)..(921): n is a, c, g, or t
  misc_feature (923)..(923): n is a, c, g, or t
  misc_feature (932)..(932): n is a, c, g, or t
  misc_feature (935)..(935): n is a, c, g, or t
  misc_feature (962)..(962): n is a, c, g, or t
  misc_feature (1046)..(1046): n is a, c, g, or t
  misc_feature (1048)..(1048): n is a, c, g, or t
  misc_feature (1056)..(1056): n is a, c, g, or t
  misc_feature (1079)..(1079): n is a, c, g, or t
  misc_feature (1103)..(1103): n is a, c, g, or t
  misc_feature (1173)..(1173): n is a, c, g, or t
  misc_feature (1176)..(1176): n is a, c, g, or t
  misc_feature (1368)..(1368): n is a, c, g, or t
  misc_feature (1519)..(1519): n is a, c, g, or t
  misc_feature (1555)..(1555): n is a, c, g, or t
  misc_feature (1567)..(1567): n is a, c, g, or t
  misc_feature (1579)..(1579): n is a, c, g, or t
  misc_feature (1601)..(1601): n is a, c, g, or t
  misc_feature (1636)..(1636): n is a, c, g, or t
  misc_feature (1695)..(1695): n is a, c, g, or t
  misc_feature (1705)..(1705): n is a, c, g, or t
  misc_feature (1751)..(1751): n is a, c, g, or t
  misc_feature (1769)..(1769): n is a, c, g, or t
  misc_feature (1779)..(1779): n is a, c, g, or t
  misc_feature (1782)..(1782): n is a, c, g, or t
  misc_feature (1818)..(1818): n is a, c, g, or t
  misc_feature (1830)..(1830): n is a, c, g, or t
  misc_feature (1870)..(1870): n is a, c, g, or t
  misc_feature (1887)..(1887): n is a, c, g, or t
  Probeset Number=SeqID_10013
nttttnnnttttgtttttgttgttnttttttnttttttntnnttgttggngtttttgttggagagggngggnnnnnttnnaanaagtnnnnttannntgntgtgggttgttccgtcagtgctaatttctccatgactagccactcgctccgcctccncgcggtatactctctcgctttcccatcttcgcgtcccgtttgctagctctcgcgctcccccccacctcgcctccacctnccgagcgagtggtgtntgcggacgcantganagccgacgcatcatacaatnttgtgcctgtgagactgagacaatcgacttgctatcgaccgagtacctaagatcacgtctaaactcaacaccgctgcggtcctacagattgtgaccacgcactgtgacatctgcagccgaacatatacataagtaattcgtgctcgtcagtagctgtgcatacccgctgncttattatcgcgactacctcatgcgatccaagccactgagccatctcagctaccgcgacatatgtcgcgagatgaatgatcattgagaacantatagcatatgcgaaaacgaatcatgatacgaacacatcgctggcgcgccatcacactactccctaccacacacacaacatacaatcatacaatatactcacactctactcataactactcatatactcaattcaactcactacaccatcccgncgtctctaccgctcggcaccccgcgctctcgcgactcgctctcgtcacagagtatctcgatcgcgctagtatnagatatcagtaatagtgcacatatacatagtctgtatatctactttatcattattattgtttgatgtatctacacttgtgagatttcactgtgtgctattnanattattcagtgtnatacatacanttcgcgcgaaaatgtacgngncgcgaaagnggnagagatgtacaacgcgtctacctcacntcacatgctctcggcgtctgcgacagcagctcacctcatatgagcacttgtatgctatacatgatcactacagtatgatgcgcnanacatgcantcaccgacgcgcgacgcacaaangcgtgcacatcgatgtgcgacatngtgcactgccactgtgcgatgcgtctcacgtggacctatcatatgtatattgtgtgcggcgacagtgttntgngctctcgctgcacaactcactccatcttcgacacactgtctcgtcggacagtgtcacttgtcatctatgcgagtctagtgtgttgtacactgtgatctataatgcaagtgttgtgtgatctatctccccggcgccaacactactccgcctatacacgtcttagtatactggtatctgcgtgtgtgcagctgnagcgcactctcgcgagtatgcgacggctgctgctcacactgctagcgcgtatcacatcgccgcacgtgcgcatcacgcttgcggctcatacaacattctctcatatcatgcctatcgtatctctactctgcgctttgactctcgtgcactntacatgcagacgctctgtgactctatcactcgactngctccgtggtcntctcgttcctgntacgatctgctactcatgattncatgactaccagtacagccatgctggccacatgcnacgacgtattcatcgtgcgcgtgtaccgcgctgaccatgtcgacgacacactcactgcncgacacgacngacacacaccagcgcgtgcgcggtactacaacttgtacgctgacantgagcgcgcgatgttgangaatgcgaanctnatagcatactacactcatgtactgtgtgcatgtgtnaatcacatcaantaaagatgacggcgacaacacactgacggctgcgtccgancaacgcgcgacatccgn

SEQ ID NO: 235 - DNA, 444 bp, Glycine max
  Peptide Sequence Number=SeqID_6083
  Probeset Number=SeqID_10014
aagctaatatccaaaaatgattcaattgataaaagtaaatagaacgatgacaagtgccaagaattagaaagcaacagggatgacactgatttaccacaacacagaaacacccaattgagcaatcagacaaacaatcatcaatccttacagtaacacatcaaaactttccaaataagtacccttttggaattgtgtgcacagtccaaatctcaattagacaattacaaaccaaaacaaaagaaacagccccatgaaactatctttttctgaaattcacccagtagggaaaaaaacaacaactagttcccagaagaattaaaaaaaaaaaaaaattctttcacaagtttgccaaagtgaaagtggagtattagaatttagaatcaacctagaaagcaaaaagagagagagagagagagagagagagagagtgaagggtcaaaaaga

SEQ ID NO: 236 - DNA, 355 bp, Glycine max
  misc_feature (5)..(5): n is a, c, g, or t
  misc_feature (10)..(10): n is a, c, g, or t
  Probeset Number=SeqID_10015
gaggnaaaanggcggcgggggcagccagaggaagagctttttttatgaagactgcaatccacggattattcacagggatatcaagtcagcaaatattcttttacactacaactgtgaagctcgaatctcggattttgggctagccaaattagcaggtgaggctaatacacatgtaaccacacgagtggggggaacttacggatatgttgcgccggaatatgtatcaagggggaaattcactgagaagtcagatgcgaactcgttgggagacatgcttttggagcccattacaggaaggaaggcaggagaaatatctcaacgaggtggagaagagagggtaggagaaatgggctgg

SEQ ID NO: 237 - DNA, 2202 bp, Glycine max
  misc_feature (20)..(20): n is a, c, g, or t
  misc_feature (172)..(172): n is a, c, g, or t
  misc_feature (250)..(250): n is a, c, g, or t
  misc_feature (275)..(275): n is a, c, g, or t
  misc_feature (426)..(426): n is a, c, g, or t
  misc_feature (530)..(530): n is a, c, g, or t
  misc_feature (663)..(663): n is a, c, g, or t
  misc_feature (681)..(681): n is a, c, g, or t
  misc_feature (896)..(896): n is a, c, g, or t
  misc_feature (916)..(916): n is a, c, g, or t
  misc_feature (1147)..(1147): n is a, c, g, or t
  misc_feature (1183)..(1183): n is a, c, g, or t
  misc_feature (1251)..(1251): n is a, c, g, or t
  misc_feature (1263)..(1263): n is a, c, g, or t
  misc_feature (1273)..(1273): n is a, c, g, or t
  misc_feature (1320)..(1320): n is a, c, g, or t
  misc_feature (1326)..(1326): n is a, c, g, or t
  misc_feature (1347)..(1347): n is a, c, g, or t
  misc_feature (1384)..(1384): n is a, c, g, or t
  misc_feature (1405)..(1405): n is a, c, g, or t
  misc_feature (1430)..(1430): n is a, c, g, or t
  misc_feature (1434)..(1434): n is a, c, g, or t
  misc_feature (1454)..(1454): n is a, c, g, or t
  misc_feature (1475)..(1475): n is a, c, g, or t
  misc_feature (1493)..(1493): n is a, c, g, or t
  misc_feature (1527)..(1527): n is a, c, g, or t
  misc_feature (1547)..(1547): n is a, c, g, or t
  misc_feature (1559)..(1559): n is a, c, g, or t
  misc_feature (1569)..(1569): n is a, c, g, or t
  misc_feature (1629)..(1629): n is a, c, g, or t
  misc_feature (1634)..(1634): n is a, c, g, or t
  misc_feature (1658)..(1658): n is a, c, g, or t
  misc_feature (1664)..(1664): n is a, c, g, or t
  misc_feature (1732)..(1732): n is a, c, g, or t
  misc_feature (1741)..(1741): n is a, c, g, or t
  misc_feature (1760)..(1760): n is a, c, g, or t
  misc_feature (1762)..(1762): n is a, c, g, or t
  misc_feature (1820)..(1820): n is a, c, g, or t
  misc_feature (1829)..(1829): n is a, c, g, or t
  misc_feature (1832)..(1833): n is a, c, g, or t
  misc_feature (1844)..(1844): n is a, c, g, or t
  misc_feature (1848)..(1848): n is a, c, g, or t
  misc_feature (1886)..(1886): n is a, c, g, or t
  misc_feature (1893)..(1893): n is a, c, g, or t
  misc_feature (1896)..(1896): n is a, c, g, or t
  misc_feature (1924)..(1924): n is a, c, g, or t
  misc_feature (1942)..(1942): n is a, c, g, or t
  misc_feature (1970)..(1970): n is a, c, g, or t
  misc_feature (1973)..(1973): n is a, c, g, or t
  misc_feature (1994)..(1994): n is a, c, g, or t
  misc_feature (2010)..(2010): n is a, c, g, or t
  misc_feature (2016)..(2016): n is a, c, g, or t
  misc_feature (2028)..(2029): n is a, c, g, or t
  misc_feature (2038)..(2038): n is a, c, g, or t
  misc_feature (2041)..(2041): n is a, c, g, or t
  misc_feature (2044)..(2044): n is a, c, g, or t
  misc_feature (2055)..(2055): n is a, c, g, or t
  misc_feature (2071)..(2071): n is a, c, g, or t
  misc_feature (2075)..(2075): n is a, c, g, or t
  misc_feature (2122)..(2122): n is a, c, g, or t
  misc_feature (2124)..(2124): n is a, c, g, or t
  misc_feature (2126)..(2127): n is a, c, g, or t
  misc_feature (2161)..(2161): n is a, c, g, or t
  misc_feature (2173)..(2173): n is a, c, g, or t
  Peptide Sequence Number=SeqID_6084
  Probeset Number=SeqID_10016
cccctctcttcttcgccccncccgctatacttatttcactctattcatcatgataccctcagacactgtctccccggtatgtcagttatatgggtgtgcacagcgtgctgtcaccgcccgctctgtagagacgcggagagagcttgatggtgatcaagagcgactcactctntctctctattctctcagattcttgtcactaagcagctagtaacatacgtcatcatgtctacgctccatctgtatgcancgatcgcagtgatgatacacatgtnacaactgcaagatacaacactgacgtcactcacaccacctccgatatccacactagccttcaccccatcccacgagcacctcgaatacgtactaattatctggcaatagtcagacaatctttagcgcttgtgcctctcgcgcgccgccgancgcatcgacacgccttcatgttctctacggccatcctgtctcttcttatttgtttaataatgaaccactgcctcgacaacaggcgcctatgactctcgcagganagatcgtactaatgcatgatggacatactcaacgagtgtatacagaactaatagacgtggagattactacacaagaacacactgcctggatggtctctacgtcctctgatcggatgtgctgtgtagtgtcgcnttgtctagttatagtgtnggtcctacacacgacatatgacgcctgcgccgtgtgtgcctcaccccgttcgctgtatgttacgggcgcacccgactgcgcggtcggagttatacgacgacgcgagatataagcggcaagagtggtgtggcatctcgcatcgaccgagcgcggaatcctcctctgttatgacgcgactcactgactcgtcatgcggactagttacgatgtcgcgngaccgcgcgcctctgccgancactacgcgcgctgacacgaagcatatacactctatatgtgtacgcagattactcatcacatgcgtctgacatcagagagtcgcgacgatgacgatagcacagtgtacttctactgagtagtgtcgcatgtgataccgtgtatctatgtgcgaacttgcaaggcgccgtcacactacatctatcagcgaagtgagactagaccttactagactgttgctatgacagtacancgcacactaatcgccgatcatgagtgtgatagtagntctacacactcgcgcgctggctcgccgtgcgctcgatgatcatatgattgcaagtgacttagtaatcnattagagaaccngtactgtcanagcgatgtgacgtacgtgagacgcgtcagtacgtacgctactgtgancaccgntcgtacgttgctctcgagctngcgacacagtcgcacttcacgaatgagtcgtataatncactacgctgtacactatgantataatgtatcagcgctgacatgcngctncacagatctcagcgcagcgnacacatgcgcgctctacgccncagcatatcatcaatgancgacgactggtcggactagtatgtccagtattcnagtcgtacacgaaatcgttncatctgtgcatnacgcatctantcgacgcagccacccgcgctaatgaactactactatgactgcacactgactgctgtgtcnaccanccattgctatagattaattacgtnattaanagcactgcgagcatagtatctgtcatgatctgtaccgtcgaggttgatgtgatgatcgtagatagcancaggtcacnactacgacgcaccggacancngtcgtctgtcgtaccgctgatacgtatgtgcagcatcgagcgtaatgagcaagtcatnactccctgnacnncgcgtgtgacnacgncggaccctgtagcctagacttctcgacagagtgcgatnacgtcantgnctcagctcatatagtgaaactacatcancacgcagcacgaagcgantcagtgatgcacgtcgattgtatgactnttnctactatgaatgatcagcgcntctatacggatggcgntatccntagatagtgttnntcgcacacnagntgngtctaccatancatcacgatgatgatnacanctgtgtccgtcgctgctagctgcgtactactagtgactacccggtgntncnncacgatgatcgacgctcagatatgtagtctctgngcgatgtatcgngactgccctacgtcatgactgctagtgtg

SEQ ID NO: 238 - DNA, 1968 bp, Glycine max
  misc_feature (1)..(1): n is a, c, g, or t
  misc_feature (5)..(5): n is a, c, g, or t
  misc_feature (15)..(15): n is a, c, g, or t
  misc_feature (31)..(31): n is a, c, g, or t
  misc_feature (58)..(58): n is a, c, g, or t
  misc_feature (62)..(62): n is a, c, g, or t
  misc_feature (68)..(68): n is a, c, g, or t
  misc_feature (72)..(72): n is a, c, g, or t
  misc_feature (85)..(85): n is a, c, g, or t
  misc_feature (87)..(87): n is a, c, g, or t
  misc_feature (94)..(94): n is a, c, g, or t
  misc_feature (103)..(103): n is a, c, g, or t
  misc_feature (116)..(117): n is a, c, g, or t
  misc_feature (140)..(140): n is a, c, g, or t
  misc_feature (158)..(158): n is a, c, g, or t
  misc_feature (163)..(163): n is a, c, g, or t
  misc_feature (167)..(167): n is a, c, g, or t
  misc_feature (192)..(192): n is a, c, g, or t
  misc_feature (197)..(197): n is a, c, g, or t
  misc_feature (207)..(207): n is a, c, g, or t
  misc_feature (211)..(211): n is a, c, g, or t
  misc_feature (229)..(229): n is a, c, g, or t
  misc_feature (241)..(241): n is a, c, g, or t
  misc_feature (252)..(252): n is a, c, g, or t
  misc_feature (255)..(255): n is a, c, g, or t
  misc_feature (259)..(260): n is a, c, g, or t
  misc_feature (262)..(262): n is a, c, g, or t
  misc_feature (283)..(283): n is a, c, g, or t
  misc_feature (326)..(326): n is a, c, g, or t
  misc_feature (337)..(337): n is a, c, g, or t
  misc_feature (378)..(378): n is a, c, g, or t
  misc_feature (414)..(414): n is a, c, g, or t
  misc_feature (437)..(437): n is a, c, g, or t
  misc_feature (493)..(493): n is a, c, g, or t
  misc_feature (519)..(519): n is a, c, g, or t
  misc_feature (552)..(552): n is a, c, g, or t
  misc_feature (561)..(561): n is a, c, g, or t
  misc_feature (563)..(563): n is a, c, g, or t
  misc_feature (569)..(569): n is a, c, g, or t
  misc_feature (600)..(600): n is a, c, g, or t
  misc_feature (617)..(617): n is a, c, g, or t
  misc_feature (647)..(647): n is a, c, g, or t
  misc_feature (660)..(660): n is a, c, g, or t
  misc_feature (663)..(663): n is a, c, g, or t
  misc_feature (678)..(678): n is a, c, g, or t
  misc_feature (680)..(680): n is a, c, g, or t
  misc_feature (724)..(724): n is a, c, g, or t
  misc_feature (751)..(751): n is a, c, g, or t
  misc_feature (764)..(764): n is a, c, g, or t
  misc_feature (766)..(766): n is a, c, g, or t
  misc_feature (779)..(779): n is a, c, g, or t
  misc_feature (782)..(782): n is a, c, g, or t
  misc_feature (843)..(843): n is a, c, g, or t
  misc_feature (874)..(874): n is a, c, g, or t
  misc_feature (973)..(973): n is a, c, g, or t
  misc_feature (978)..(978): n is a, c, g, or t
  misc_feature (990)..(990): n is a, c, g, or t
  misc_feature (1015)..(1015): n is a, c, g, or t
  misc_feature (1151)..(1151): n is a, c, g, or t
  misc_feature (1188)..(1188): n is a, c, g, or t
  misc_feature (1199)..(1199): n is a, c, g, or t
  misc_feature (1232)..(1232): n is a, c, g, or t
  misc_feature (1241)..(1241): n is a, c, g, or t
  misc_feature (1245)..(1245): n is a, c, g, or t
  misc_feature (1268)..(1268): n is a, c, g, or t
  misc_feature (1349)..(1349): n is a, c, g, or t
  misc_feature (1364)..(1364): n is a, c, g, or t
  misc_feature (1366)..(1366): n is a, c, g, or t
  misc_feature (1375)..(1375): n is a, c, g, or t
  misc_feature (1431)..(1431): n is a, c, g, or t
  misc_feature (1516)..(1516): n is a, c, g, or t
  misc_feature (1538)..(1538): n is a, c, g, or t
  misc_feature (1643)..(1643): n is a, c, g, or t
  misc_feature (1654)..(1654): n is a, c, g, or t
  misc_feature (1754)..(1754): n is a, c, g, or t
  misc_feature (1786)..(1786): n is a, c, g, or t
  misc_feature (1798)..(1798): n is a, c, g, or t
  misc_feature (1818)..(1818): n is a, c, g, or t
  misc_feature (1825)..(1825): n is a, c, g, or t
  misc_feature (1923)..(1923): n is a, c, g, or t
  Probeset Number=SeqID_10017
ncgcntgctgcgcgncagtcgtttccacgtngatgctgaaattcgagtatgcgctacntatntcacgnaacnaacatcatcccancngcccganccctcatcntagtgctgctcgnngggcacagcacgatgtcgtccgntgcatttgtctactgctntatgnatanaatagtaccgaacatgatatacgangatantcagcagcgnatcngcagtcacacgcaacgcnagcagacgtcgncgcaatgcgtnatnctcnncnttacgactagttgagtagtcnaccgctatccacagtactagcgcgtgacgcgcgtgacatacanggagctgtgcncatgctcatcgcagccgtcgctgcacgtcgcagatcagatnatatataaatgtcgtgacgcgtgttagtgtagatancacataggagcgtgcatgatgtnaatacacgctagacgtcgtgtctgcgagtacgttggtcgtagtagttatcgcggangcaacaatcaatatatgtcaatatgnaagatgagtgagtgatgatgcgtagcagcggcngggttgtcntntccttntatcatatttcgggtacgcacagcgtcgtancatacactgtcgccgtnatgcatataatatcgcgtgctatcactgtngcaacatatacanacnatgttcgcgcaaacnanattgatgtatctgtgcgcaccatcgatacacacgcgtgtgatantcttgagtagtgtggatgatcatagancgactcttatatngngagcacacgcgcntanactttgtgaggtgtgtgcatcgcatatctatatctctattgattatgatgtctgttagtgntgtgcgcgacaatgtatgcgcaaggtcagcngcgtgctataaacacgtacactagatattacaatatacccgtgagacgcgcgatatacaacgcgcgacagctcaggcgcaatacgactcactcatgatntattntcgtcatcgacntgaagtagcgtcgcgacatataagnagagacgacgtataaacaatgcgacgtcgcgcgcagcccgtcatcgagagatgtgcacgacgcgtctagtagtaatctccacacatgcgtatagtatcgatgctgacgcgtactcatgcatcgtatgtataattantaaacaagtagaatgagccgctgcagtccgcgtagcntccactgcgcnatatgtatgtcgagtcgagcatatgtcagtgcnttgatcgcntagntcggctctactcatatctagctntagtgtgctcgatacgacctgagcgcatcaatgtggggtcacgatgtgccacgcgcgcaacgctgctattcacactctacntgagctcgcgctcanantctatgacntacaatagtctgggggcgagcttcggtcgtagagagtaatgatatagcatctaaancacataatacatagcggcgtagaacgactcaggcacagatgctgagcgtgcacgtgtgtgcgcggtctaatactaaatatatatntgataaagaaattagcgctgcngcggtgttctgtgtgtggtgagctagtgtgcggaatataatcatgtgagatgcagtggagatatgtagcatcaatatatttgttgctgtcccgcgccccctgctngctgtgtattnttacacgcactcactcgtacgcacagcgatacgtgtacgctcatcgtctcgctgatccgattgtggttcagttagtagatcctacctcgtacaatcttcnttcactggcctagtgacgtcggcatacttctntatataaaaacntatctctcctgcgtcggcgnacgacgnagcgcgcggcgctctcagctgtttgtatcactatgatatgtatagtagacagtgtatattgtcagttgtttctgtgtcataatatctcgatcagaagnagaggacagagtatattgtggaagagtgagtgtggaaaaattata

SEQ ID NO: 239 - DNA, 1095 bp, Glycine max
  misc_feature (385)..(385): n is a, c, g, or t
  misc_feature (501)..(501): n is a, c, g, or t
  misc_feature (503)..(503): n is a, c, g, or t
  misc_feature (639)..(639): n is a, c, g, or t
  misc_feature (702)..(702): n is a, c, g, or t
  misc_feature (901)..(901): n is a, c, g, or t
  misc_feature (1075)..(1075): n is a, c, g, or t
  Peptide Sequence Number=SeqID_6085
  Probeset Number=SeqID_10018
gtcagtacgtaggcccccccccaatacaaaaaaaagatttatatctttgttcagtcatcttaaccaaagcgtccataaatgacaagcattctgaacttttctagcgcctcttcttccactcctgtctccaacaaagatgactctctcctttcaaccaaatacccaacaacttttatcgttcaaccaccttcttccagccagacaaaaccaaccaccattttatctaagcgctgcaagcctgttgaactcggtgatttactcttgaaaaagatcaaaacttcttctgtgagtaactcatctgagcaatctccaatccacaaggccaattttgatgatgctgtctacgacagttctgaaggccttgaatgccattcagttatcgaangagtcagatccccctcttcctctcaagataatgaaaagattaatgacgacaccatccttggcgaaaatttaatcccacaaagaagtctctcaactcccatcattccagtcagcctngngcctcaaaaacactaaagagagagttcctgactctcaaaaacagctccaaaatgctttagagactcttcaaagaagaatgctcttagagcagcaagcatacatcatcagggacattgttaaaagagcccaattctntcaagacatccttagaatccccacacttaactcgaatgacgaagttgagtctccccgacctgntaatttttctcaccaagagctcagaaaggcatttatcagaggtgaagatgacccagagatcatcattggagaaattgaataccctctcctttcaatggctccaccctcaactaaacttgatttgaactcaaagagatcaacaagcaaagccaacgagtccaagaaaaccaaaagatcctatgccaagaattctgtcctntcatctcctgattcggacagcagcgagtctctcctcgattctttaactgtcacaagggctgaaacccaaagatccgagaccgaagttgcatattccatgaaggaaatgagtgagagctttgtgaaggctattgaagggggcaaaagaaaaaataaaaaggaagccgtcgaaaanccaaaaaaaaaaaaaaaaaa

SEQ ID NO: 240 - DNA, 470 bp, Glycine max
  misc_feature (116)..(116): n is a, c, g, or t
  Probeset Number=SeqID_10019
gcggaggtggtccgtgggagggcggccgctctcgggagcgggcgaagcaagcgtggtgcagggagctctcggcagcgggcgaagcaagcgtggtgcagggagctctcggcagcggncgaaggaagcggctcgtcggccgattcgctccggcacgccgcgggcgaaggaatcggctggaggaggggcagcgagcggtggtcagccgcggcagtcgactggcgtgcggctggaggagggatttggccgcagcggcgcattaggcggcggtgccgtgcagccgtgctggccagggcaggctgcagcagtgcgtcaacggaaggcaattacagaacactggtcacttaatcacttgctttccgccactgatcagtgtttatcaatgaatctcctgattaattgttacactcatcggttacttgattgcttcacatttgtgaaatcaatgcactgctgagtatagtaggtggatc

SEQ ID NO: 241 - DNA, 438 bp, Glycine max
  Peptide Sequence Number=SeqID_6171
  Probeset Number=SeqID_10020
tactctggtggggcatatatgtggcttcattgcctgttcttgaaggtgcagagtaccttgtcatagttggaccaatctttctcactttgctgcttttcttcgttagcggcataccattactcgaggaatcggcagacaaaaagtacggtaacttgggagcttatagacactataagaagacaaccagtcccctgattctgttaccgcgaggagtgtacgggtacttaccaaagtggtgcaaaacagtctttctctttgagtttccattgtacagcaagaatctccctcaagaaactacagtctgaggaaactcaaaaaagaagcattgactgagagagatgaagagatgattacagtctttagccacatgtcctgtgttctctcatgatcaaactctctttttgtatagattctcattctgtcttcagataatcgttg

SEQ ID NO: 242 - DNA, 2334 bp, Glycine max
  misc_feature (28)..(28): n is a, c, g, or t
  misc_feature (31)..(31): n is a, c, g, or t
  misc_feature (47)..(47): n is a, c, g, or t
  misc_feature (49)..(49): n is a, c, g, or t
  misc_feature (71)..(71): n is a, c, g, or t
  misc_feature (73)..(73): n is a, c, g, or t
  misc_feature (75)..(75): n is a, c, g, or t
  misc_feature (80)..(81): n is a, c, g, or t
  misc_feature (93)..(93): n is a, c, g, or t
  misc_feature (120)..(120): n is a, c, g, or t
  misc_feature (131)..(131): n is a, c, g, or t
  misc_feature (134)..(134): n is a, c, g, or t
  misc_feature (139)..(139): n is a, c, g, or t
  misc_feature (146)..(146): n is a, c, g, or t
  misc_feature (176)..(176): n is a, c, g, or t
  misc_feature (179)..(179): n is a, c, g, or t
  misc_feature (200)..(200): n is a, c, g, or t
  misc_feature (211)..(211): n is a, c, g, or t
  misc_feature (213)..(213): n is a, c, g, or t
  misc_feature (254)..(254): n is a, c, g, or t
  misc_feature (308)..(308): n is a, c, g, or t
  misc_feature (311)..(311): n is a, c, g, or t
  misc_feature (314)..(314): n is a, c, g, or t
  misc_feature (320)..(320): n is a, c, g, or t
  misc_feature (329)..(329): n is a, c, g, or t
  misc_feature (333)..(333): n is a, c, g, or t
  misc_feature (348)..(348): n is a, c, g, or t
  misc_feature (399)..(399): n is a, c, g, or t
  misc_feature (414)..(414): n is a, c, g, or t
  misc_feature (416)..(416): n is a, c, g, or t
  misc_feature (437)..(437): n is a, c, g, or t
  misc_feature (443)..(443): n is a, c, g, or t
  misc_feature (468)..(468): n is a, c, g, or t
  misc_feature (528)..(528): n is a, c, g, or t
  misc_feature (543)..(543): n is a, c, g, or t
  misc_feature (546)..(546): n is a, c, g, or t
  misc_feature (551)..(551): n is a, c, g, or t
  misc_feature (554)..(554): n is a, c, g, or t
  misc_feature (556)..(556): n is a, c, g, or t
  misc_feature (567)..(567): n is a, c, g, or t
  misc_feature (570)..(570): n is a, c, g, or t
  misc_feature (581)..(581): n is a, c, g, or t
  misc_feature (621)..(621): n is a, c, g, or t
  misc_feature (662)..(662): n is a, c, g, or t
  misc_feature (792)..(792): n is a, c, g, or t
  misc_feature (807)..(807): n is a, c, g, or t
  misc_feature (828)..(828): n is a, c, g, or t
  misc_feature (831)..(831): n is a, c, g, or t
  misc_feature (839)..(839): n is a, c, g, or t
  misc_feature (881)..(881): n is a, c, g, or t
  misc_feature (970)..(970): n is a, c, g, or t
  misc_feature (1007)..(1007): n is a, c, g, or t
  misc_feature (1040)..(1040): n is a, c, g, or t
  misc_feature (1141)..(1141): n is a, c, g, or t
  misc_feature (1150)..(1150): n is a, c, g, or t
  misc_feature (1192)..(1192): n is a, c, g, or t
  misc_feature (1318)..(1318): n is a, c, g, or t
  misc_feature (1555)..(1555): n is a, c, g, or t
  misc_feature (1572)..(1572): n is a, c, g, or t
  misc_feature (1586)..(1586): n is a, c, g, or t
  misc_feature (1706)..(1706): n is a, c, g, or t
  misc_feature (1748)..(1748): n is a, c, g, or t
  misc_feature (1824)..(1824): n is a, c, g, or t
  misc_feature (1909)..(1909): n is a, c, g, or t
  misc_feature (1976)..(1976): n is a, c, g, or t
  misc_feature (2129)..(2129): n is a, c, g, or t
  misc_feature (2211)..(2211): n is a, c, g, or t
  misc_feature (2290)..(2290): n is a, c, g, or t
  misc_feature (2293)..(2293): n is a, c, g, or t
  Peptide Sequence Number=SeqID_6172
  Probeset Number=SeqID_10021
ccgcatgcagttgaatgagtacagggangcnggatgagtactactgngnagtcatgatccactacgacgcnancngcgtnngtgctgatgcantcggtactttgacgacgtcttaaagtnaactacgagcngantcgcntgctcgnagcacgtaattcgactgactcgtgtgctantcnatcagtacagtagccaatgangtacgtcacangntcaggtcgcgtaccactccacgatcgcatcagtgtgctgcntgtgacatctacataccatctagctatatgtactcagagtcggatcgccgacgntantcnagtacngtttccgtngacntatattagatgtgcnttcactagtgcgtcatacccagagctctactcagcatcactagtaggactnagacacagacagctncngccgaatctgtatgctgatgnatcgtnacatctctgcgtcgcgactaacacntatctcagcatgcagtatcactctctaatcagctacgtcacgagctgggcgtacagcacnctatgccgagcgcancgncgcgnacnantagcgtgtcangancttgtgtacgnacgtatacgtgtacattgacagctgacatgtaatctaatncggtcgtcggcgagagtctgtattgcatgagcataacgagntgcgtcgatcatattctgtgtatatcgatgctgtcatgatccatcgaagacacggacgctggtgactctcgaacgacgtcagaacacactcactcgatcatagcgaccatgagcatagatttacgcgacngtgtcttcggtatantcatcatatatacttacatancancaggtgtntatacaatggactgatatatcgcactatagctgtggtagtgntgtgctacagagcgatctacgtagtgtcgtgcgctcatcgatagtacatcacagaagatgttgatacgatacgacatagctagaaagtncattctcgattaagtagtgaatgagtaatcgtccgantagcactcagcgtaatcgctcgaatcagtgacntcgtattgtgtaatgcgtcatcgcgacgtcgcgttcttacaatacgcaagtacagagagtgaggaagaatcagcacatcgtcgtacatacgtcagcactangtactcgtngtagcagtgtctcagcatcgtctctctgactactcgatattngtcacacgccatgatctctctatacactggcatgatctacgacagacagatcacgcgtacctgcgatttgctctcgtatatctgtcagcgcgccctacgtatactctaagtcaagcgtagcgagcnaacgcgacgactctatagagtagtatgcatattatactaacactccagagcgcaacacgccacagacagacagattagtagtcagatgcgctgcgtcacgtcgtagaagatagatacgatcgtgagattctacgtagtgatgtaagatagatatagcgagatatcagtcgacacttgatagaagtaatcagattactatcacagatattgatatgatgatgtaactaatgattgcgntgtcaatctattaatantgagatgagcattnatctgtcatgtacatgtcagcatgttgcgcaccgttcgagtaaccgtcgtacgcacgtatcgcgcagatagcgatcagatggagctgcatatgaagtaacgagggagagacgtgacatcnttgcaggtccgacattattccttatcacgcgtacacacatcnatcttatacgctacatatacatgaccaagactatggaagtccgatcagtcgtagctattcgagagcgtgtacatantagtgtctggttcaggtcgcgtagacaggactagcagagagatcgacatctacagacacgagcgcagtggagattggagagaggnagcaactgcgctacagcgtgacagctagcgcgagcgtcgacgacgacgagctacctcgtacgtgacntgcgcgaagcacaatagcgtgcttactagcatgactatgtatatatacataatatgatggagagctcatgtagtcagagcagatggatgagggtagtgcacaagtagagtcaggtgtgtgagatgcatagtgcgagaatatacatactgagtnagttgtctaagtaatatatactattctgatcattctcttctcacatatatatatacacacagagatatgagtcgtcatcganctacaacaaatacagcacgctatatctatatatgatctatacgaagcgtatatatactatagatgagtttgatagtatnaangctcactcagcacatatactgtctcacaagtacacatataa

SEQ ID NO: 243 - DNA, 442 bp, Glycine max
  misc_feature (329)..(329): n is a, c, g, or t
  Probeset Number=SeqID_10022
gattcgaacccatgaccaacaagtcactaaggcacaactttaccgctgcaccaggctcgccctcagaatgatatatatatatatatatattgtctcaaaggattttgagccacataaatgaacattgaataatttttttatatccatatatcaaggcaacaacataaccatttcaatgattttcagaacatcgatacatccttgcatttctcatggtggtagtwtgttaacctgtgacctcattcattgaagcaggscaagcaacatatagcatagtagtcgtcattgtaagtggaatcaattttaaggaagaaaaatagatattattnggaactcatgacaatttttctgcmacttctatgttacttagtgctggcgtgtatcattgttcatgaattcagttttccagaagtccataatccatacaaaagagcttagctgg

SEQ ID NO: 244 - DNA, 1908 bp, Glycine max
  misc_feature (1)..(5): n is a, c, g, or t
  misc_feature (10)..(10): n is a, c, g, or t
  misc_feature (17)..(29): n is a, c, g, or t
  misc_feature (34)..(35): n is a, c, g, or t
  misc_feature (57)..(58): n is a, c, g, or t
  misc_feature (80)..(80): n is a, c, g, or t
  misc_feature (93)..(93): n is a, c, g, or t
  misc_feature (280)..(280): n is a, c, g, or t
  misc_feature (509)..(509): n is a, c, g, or t
  misc_feature (641)..(641): n is a, c, g, or t
  misc_feature (724)..(724): n is a, c, g, or t
  misc_feature (1000)..(1000): n is a, c, g, or t
  misc_feature (1052)..(1052): n is a, c, g, or t
  misc_feature (1131)..(1131): n is a, c, g, or t
  misc_feature (1190)..(1190): n is a, c, g, or t
  misc_feature (1214)..(1214): n is a, c, g, or t
  misc_feature (1328)..(1328): n is a, c, g, or t
  misc_feature (1330)..(1330): n is a, c, g, or t
  misc_feature (1372)..(1372): n is a, c, g, or t
  misc_feature (1430)..(1430): n is a, c, g, or t
  misc_feature (1448)..(1448): n is a, c, g, or t
  misc_feature (1516)..(1516): n is a, c, g, or t
  misc_feature (1521)..(1521): n is a, c, g, or t
  misc_feature (1525)..(1525): n is a, c, g, or t
  misc_feature (1578)..(1578): n is a, c, g, or t
  misc_feature (1622)..(1622): n is a, c, g, or t
  misc_feature (1625)..(1625): n is a, c, g, or t
  misc_feature (1627)..(1627): n is a, c, g, or t
  misc_feature (1637)..(1637): n is a, c, g, or t
  misc_feature (1650)..(1650): n is a, c, g, or t
  misc_feature (1700)..(1700): n is a, c, g, or t
  misc_feature (1712)..(1712): n is a, c, g, or t
  misc_feature (1755)..(1755): n is a, c, g, or t
  misc_feature (1761)..(1761): n is a, c, g, or t
  misc_feature (1799)..(1799): n is a, c, g, or t
  misc_feature (1804)..(1804): n is a, c, g, or t
  misc_feature (1813)..(1813): n is a, c, g, or t
  misc_feature (1847)..(1847): n is a, c, g, or t
  misc_feature (1866)..(1866): n is a, c, g, or t
  misc_feature (1889)..(1889): n is a, c, g, or t
  misc_feature (1908)..(1908): n is a, c, g, or t
  Peptide Sequence Number=SeqID_6173
  Probeset Number=SeqID_10023
nnnnnaaaanaaaaaannnnnnnnnnnnnccccnnaacaactaagcccacatccacnngacaaacaaaccaacacgaaanccatagaactagngacatcacctcgcgcgcgaataattcgcaccatatatatttcgccaacacatctactaaaaacagcaaaatcccacaccatcgctgagcacgtctgtcacgcacaccaggcagtatcaaccgtatacatactctcgcctacgcacgcacacgcatcatcgcaccgcatcgcatcatctcaccactgnacatcgcactcctctcgcacgcgcccgtatgtagtagtgtgcatcctactactgttttcatcctacattaatcccgttccatctccgtaccgaaaacctccataatagatgagatcaacgaatcgcgcgcgtactgtcgctcgctccagttactctcttctactgatcacaaatcgcccagataccgacacagcatcgaccctcctctcgcctcgcacgcgtcttacgntgttctcactccgcgttcgtatttcttactacacagattagttgtctctctcgacagcgtacgactctctgtgatcttctcgttttcgtcgcccacattgctacacctttggacatgtgcattcgcacccgncgcgaacgacacatcttgatctcgccttctcactgtgctcatcgctccgcccttcgaacgatatcccatacacgcacggacgnatcggtacactcccgcacccaagacaacacctcacacacgaacggccacacgctacacaccacacattcatacacaacactcatacacacagctaagtgcgaatatgcaacaccaaccacacatcactgcgttcacacgacacacccgctacattcctccgccacgaacaccgctgcccacatcgagacctctcttgtatcttgtacgtcactctctactactatcaccgccaatatctgtgtgcacatatcacggtacactctacgcactaccantgcgtcctgtgcagtcgctcttccactaccactgctcacacgtcgatcaagngacactctcatcattcacacgcctcgtaatcagtggataccatactgtcgcgtaacgtcgcccactcgctctctcctcnacacgtaccacctcttccactctacccttcggctactcctccgtcctaccgcagccacnacaagatcacgcacaacgaccacnaccttacgcgcgagtgtccgtctactcacgtctgcacccgacgacacactcaaacgagtcacacgctctccctcactatagtgagacatgataacgcgagatcgctcatctcgnantcgcaacgtataaactctctcctccctcggacgcacgcagancaccccgcgtgcgtgtgataacgatactcaacaccctacacagcgcccttcgacttanagcgacacgcatcggcgntatataggacactcaagcatctgcgcactgtccgtgtgcgcccgacagcaatatgagactacgcgttnatctnctcnacgcgactctatcattacgattctgacacatgagtctccgagcgagcagttantacgtaatatatcgcgccccctgacgcgctcgtttggatgcgcnagncnatcacatgtnctgcctcgcgatncccacactgtctaagataatgatcggcgcgtcgtacaccctcgtgcgcgncgactgaccaancaaacgatctactgatcgacacgaccacgacgccactctatcncgcgancatgtctctacgcctcacacgcagcgacacgactactncttantcgaatcancgagtcgcagagacaatacgagataaagtcaaangacgaaacgaatttcagantaattcgcgacaccttgtgaagntgactgcgacatcacgtcn

SEQ ID NO: 245 - DNA, 1876 bp, Glycine max
  misc_feature (117)..(117): n is a, c, g, or t
  misc_feature (131)..(131): n is a, c, g, or t
  misc_feature (150)..(150): n is a, c, g, or t
  misc_feature (185)..(185): n is a, c, g, or t
  misc_feature (189)..(189): n is a, c, g, or t
  misc_feature (202)..(202): n is a, c, g, or t
  misc_feature (263)..(263): n is a, c, g, or t
  misc_feature (283)..(283): n is a, c, g, or t
  misc_feature (312)..(312): n is a, c, g, or t
  misc_feature (350)..(350): n is a, c, g, or t
  misc_feature (372)..(372): n is a, c, g, or t
  misc_feature (376)..(376): n is a, c, g, or t
  misc_feature (396)..(396): n is a, c, g, or t
  misc_feature (409)..(409): n is a, c, g, or t
  misc_feature (507)..(507): n is a, c, g, or t
  misc_feature (515)..(515): n is a, c, g, or t
  misc_feature (546)..(546): n is a, c, g, or t
  misc_feature (562)..(562): n is a, c, g, or t
  misc_feature (612)..(612): n is a, c, g, or t
  misc_feature (634)..(634): n is a, c, g, or t
  misc_feature (644)..(644): n is a, c, g, or t
  misc_feature (671)..(671): n is a, c, g, or t
  misc_feature (704)..(704): n is a, c, g, or t
  misc_feature (738)..(738): n is a, c, g, or t
  misc_feature (740)..(740): n is a, c, g, or t
  misc_feature (858)..(858): n is a, c, g, or t
  misc_feature (951)..(951): n is a, c, g, or t
  misc_feature (993)..(993): n is a, c, g, or t
  misc_feature (1418)..(1418): n is a, c, g, or t
  misc_feature (1475)..(1475): n is a, c, g, or t
  misc_feature (1636)..(1636): n is a, c, g, or t
  misc_feature (1797)..(1797): n is a, c, g, or t
  misc_feature (1813)..(1813): n is a, c, g, or t
  misc_feature (1826)..(1826): n is a, c, g, or t
  misc_feature (1838)..(1843): n is a, c, g, or t
  misc_feature (1846)..(1846): n is a, c, g, or t
  misc_feature (1852)..(1852): n is a, c, g, or t
  misc_feature (1854)..(1854): n is a, c, g, or t
  misc_feature (1859)..(1860): n is a, c, g, or t
  misc_feature (1862)..(1866): n is a, c, g, or t
  misc_feature (1876)..(1876): n is a, c, g, or t
  Probeset Number=SeqID_10024
ccacgccgacgtcgagtatgaacgagggcgtgatatataaaggactaagcagatgctaagtagccagctgaagcaagagaagatacatgtaacagacagcaagtagtgagagcaganagagatgagagatnaacgacgcgagagagttgngcgtcacgaactgcagtgagcataagaaccagcanaatntccgcgatcgctntgtagactacttgcttatatacgtggagtcatatgtatctttcgctctcatgtgtgtcttncatgctcacttcttctctgntgtgatcgttctctgcctttataatatcnatgtcatatatatatgtatgctgtcagaccacttagtngctcgcgtattactatatacantatnagtcggtcacagtgtgaatncacagggtcatgntgcgtatactatcgttgagcatatcagttcgagagctgtgacaggctgccaactcgactcgccgcggctcgcgcatcgtgactcagtagtgtgccgtnctgacgantctagacgctacgagtagatcgcacagtgcngatacgtatgtagtgncatagacgcgctcgcgacgcacgtatcagcacacataaccatcgatcatnagagcatacgtagccagtagtnaggtccgcangacgcgcgtgtcatgagttagtgtgangtataggtagatgatagtgcacatatagactgncgtgcaatcgttctcaataatctacatgatactncnatgaaccactcattgcgtcgtcacatacgaacgtcagactagagaggtcggcgtatcagcgcacgtcgcattatatatatagttctacacgtctattctcgcactcttcgctagtgtngcactaagatattgtcgatatggagtctaacagcgacgagacgcgacgtaagcagcgcctcgacgccgcttattcaaatatgattctgtctanatactgtgagtgatagtgtacatatattcgtgagctgcatgntatgtgtgaaatgactagagtgatcgtgatgagggtgtacgagcagatagatcagcgacggtctcctctataattctataacttgattcatacataatttacaagattactaatagtcgctatcatattcattcaccggtcgcgtgccgtacgcttagtgtgttacgtcggttcgtgcgccagtgatgcatagatgtaggcatcgttcgctcgttcagaactacaacttataatatactctaaatcaatcatatctatatacacgttcactaatactcacctacatatctcacactacgacatctcagagatgaatatatatgactctagtgctagatcataaacaacatcactataattatattcattacaagatatcagtgtatactgtatattattcatatgagtgtgtctattcatctcgntatcgtcgatgtggttgcgatgtgggggtgactggcgcgttcggtgagatagcgatnggggcgtgtagaataagtatggagacgagcacacgcacccacacaactgcgtcagcgtgacgcacgcgcgcggcgtctgctatgtcgcgctcgtcgcgcgcgcccgacgagccacgcggcggagcgtcatccacgctgcaaaaacgagcgcgcggggcgangccgagagaagagcgtgcgtacaagtcacagcagagttgtaatcgcgatcgtagtggactgcgttttggagagtataggtcgacgtcctgtgtcttcgatgtcacgctcgcattgtcgatgttcgcgtgacgattaatgtgtatattgtattatctcttantggagcttgtgcgtgnttgtatagagttntataagtgagtnnnnnncanaaaaananaaaannannnnnaaaaggaaan

SEQ ID NO: 246 - DNA, 1554 bp, Glycine max
  misc_feature (19)..(23): n is a, c, g, or t
  misc_feature (26)..(26): n is a, c, g, or t
  misc_feature (29)..(32): n is a, c, g, or t
  misc_feature (65)..(66): n is a, c, g, or t
  misc_feature (99)..(99): n is a, c, g, or t
  misc_feature (127)..(127): n is a, c, g, or t
  misc_feature (131)..(131): n is a, c, g, or t
  misc_feature (172)..(172): n is a, c, g, or t
  misc_feature (223)..(223): n is a, c, g, or t
  misc_feature (234)..(234): n is a, c, g, or t
  misc_feature (236)..(236): n is a, c, g, or t
  misc_feature (487)..(487): n is a, c, g, or t
  misc_feature (514)..(514): n is a, c, g, or t
  misc_feature (539)..(539): n is a, c, g, or t
  misc_feature (555)..(555): n is a, c, g, or t
  misc_feature (582)..(582): n is a, c, g, or t
  misc_feature (1005)..(1005): n is a, c, g, or t
  misc_feature (1015)..(1015): n is a, c, g, or t
  misc_feature (1054)..(1054): n is a, c, g, or t
  misc_feature (1201)..(1201): n is a, c, g, or t
  misc_feature (1220)..(1220): n is a, c, g, or t
  misc_feature (1343)..(1343): n is a, c, g, or t
  misc_feature (1380)..(1380): n is a, c, g, or t
  misc_feature (1413)..(1413): n is a, c, g, or t
  Peptide Sequence Number=SeqID_6174
  Probeset Number=SeqID_10025
ggtgtgtggtgcccccccnnnnnttngcnnnngtgtgtgtgttttgtgtctatttctggcttcgnntgttttccagcgtgccctctcccaccgcttccnccctctctcgacaacaatagactatcantatntactccagccctcaacggacacgagtaggcgccgagatatnataagcagcaaggtcataacagtctctcatatattatatatatatatgaancatgaagatcncncccgcctccctccctacgcacgtaacgctgcatctcgctaccgcgtctcgatacgaagccacgccccgacactagcacagcgtaagcgatatacacacacgcaggagaggtggggagtaagtaggagtagtaactatacgcgcacatatagtaaaaacacacacgcacatcaacataccacgaagagaatgataggcgaaacaagatataatagagacaaatacagcgctcgactaagatgtagtacaagnagtgacagacaagtaagagagagaganatgatgatacagacacccaagtatnatagattgacaatatnacactacacgtaagaagagatggacanacatcacgacacgcgccgcgtgctcgccctcgctctctcgcggactcgcatcggctgcacaggtcgcctgggtatgacgtaattctagccacctcctacaccacagaagactatacacaacatactcaatataataacagtataaaccgccgacacagacataaaagggcaggaggggctcgacacatcacggacacaggagccggcagcgcgcgcgcagccacatcccgaacacgtagcagagactgtaggatgatgagagaaacacccatacatatcgtgtagcatgtactatgactcagaccatctcgagagaagatagctggtcgtcgcaccgcgcagcctcgcagagagcgcgccgccgcaggacgtatctccccacgcgcacagtaaacggcagaatcgacaatacggcggcagagnagccgcatcnacgtctgcgacctcactatctgatatagcccgaaatganatagaagacagcgtatgacgcacgaccatatagaaggaattaacacgtccgacaagaataaatacataagattacaccacacacaccctcgcgacacatctatcatcttgaagacctctatagtgtacgtgagacacagccagagcngcactagtagcactcaaancactgaatgacggacgctcgaactaccgacccacgaatctcactgccacgccacactagctcgcagcagatacacagcagtaatatagcataacatcgaacgactagagagtcagttctgcangcactcgctctagtctccacgcttacacggctgtcancatacgacgaacacacgagtgctgactcgccgntcgatatacagcctgtgacggctcgctctacgcgatatacagcgcgcgtcacgcgctaatgatacaacgctatccgcgacagatcgtcgacaccacagactcagagcacagtcgcgcagcacacacaacacacgatcaccg

SEQ ID NO: 247 - DNA, 466 bp, Glycine max
  Probeset Number=SeqID_10026
cactcagtcagacgtcacagccacagagaacaagcgagaaaccactctgcactgcacgcacgcacgcccacacacacacagaggaagaggaagagagagagggggggatcgacatccgtgtgattcatccttcctcatgaggccgatcagagaaggcgaggcgctggtgggagtcgccggggctccggcagcggcggccggccacggcgcgcacccggggctgtggaggacgcccacgccgtacctcttcctcggcttcgcgctcatgatggggctcatcgccgtggcgctgctcgtgctcgtctgcacgcgccgcaagccgtcgggctcgtcgcggcgggggaccgccggcgaggaggcgtctgcgcgcgggatggcgccgctcgaccgggagcccaaggtcgtcgtcatcatggccggcgacgacatgccgtccttcctcgccagcgccaggccgttcgcggtc

SEQ ID NO: 248 - DNA, 460 bp, Glycine max
  Peptide Sequence Number=SeqID_6175
  Probeset Number=SeqID_10027
aatgctggaagccttctcattcgggggttgggcacctcaaatattaatattatctcaccctgctattggagggtttataacacagtggttggaactctacctttgaagcaatatgtgctggggtgccaatgcttacgtggccactatttgcggatcagtttttgaatgacaatccattttggtgctaaagcaagaaacagagaagcttgagaaggtgtgattctctaagtgaagttttatattctttctgtgagttagagtgctttaggcaggaaaaaagttgtttgagctctcattgtggtttcggcacaaacgtaaacgccttttgcctaatatgtatatttttattgtcatatttgcttcctctgcatgtaaacccaagagtagcaccaccaccaccaccaaagactgataactttttctgttgttttaaacccttttatagagttacaaattcttt

SEQ ID NO: 249 - DNA, 609 bp, Glycine max
  misc_feature (462)..(462): n is a, c, g, or t
  misc_feature (540)..(540): n is a, c, g, or t
  misc_feature (607)..(609): n is a, c, g, or t
  Peptide Sequence Number=SeqID_6176
  Probeset Number=SeqID_10028
atataacgaattgacaattttcttatttttccgaggtcattatgtgttgctgaatcttcatcaagttttattctttatttttactatgtctgaatctctaaatctctttctccttaaatataaaaccttttatgacctttcacttaacagctgaagcctctgaaaaagttggttctttacatggtttcagagcctcaatgtccatgtggtcatgaatttgatccttaacatctcattcctattctaaattattgttgaatttcacaacgtatactgacctatccatgattcatgcttcaagaccaaagggctcttgcatgaggggtagtgttaaatataaaactattcttgagttttcatctaatagcttaagcttttagaagagttgttgaggctatagggattcaggtagaagtgaaggctggtgtgcaccacaaccatgaagagatggcattgatggantaccagacagcagcccattgccgggtgaaaggtggatattatcatcgtaattcctgatagcagccagtcaacatgcanctccaaatggtggccagatgtccttccttattaaaaccaatgactgcgtgacagcctggatgctctnnn

SEQ ID NO: 250 - DNA, 514 bp, Glycine max
  misc_feature (75)..(75): n is a, c, g, or t
  misc_feature (146)..(146): n is a, c, g, or t
  misc_feature (235)..(235): n is a, c, g, or t
  misc_feature (238)..(238): n is a, c, g, or t
  Probeset Number=SeqID_10029
tcgtggaagccagcgccaaagctggccacccaactttccttttggtgagggagtccactctctccaaccccgcanaatcacccctcatcgacaatttcaaaggcctcggtgtcaatcttgttttaggagatctatacgatcaccanagtttggtgagtgctataaagcaggtcgatgtggtaatttctactgtaggacacctgcagctagctgatcaagaatagatcatttctgncantacagaagcaggaaagggttagaaagtctatcccatctgaagttggaaaatgatgtgggaccggactcatgcaagtgaacccagccaagtctgcattttgcaacaaggggcaaagtgtcgccgaagctattgagggcttgaagaatttccctttactttaagtgggcaagcaacttccctttgctggggtaacttcttgggccaacttggcacaaagctgggaggtaaagggtgcccccagagagagggattattatcccctagggggatggaacc

SEQ ID NO: 251 - DNA, 1450 bp, Glycine max
  misc_feature (47)..(47): n is a, c, g, or t
  misc_feature (107)..(107): n is a, c, g, or t
  misc_feature (109)..(109): n is a, c, g, or t
  misc_feature (112)..(112): n is a, c, g, or t
  misc_feature (147)..(147): n is a, c, g, or t
  misc_feature (162)..(162): n is a, c, g, or t
  misc_feature (200)..(201): n is a, c, g, or t
  misc_feature (205)..(205): n is a, c, g, or t
  misc_feature (219)..(219): n is a, c, g, or t
  misc_feature (239)..(239): n is a, c, g, or t
  misc_feature (274)..(274): n is a, c, g, or t
  misc_feature (292)..(292): n is a, c, g, or t
  misc_feature (294)..(294): n is a, c, g, or t
  misc_feature (296)..(296): n is a, c, g, or t
  misc_feature (299)..(301): n is a, c, g, or t
  misc_feature (326)..(326): n is a, c, g, or t
  misc_feature (389)..(389): n is a, c, g, or t
  misc_feature (423)..(423): n is a, c, g, or t
  misc_feature (494)..(494): n is a, c, g, or t
  misc_feature (519)..(519): n is a, c, g, or t
  misc_feature (523)..(523): n is a, c, g, or t
  misc_feature (526)..(526): n is a, c, g, or t
  misc_feature (531)..(531): n is a, c, g, or t
  misc_feature (590)..(590): n is a, c, g, or t
  misc_feature (598)..(598): n is a, c, g, or t
  misc_feature (613)..(613): n is a, c, g, or t
  misc_feature (658)..(658): n is a, c, g, or t
  misc_feature (667)..(667): n is a, c, g, or t
  misc_feature (669)..(669): n is a, c, g, or t
  misc_feature (751)..(751): n is a, c, g, or t
  misc_feature (770)..(770): n is a, c, g, or t
  misc_feature (855)..(855): n is a, c, g, or t
  misc_feature (867)..(868): n is a, c, g, or t
  misc_feature (893)..(893): n is a, c, g, or t
  misc_feature (1395)..(1395): n is a, c, g, or t
  misc_feature (1425)..(1427): n is a, c, g, or t
  misc_feature (1448)..(1450): n is a, c, g, or t
  Peptide Sequence Number=SeqID_6177
  Probeset Number=SeqID_10030
ggagtgatcctgtccgatgcgtcggtagtaatgctctgtgtgcgggngtcgacagcctgtacgcaggtggagcatgtggtagatactcgacgagtagcagtggcgcncnccncacagtatgagcgcggcgtcgtgaagactagggtntgtgcgcagaccgcngaacgctacgcgtcgagtgcagtggatgatatgacagnnatanatagtgacgtaganagtctcattctgtgagatanagatcgtatgtcgagtctgtcacgccgtcgtagtnacggaggtgagggagcgngnanacnnncaagtagtgtctcgtatgagcgcangctaggtagtagcgtgcaatcgtgtctcgtatttgttcaccatctcgtcgtatcacacctcanacgatcgtatagatcgagatcagcgactagactnacagatgatatcatataatgtgtttaggtgtatctacttgcaggtcgttgtggtgtgatgtacgcagcatncgggctagttcgtgcacacgacacncacnaanaactnccttctgtcgttgtcggcagatggtgatacatgagtgtggagagctatagagcgcagcnccacaganatttacgcacagagnagcgctataattacactaatatatagcagtaagctgacgatgtancgagccagnangaagagaatgagtaccaccaaactaagacactatgcgaggtgtgcatgaggctcatcagcttgaatataaaattagacgatntctattaatatataatatntacactctcacatctctatactactatagaataaatggacaagtagagcaggatctatcttgtaggcagcgtgggctgtcccgtngcacctacaaannccctcggagacaggccagcacgagncgactcccagactacagacgccaacaaatcccaacacgccgcagcgggcttagaagcccccagttgcaacacaaggagaaggctttaccgaggaaagagagagataggattataaacacctagctaattcggccaactcgtagggcgcggcgactactagtagagtacagatcggatttcttgtgtacctgatatagcactcagccacattgtcagtgttagagtatacagctttgagggattatactcgctctctattagtatacaatctctgtcgtttgagtataaggtagggagggttgttcactctgtgcgagtgatagattgtgctgtgtgggcctctgacggatccaaagaagagaatagaggataggagtctacactgtcgcgctgcctggcggggatggcgatcttacctcttcttttattgagagcccgtccctactcttctgtgaggtggtggtctctctttacttcgtgcgatctccgttaccgcaatttnagggagggcagacggagggtggggcagggnnnggggtgagggggggggggaannn

SEQ ID NO: 252 - DNA, 1706 bp, Glycine max
  misc_feature (116)..(116): n is a, c, g, or t
  misc_feature (215)..(215): n is a, c, g, or t
  misc_feature (275)..(275): n is a, c, g, or t
  misc_feature (381)..(381): n is a, c, g, or t
  misc_feature (607)..(607): n is a, c, g, or t
  misc_feature (980)..(980): n is a, c, g, or t
  misc_feature (1040)..(1040): n is a, c, g, or t
  misc_feature (1043)..(1043): n is a, c, g, or t
  misc_feature (1216)..(1216): n is a, c, g, or t
  misc_feature (1245)..(1245): n is a, c, g, or t
  misc_feature (1394)..(1394): n is a, c, g, or t
  misc_feature (1397)..(1397): n is a, c, g, or t
  misc_feature (1512)..(1512): n is a, c, g, or t
  misc_feature (1575)..(1575): n is a, c, g, or t
  misc_feature (1601)..(1601): n is a, c, g, or t
  misc_feature (1603)..(1605): n is a, c, g, or t
  misc_feature (1613)..(1613): n is a, c, g, or t
  misc_feature (1615)..(1616): n is a, c, g, or t
  misc_feature (1619)..(1623): n is a, c, g, or t
  misc_feature (1632)..(1637): n is a, c, g, or t
  misc_feature (1640)..(1643): n is a, c, g, or t
  misc_feature (1695)..(1695): n is a, c, g, or t
  misc_feature (1706)..(1706): n is a, c, g, or t
  Probeset Number=SeqID_10031
atgcagagtgataacggagcacggtcgtgtgatatatcacgtagagatcagtagacgtagatacgtcgcgcgcgctccgtcacgtcttagtgccgacgctcctagcctacactcgngacgatgaggattagctacgcggtacgacaggacaggcgacccatgcgcatcgcgccgtagcatacacatctctgctgcgatgcgctaccggcacgcgngacgatcacacacgtcagtcgtgcgtgtgacgggtcgtcgtacacactctcgcatctcgnacgcgtgtatcgttctctagttgagccaccggtcgaccatggctgcgcgatgcgtcgcacaggttcgctgtgacgtccgatgctgtcgcggcgggcgcgcgcgcgnctatgtcacgcgattgcgcgcgcgcagcggcgcggtggagggtgcgcggtggaggagcgctcactaccgcgttgatagcgcgtgtgcgtgagcgatagagttgttgtgcattctcctcgacatacatcgttatacgctccgcgcgccaccgtcagcagccgagcgacgtagtcgaggtcggcgatcctctgcgtcgagtctgcagtcgtcagtctgtgtagtatgntgagtattgcgctctcgtgtgagttatctatcaagatcgtcgtcgcgtcttcatctcacctgtcctccgactcatcactctctaccaccacacagcgtcgacatctaccacgttacgatgtgtgatacagacaacagtccgcgcgccgcactcggacgcgtctcgtgtgtcgtgtggccgtatctcgcctcgactcctactacacctatatcatatagccagtgggcaggcgacgcggtgacgactgtgggttgttactgaaagactgtcgctcggacgtacatatagtatcgcccgctctacctacacaccgcacctcgtccggcgccacgtactctcacaactatcaggcggcggtgccctcacgtcggtntggcgttgatgaggtgatatcaaatacagagaattcagcagcacaatgtatatagtcagntgnttgtttcatttatcatcgtagctatcaccattcgttgctactttgttcggcgttgctcgcacgccgctcttatccttcctgccataataataacttagtcgtaagattgatcgagtaggtgtgtaaagtagatgtggtttatgttgttgtgtatatttattttcgtattattntatgcgtacttcgttatatctttttctcntcgcgatcgtctgttgtgttctgcccgccgtcgagcagcgtatatcatttaagaacttctctctgtcacgtggagcggcgctatgacgaggagacgtagtcattacacatgagctgtaagtattgtagcgtataatagatgatacatcntgnggagctcgcatcgccgcgctccccgcctactctgttgtttcggtgctatcgtccgacctgcccatacccaccgccgtctcgctcgcgttcccttggtgccgtccgccgctctgtngcgggggtaggtagtggtggtcgagaggtgtggtggtgttggcacacgcgggcggcgtcgccntcctctcctcggggggaaaaagtagnannnagtcgtcncnngcnnnnntggtatatnnnnnnttnnnncgagccggggagacaccgccgcgccacccccccgccacaaacaaaccaaganccaaacacaan

SEQ ID NO: 253 - DNA, 992 bp, Glycine max
  misc_feature (1)..(1): n is a, c, g, or t
  misc_feature (972)..(975): n is a, c, g, or t
  Peptide Sequence Number=SeqID_6265
  Probeset Number=SeqID_10032
ntgtgtttatcgaggaggggggtgtagacacttattacatttcgtagagaggttggaggtggtgtccggcgctgctgtcttagatgtagtctcgcgggttttccactattggttagtggcgttcacgcgcaggcttcctccttgcgtctctctcgcagtgcgtacggctcctgacgaaaggggtcggcgcttccgtgaggtgaatctgcaggagatatcatcttaacctctagagtctagatctatacgccgcgattgcgtgattcaccctttgggggtgttcacgcaccgggggctctgccagaggcgaggggcgcggggtggggttttctggatggccgtttttatttaccggggcaaaggcgccagacgggtttctctcccgacaaaaagttttttcggccacagaggtttattgaccgacagggggtatctgagttttttgaggtaggagttgggggataaggctccaggggccgcctcctcgaacccgattgttacccaggaccctttccgaatgggcgtttacacccgggcctttcgtttcctttgaagtttatgctaaatagtccgcgttgttcggaccgacctggattttctgtccaggccgattccagctcttccgtgaaggccttattccacggttttccctattcatcggcgtccagatgttgtgggaggttgtccttgtcaaccactattttattcatgttgtactcgtacgtctccagctggttgcgggggtggatccactccgttcaccttctggtcctcctccgcgaactcattcctcctcccggcgccatgcggtcgatctcctcctggctcagcccgtggactagcgcgccgtctgcttcgtgcgggccatcggagctttggtgcttgcgcgcggaggacggcgaattggtggcagcgtggaattggggaggagttgattttatgggggatttgccagttttttgattaggatgnnnnaggtaatggtctcgtgc

SEQ ID NO: 254 - DNA, 1629 bp, Glycine max
  misc_feature (180)..(180): n is a, c, g, or t
  misc_feature (1002)..(1002): n is a, c, g, or t
  misc_feature (1019)..(1019): n is a, c, g, or t
  misc_feature (1036)..(1036): n is a, c, g, or t
  misc_feature (1121)..(1121): n is a, c, g, or t
  misc_feature (1170)..(1170): n is a, c, g, or t
  misc_feature (1204)..(1204): n is a, c, g, or t
  misc_feature (1223)..(1223): n is a, c, g, or t
  misc_feature (1249)..(1249): n is a, c, g, or t
  misc_feature (1288)..(1288): n is a, c, g, or t
  misc_feature (1296)..(1296): n is a, c, g, or t
  misc_feature (1301)..(1301): n is a, c, g, or t
  misc_feature (1315)..(1315): n is a, c, g, or t
  misc_feature (1340)..(1340): n is a, c, g, or t
  misc_feature (1441)..(1441): n is a, c, g, or t
  misc_feature (1485)..(1485): n is a, c, g, or t
  misc_feature (1499)..(1499): n is a, c, g, or t
  misc_feature (1501)..(1501): n is a, c, g, or t
  misc_feature (1503)..(1503): n is a, c, g, or t
  misc_feature (1510)..(1510): n is a, c, g, or t
  misc_feature (1516)..(1516): n is a, c, g, or t
  misc_feature (1520)..(1520): n is a, c, g, or t
  misc_feature (1529)..(1529): n is a, c, g, or t
  misc_feature (1532)..(1532): n is a, c, g, or t
  misc_feature (1580)..(1580): n is a, c, g, or t
  misc_feature (1622)..(1622): n is a, c, g, or t
  misc_feature (1629)..(1629): n is a, c, g, or t
  Probeset Number=SeqID_10033
agggtggcccacccgcggcccatcatataacatagtcgcatatgctgcgcgcggaagcgtgcgcccgctctcgtcctgcgtgtgcctaccccgatcggcgcatcgataacgcctgattctagtgtattaggttgagatcaccattagggtggtagaagataggtgtagcagcgggcgcanatcacgcctcagctgaggcgtcgcagcgccaccagcactctacaccggaactagccgtacggatatgtatacttgcgcactgaaaatataatacgttgacaccgctctctccgctacaacaatcgcctactgtagtaatagataccgacatgcaggcgcggatgttacttattgttgccgacgcgttattcgcgccgtggtggtagatccgctcggttgaacgcgacccccgcgggcggcgcgcgcgcccgcggccacatcacgagagatagtggtggtgtatcaactacggtgctatatatcacctcgtcgccaagcatacggggcgaccgagaataaagaataatagaattctgtaggaatatcgagttgtccacgtaacgctgcgcttctctctctttaccgcggcggtctatatattggcgcccgaatattgaaatagaggtgaggacggcgggagaaaatacacccgtgtgggggatgcgatgacgaatacacgccgggcgaaatatgcgagagcacacctcatgtggagagggacaagatgtgcgtggatcagtaaaataaaggagactaggtgggtggtgtgtaggagtagcgcacaccgcgagaagatggtagggtgcgatagcccgctcagcagatatgcgagctcaactacgagtggtgatgtgcgtcgtcgtagaacgatctctgattcacacacacacacgtgatgcaaccatacgcataacgcgtgatatgacgtaagacaaacagaagaggtggagacgtggaggctgatgcagaaaactaaagtagagcacgaatacggcagtgagngcacctgtcggcgatanatgtatcggcgcggcgngtgtgtgcgtgcgcggcgtgtgagagtgtgatagaataaactaaacgtcgcgggccgaaaaattataagagtgacggcgcgggtncggcaacaagaagagagtatgtgtatacagagcggcgcgtaggacgcgngagcggtggagcgagagagtgagagtacacacanatagactgtgctgtagaancaaagcagcgctgagggcggaggcgncgtgcgagcagtgcgacggcgtgatgagaaaatgtgtgngtgcgcgntatgntgagcgcgtcgcangatatgtcgagatactacgaacacnatcgtccatcgcgatacgacgtcggctcagtgtgatagtcgtcgggcgctaatatactcacgacgcagcacggtactatctcattgacacggctcggtgcngcggcgcgtgtgtgaataatatgacaatgatgtacacgcgacgncagcaggcgcgtgncntncgtaganagtagnagtncgcgatagncangatagatgcatactgtacgtctgacagctagtcgaccaccgcatacantatacagcacgcatcatgaatgtcggcgtagcatcgcatttnactatan

SEQ ID NO: 255 - DNA, 960 bp, Glycine max
  Peptide Sequence Number=SeqID_6266
  Probeset Number=SeqID_10034
aatcgaaaaacgcggaacagctcgtctctccccgaatcctatcgctgctttcctacttcctccgacgcacaggttagaaggggaaacagttgcagggtctacgtgctaccccggcgcggcggcagagcgaagcacggccatctctcttgaagacagcgtatggacggcatgggcgttggggatgtttgcgagaagggatctccaggcttggcatcgtcaagcacaacaccctctgaaccaaaggaagatggccatgtaatactgattccccattcccacatcttcgccctcatgctgcaagctctgaagttgccgcctgcgaattaccatcataagacatatccggccattaggtttatggagaatgcatgtggcaaggaaatcagggactatcactacacccacgtagaaaggctggaaaatcaagtcacactcctggagcggtacctggatgaagcaaaaaagagaatcaagaaggtacgcaaaggatggttctatgctgtcagatacatgagctcgtattctactcagatacaaaatacgacagctgctcgtcgcctaagagggcaggacagcaccaaaggggcgatgaaaacagcactcgcaagcacaagaaagttggcaaaaagactacgttgtattggcctgaaatcggagcagtgcctagagactacagatagtatctggtgagctctgttcggcacatcgtacccagtatgtttatgaaccattgcctttgtaatggaaagtaccacctggtatcatgtagctcttctcactttgttttgagcaaggcacagagattatgcttctatgaactagcttgttggcagactgcccttccttactataaattatgcttctatgaaccagcttggtatcagactaccgtcccatgttgtaaattatgtattatgtattatgaacgagctaaagcaatggtcgtggtaatttttctcc

SEQ ID NO: 256 - DNA, 660 bp, Glycine max
  misc_feature (172)..(173): n is a, c, g, or t
  misc_feature (620)..(620): n is a, c, g, or t
  misc_feature (660)..(660): n is a, c, g, or t
  Probeset Number=SeqID_10035
aatagtgggagatctataaagtaacggaaactggtgacacagtttagagagagagagaaacaaagcaaaagccttttggatccctctcttctcttctttgatctccgttacccttttcgttttctcaacacagagagagagagagagtcctttcggagttccttttgccgtnngtgtttgttttttaacacagcgccccccccggggggggggggaacccccaccccccttccgggagagaagaacccccccccccaaaaaaaaaaaaaaataaccccccccccacttgtcttttttttttttttttttataaaaaaagaaaagcgcgcgcggcggaaaaaaaaaaaaaaaaaaaccccgggcgcgttggtgaaccaaataggaaagagaggacggacccccccccccccccccacacacccaaaccttttctttctccccaccccccccccacgagcggggtggttgttttttttgtttttaaacaaaaaaaaaaaaaaaaaacacacccttccttctttccgtgtgcggcgcgggcgcgagtgtaaccaacacttataagattgatcccaaatataatgtgtcgaccaatatgctatctctcggtcctcttacccttntcaggttttgtgccctgaccacgcgctcacacacacaccn

SEQ ID NO: 257 - DNA, 348 bp, Glycine max
  misc_feature (62)..(62): n is a, c, g, or t
  Peptide Sequence Number=SeqID_6267
  Probeset Number=SeqID_10036
tttttttttttttttttttttttttttttttttttttttttttttttttttttttttttttngggggtgggaaaagtccaactcagatgaagacaaaagacctatcgggcacaacacacgaaatcacaccagcaagacactggacgaccacaagaaagacaccgctcaaacccacccttcccagctctggtggccggcccagccggagatggtggagggggcagcagctgctggggccgacgacgccggctaggtggcccctccgcgacgcctaggaaccgtcgctgccctgcaaaacaatcacagaaaaagatgaaagcatgaaaatgtcagattcattgtatccac

SEQ ID NO: 258 - DNA, 1915 bp, Glycine max
  misc_feature (1)..(1): n is a, c, g, or t
  misc_feature (67)..(67): n is a, c, g, or t
  misc_feature (160)..(160): n is a, c, g, or t
  misc_feature (228)..(228): n is a, c, g, or t
  misc_feature (381)..(381): n is a, c, g, or t
  misc_feature (432)..(432): n is a, c, g, or t
  misc_feature (480)..(480): n is a, c, g, or t
  misc_feature (529)..(529): n is a, c, g, or t
  misc_feature (718)..(718): n is a, c, g, or t
  misc_feature (739)..(739): n is a, c, g, or t
  misc_feature (758)..(758): n is a, c, g, or t
  misc_feature (881)..(881): n is a, c, g, or t
  misc_feature (910)..(910): n is a, c, g, or t
  misc_feature (926)..(926): n is a, c, g, or t
  misc_feature (1045)..(1045): n is a, c, g, or t
  misc_feature (1134)..(1134): n is a, c, g, or t
  misc_feature (1153)..(1153): n is a, c, g, or t
  misc_feature (1248)..(1248): n is a, c, g, or t
  misc_feature (1400)..(1400): n is a, c, g, or t
  Probeset Number=SeqID_10037
nttcgcttgttgtgcccccgaactttcgttgtgttatgtatcgcgcggcccacgtgattcacgactngtcagagagtacattcgccggtagagcacgctatactcgcagcgtccgcctttatctcatctcatattatctcccacggcgccgcgccgcgcnttatcaatatccggacgtcacagctagatagtagcggcgcgcgtagaatctagcacagcgcaatcgtngtgtaagtatgtatttgatattgtcacgatgtccgcgcacgccagcaacgccgagacgcatgatatatctatcgcagcactattatagacacccgcgacgaatcaccgattagtatatacacacgcacatatgttaatgagtttctcactatntgcggtgcggtctgaggcctcttgacacagttctatgtcatacacatgatnttgctcgctagcacacacgccccacgttatattatctcgccccgtcanctttgtgtgtgtgtctcacaacaataccaccacccacgccatcataacntctcacactatgtgtttattgtcctcgcagtgcgagcgctggcgtcgtagggtgggcgctcacatccaattaagttctcaaggggtgtgaggacatgcacccttatcttttaaggaagtctacacaatgtgggtggagggcgtgcaggagtgcgtgccaatcactcctgtttgtcgtatagtcatacanacgtagcattgtatacacacnatcatccacatgcacgcgnttattagtgcttacaacagagtacgtgcgtggtgtgtggcgtggtgctcgcacgcgatttatggattatctcttgggttaatgctaaatcgtcgttgaggcagcacacccaactacactattnatgagtgtgtgtgtattggtgtgcgcggncgctcctctcatttcncatttgcatagaccacaatgtgtatatatctcgtaaacattatatcggcggccgtcgtattcattatttcgtttcctccacgcacacacaatgtatgatgtatatatacttacacctcncgcgtgggtggggtggatatatatatacatattcacacgggcgcgggcggatataatatacacacctgctcggcgtctcacaaaatacnatagagtaatatcatcgcntctcgttgtctgctcaaattacactccggataattgctgatttgccagaactgattcatatagtttgtgagtgatgtcgctcactcagtctcgtngccacaccatatcgattctgggggggtggtgaggaggatgtcccaacaacacacatcgcgccgcgtctgtattatcatacatagtgtatatacgtgtctctattcctcgggacggcacgaggggcggtgtgccacccagacacgccgcccgngttcaccaatataaaacgcgcagggcagtttactataatagcggcgctcgcgtgatgtacgcgcgttcgcgcaacttatcactcaacaaaatacgggcgacgttcaacggccggcataatattataaattgatgtaagagaatatagctatacacacgtactacgccggcgctgactatcgatctctcaattgattaccttgccccctataaccatcaggcgaagcgcaccacataattcgcttgtaccacctgttgtgtgcgatgcaacagagtgtataggtttcgggtgtggtaggcacccgcatcggtacaccgcattctagtaccacaacaacagtgttcatatgaggtcacacaatacaatataaaataagatgaacataacgagcagaccagtagcggcgattaataaaagagaacagcacacacaccacacgaacagacgatccggcagcgtaagtatatgcgtgcggagggagagatcacacgccccgccgccccgctaccgctctg

SEQ ID NO: 259 - DNA, 1798 bp, Glycine max
  misc_feature (1798)..(1798): n is a, c, g, or t
  Peptide Sequence Number=SeqID_6268
  Probeset Number=SeqID_10038
actaaacccacatttctccatttcccaatctcaattctcagatccagcttcctcctccttctcatctccatggcctccattttcaccctcttcctcatcttcttcttcctccaccaccctcactccgccgtggctcagatccaccaagcctgcaaagccacgcgcttccctctccaatgccactcctccctcctccccaacctccccctccaccacctcctaagaagccatactactaccattctccaccacctccagtccaccaccacccttacccccatcttcacccccacccacaccctcatcctccaccacctcctaagaagccatactactatcattctccaccacctccagtccacccccacccttacccccatcctcacccccacccacacccttacccccatcctcacccccacccacaccctcatcctccttacgtttaccactctcctcctccaccccctaagaagccctacaagtacccttcacccccaccaccagttcaccctccctacattccacacccagtttaccactctcctccaccaccaccttacaagaagccttacatctatgcatcacctccccctccttaccactattagcatacctcttatcgatatgaagaatatgtgcaacgaataaaagaaagcgatggaaagcgcttcgcgatgcacgaaagagaagaaatggaagcaaagtttccgcgttttgtctttcataaaaaaaatgttaaattattattttctatgataggattggtttcttgtcttttttctcttgtttaagaatttcggtgtattttaacagttgtaaagcactctgcgctctctctgcatgatcatgtacaactacaagcatgctctctgtagttttcaacctgctgcgcttgcaggggttgtaaaactaatcaatataattaaataaattacattctgtctctctcaaaaaaaaaaaaaaaaataaaaaaaaaaaaaaaaaaaaaaaaaaaaaaaaaaaaaaaaaaaaaaaaaaaaaaaaaaaaaaaaaaaaaaaaacaacatcttagcctcttttacagcccacactgggggtggattgaatattgcacctcccctttttattggtaccacaattttactaggcaagggagattcttctgtgctatactctttgcaaagttttatgctggctaggagatctggttggcgaaaattggtcactttaaagaattaaggcaatacacttgaaagcgtcttcacaccccacaataggggtgcatgagtattgggccgccccttttctatagtcttacaaagtatacttaacaaggtagcattcttttgtcatttactcttttagaagttttagactaactggagtttcggtaggcaagaaatggaaactttaaaacttcaggcagtactaaggaagactatatcatagtaacaatttaagaggtgagggacatacctgagaaatgaaagcatagtgtttacagctgtttaaccttgtaaagagaatatttattttaaagagagttgaaccaaatcctgtgtattaattttacttccaattatattttttgtttttttaatgaagactgtttacatattcaggtttgcctcagcatattgacagcatgtggggtgtcaaaaattctcatttgtaagagttgttttggaaaaaaaaagatgtggttaagtgggcttgggatctgccgtggggggggggggggcggggggggggggtgggcgcgccgcctcttagaaggcttccagagcctgcggtagggccgtggccatgcgacggn

SEQ ID NO: 260 - DNA, 1912 bp, Glycine max
  misc_feature (29)..(29): n is a, c, g, or t
  misc_feature (47)..(47): n is a, c, g, or t
  misc_feature (220)..(220): n is a, c, g, or t
  misc_feature (352)..(352): n is a, c, g, or t
  misc_feature (366)..(366): n is a, c, g, or t
  misc_feature (546)..(546): n is a, c, g, or t
  misc_feature (553)..(553): n is a, c, g, or t
  misc_feature (621)..(621): n is a, c, g, or t
  misc_feature (1249)..(1249): n is a, c, g, or t
  misc_feature (1322)..(1322): n is a, c, g, or t
  misc_feature (1387)..(1387): n is a, c, g, or t
  misc_feature (1422)..(1422): n is a, c, g, or t
  misc_feature (1490)..(1490): n is a, c, g, or t
  misc_feature (1494)..(1494): n is a, c, g, or t
  misc_feature (1541)..(1541): n is a, c, g, or t
  misc_feature (1652)..(1652): n is a, c, g, or t
  misc_feature (1728)..(1728): n is a, c, g, or t
  misc_feature (1797)..(1797): n is a, c, g, or t
  misc_feature (1808)..(1808): n is a, c, g, or t
  misc_feature (1810)..(1810): n is a, c, g, or t
  misc_feature (1818)..(1818): n is a, c, g, or t
  misc_feature (1837)..(1837): n is a, c, g, or t
  misc_feature (1884)..(1884): n is a, c, g, or t
  misc_feature (1902)..(1902): n is a, c, g, or t
  misc_feature (1912)..(1912): n is a, c, g, or t
  Probeset Number=SeqID_10039
atgatgtgaagatagagggtgtgtagatncacagcatagcaccgccncagcggcgctgcacgccagaagaggattgtgtcatattagcgtgttcataactctcacgcgcatgagatggggcggtgcgacgtcatacatcaggaaagtgatgtagaataatccgccacgcgtgtgtcgtgaggagtgtatcctctctacatactctatcatctctatctancctttatacagagcatacgcgtagaatggcgacgatactctttatcagcatatgtcgcatagtattcgaatctcctccgcaccagaatgagaagtgcttaactcacacgagtcataagagaacgtctgtatnatagcaagtgatanctgacgtgtgtacggctggactcatataatcttcgtatcagcatacaccactctctgtgtctcgcaattcaggtatatcacactcacaacccaacagtgtaacgtcattgcgtgctgcgctcgcactcacctgggatggcgaacctgccttactgcccctccagccgacaatgaatgcgncaacagncggaccccgcctacgcgagtcactaatatggcgtctacccacgacgcgtctcatgtgaactactatcnctgccacgcgagaagccgccatgaaatttctaagcactcgacgagaacgcgtccacgatagttgacgctagtcatttgccgttctggacgtggggagattaatactcgagcgagctgcgtatcgggcatacgcagagatctcgaacctcgcaatagacctacacttcttgcgtcaagcatacccaagtagagcccgctctcgtaagacttaccctattgcttttacgtattgctaacatcgtgataaaacgcgtgagagcctgctggactgcgtgcgtaacgcggcgtaccgaaactactagatgtggactgttcaatgaggatcttctcggcacagctgcgcccgatcgcggagagcgtaacggtggtcacctctgtgcactactacgaggagtccgtgcaagtgagatatcgtgggcattatgcattgcggaactagagctgctgtctcacagcatcaccgacggtacccgttagactcgggtatgacgcgcttccgccgacaacaaactatcatcggcgtcgctgctacgactccgccacatcacatatcatcaatgccactactaagtctgttcacgatccactctacagagctcgtatgatgacagcgcgcggtcgtgagganacacgtagacagatacgtcgcgtagcgtagcgagaactcattcagcactcctcacacgacctcagatatgctncgcagtcgcttccacgcggcgagtgtgaggctagatacacatgcctcgcttcgtacgcgctcgtntacgatacactaccgcatctcacgctctttaatgncatatatgtgatgaggaagacagagatctgtatactatacactctacgctgcatcatacggcgtaacntgcngcacacttcgagacactaacagtcacgtcatgcttcacatgctcctntaactcatgacgcgctagtcgacgacgacgcttccatgcagccaagcaacgacgagcgatcgacgtcatacgcaaccctcgagagagatgcggcagcacattggggacgtncatagaataatctgtagagcgtacgactcatcggccagacagtccgctgcgtagtgtgatagatgtagtgtgtcgnagcgatgatgatttaacgtcaccagtcatacacagatagagacaataatgtcaatctcatcatactcangccctactctnantgcatganagcacacactcaacgtttngtgggcgtcgctcgcgcaaagattggggatgtgacgggagggactangcgcaactgcggcgcatnagcgactacn

SEQ ID NO: 261 - DNA, 764 bp, Glycine max
  misc_feature (65)..(65): n is a, c, g, or t
  misc_feature (94)..(94): n is a, c, g, or t
  misc_feature (427)..(427): n is a, c, g, or t
  Peptide Sequence Number=SeqID_6269
  Probeset Number=SeqID_10040
ccccacacccgccccccccccaccccccccccccccccctcccgccgccgccccccaacccgccntcccccaccccccccccccccccatcgcntcccccgcgcagccccccccacccccccgcccgcacccaccaccacacggaaccctcatcccccccccagccgtcacaacaccaccccccggtatttcccctgcacacattcaatcaaccacccccccctccccaaccaaatttatacctggtgttaggccccccaaaaccggcacagaacaaaacgcccctcctgatcctttattcccggcaccaatttcagaacccccagagccacgtttaaacccccttatccacgcattcattccaggagaaagaggtgcccccgcctcctcctccccctgatatgagtccgattcgatcggaggtccngccgcccccgtcgaggactcgaatccgacctttcgttccctcccaggtcctcttgatgacccccccctcgcggccgatgatgctcccgcccttgagcaccggcacgattaggcggcccccccagtggccaggccaccccggccaccgcttctcggcggcggcggggtctggggtggggtcttcgccgggggtggagcacggttcggcggctggattgtccgaagagaccccgttttggattgggtcgagggtgcccatagatagggtttatggtggctctcgttagcttcaggtttactccgaagcggacgcggggtcgccccgggaactccggacc

SEQ ID NO: 262 - DNA, 1362 bp, Glycine max
  misc_feature (1)..(1): n is a, c, g, or t
  misc_feature (90)..(90): n is a, c, g, or t
  misc_feature (195)..(195): n is a, c, g, or t
  misc_feature (214)..(214): n is a, c, g, or t
  misc_feature (222)..(222): n is a, c, g, or t
  misc_feature (366)..(366): n is a, c, g, or t
  misc_feature (489)..(489): n is a, c, g, or t
  misc_feature (514)..(514): n is a, c, g, or t
  misc_feature (543)..(543): n is a, c, g, or t
  misc_feature (739)..(739): n is a, c, g, or t
  misc_feature (829)..(829): n is a, c, g, or t
  misc_feature (901)..(901): n is a, c, g, or t
  misc_feature (1159)..(1159): n is a, c, g, or t
  misc_feature (1348)..(1348): n is a, c, g, or t
  misc_feature (1353)..(1355): n is a, c, g, or t
  Peptide Sequence Number=SeqID_6270
  Probeset Number=SeqID_10041
nagacgagagatattaacgagacgtgtagaacagagcggagagagagtaatgacaagagagtagacacacagttagtaagatgaggtgtnctgtgtctctgactgtttgaagtcgcgaataatgtatatagatagaagtaataatatgatatatgatatatagaatacacataaagactgcgtgatgagtgcatnctggcgcgcgtggcgcacngggtggtnatctccccacactaaacacagagcgcggcgagatctcacctcgcacctgacgatatagcgatctaggcgtcgggccgcggcagaagcgtcggcgttgcgccgatgtgtgtgcgccggtgaagatccatactcaggagtgtgtangggacggtgtgtggcggatcgcagaggcgaggagagacaggcattgttgagtgcaaaataataagagattgaaagagcagcatgtgggcatcgacgctcagagaagcgccgcccactcgcatnggtacgacatcatagatttgaaatnacaatgataaacgaaagtacactaagccnatagacagacaataggatagatgatcgaggcctaatacctcgtcaatcgacagtctcgagcggcgtgcacacactacacaggaactacataagccgtagccagcattgctacatcgctcctgtatattatattcatctgggagacgtctaaaccgcgagcacaagaagtacaaaatatcatacaatgagagaggcnaacgacaacaactataccaaggaggacgaaacgtagccgtggcgtcctgtcgccacacgcgggattaggcatgtccccacgctatttacncagacacatagaaggttagacgcgcgacaagagaaagagcgcagagcggcgacgagttgcgcactcctaatnttcgctttgttcttgtgcttcgtcattcaataagttgcgaacattgagcaccgcccttgagagactcagaccagagttaggtgataggaggaaccattgtcaagcaagaataatagaaaagtcaaagacgagtacgatgctcgctggagcgtactcaggtacttttcgggcgccggggtggtggaggtggcgttgtcctgacaaagagctgttttaaataattcacaacgatttctagttgtttttttgtttaattanacatgagggaggaagacaagaacgagaagacaagaaagaataaatacaagtaaattacctcacacaccacgcggacgatcacacatagtataatagaagccggtccctccctcacaacagagaagacttccatacttttgataacatcatctacaagccctcataatttacagagggcgcgccgcacangcgannnccaccac

SEQ ID NO: 263 - DNA, 465 bp, Glycine max
  Probeset Number=SeqID_10042
ctggtgccccaccggggtcaagtgtggaatctattaccagcctcagactgttgttgcaggtggtgatcttgccaaggttcagaggcccgtgtgcataatctccaattccaccagtgttgtttaggtcttctctcgcatcgtccgcaaatttgtcctcatgtatgccaaaagggcgttcgttcattggtatgttggtgagggtatggaagagggggagtttttttaggcccgttaagatcttgctgccctggagaaggattaccagaaagttggtgcacaggcaaatatagatggtgatgaaggagaggttatatgtattaggaagtgttgcgcctattcaagtgtaccattgtgaggcgtttttcatttcagtgatgtgtgcattgttgagcattccatggaacttcccttgtttccagagtaactttggaactttatatgaagtgtggttaaagcttttatttc

SEQ ID NO: 264 - DNA, 1194 bp, Glycine max
  misc_feature (1194)..(1194): n is a, c, g, or t
  Peptide Sequence Number=SeqID_6271
  Probeset Number=SeqID_10043
tccgttccgccgcgatagcggccgcgaagcccacgattgacaacataggatataattattgcaggcgatgatgagcttgaagaacaaaccttgagggagaggttagctgcccaatttgagatgaaggatctcaagaagctaaagtacttcctcgggatagaggttgcatactttaggcagggtatcttcatttctcagagaaaatatatacttgatctcctcaaagaagttggcaagttgggctgtaaaaccactagagcgcccatagagcaaaatcactggattggaaatgatgaagaaatcccaaaggtagagaacacacagtaccagagacttgtgggaaaacttgtttacttatcccacactaggcttgatatagcctatgcagttagtgtggttagtcaattcatgcatgacccaagagagacatttgcaggcagtaaataggatcattcagtacttgaagtcttctcttggaaaagggttgttgtttaaaaatgagaaaaatttatccatgaaagtatatattgatgctgactatgcaggatcaattgctgatgggagatctaccacaggataccgcatgttcttgggtggaaatttagtaacatggaggagtaagaagcaaaatgtggttgcaagatcaagtgtaaaagcagaattcagagctatggctcaaggtgtttgtgagttgttatggatgaagatcatacttgattacctcaaaataaaatatgaagctcctatgggactggtttgtgataataaatccgccatcaatattgcacccaatccagttcaacatgatcgaacaaagcacatagagattgatcgacatttcattaaggagaaattggacagtggtggttatagctaccaaatacatcccttcaaagcttcagttggctgatatgttcaccaagggacttcccacggagcagcttcaagaccttacttgcaaggtgggaatgatagatgtacattcactagcttgagggggagtgttgtgatacattccataattagcacagattttcttctgtaattagtacagatttgatttttttttttatttgtacagattttgttccattttatttcttttcttaattaggtcgttggcagcttataaataagtattgtattcactctttgaaagacagaattacaataatattcaaattattatctttn

SEQ ID NO: 265 - DNA, 258 bp, Glycine max
  misc_feature (12)..(12): n is a, c, g, or t
  misc_feature (66)..(66): n is a, c, g, or t
  misc_feature (156)..(156): n is a, c, g, or t
  misc_feature (206)..(206): n is a, c, g, or t
  Peptide Sequence Number=SeqID_6358
  Probeset Number=SeqID_10044
tcgagtcagctncgtaggcctcccccccctaaaaaaaaaaaaaaaaagaattcgggccgccgccgncgatgacgatgttgagcagccgtgcggcaatttcaggtcaggctcattgagggccttttcaaaattatcaagaatggtattgcgcagatngatcgcctcactgagtgatttcatggaaatggcgtggcggcgcagatttnggttgccgaaataattcgtgcgtgcgccgatggccagcacgaggtagtcgta

SEQ ID NO: 266 - DNA, 1898 bp, Glycine max
  misc_feature (120)..(120): n is a, c, g, or t
  misc_feature (230)..(230): n is a, c, g, or t
  misc_feature (232)..(232): n is a, c, g, or t
  misc_feature (281)..(281): n is a, c, g, or t
  misc_feature (293)..(293): n is a, c, g, or t
  misc_feature (330)..(330): n is a, c, g, or t
  misc_feature (356)..(356): n is a, c, g, or t
  misc_feature (380)..(380): n is a, c, g, or t
  misc_feature (414)..(414): n is a, c, g, or t
  misc_feature (447)..(447): n is a, c, g, or t
  misc_feature (794)..(794): n is a, c, g, or t
  misc_feature (811)..(811): n is a, c, g, or t
  misc_feature (928)..(928): n is a, c, g, or t
  misc_feature (995)..(995): n is a, c, g, or t
  misc_feature (1002)..(1002): n is a, c, g, or t
  misc_feature (1108)..(1108): n is a, c, g, or t
  misc_feature (1204)..(1204): n is a, c, g, or t
  misc_feature (1237)..(1237): n is a, c, g, or t
  misc_feature (1287)..(1287): n is a, c, g, or t
  misc_feature (1292)..(1292): n is a, c, g, or t
  misc_feature (1361)..(1361): n is a, c, g, or t
  misc_feature (1363)..(1363): n is a, c, g, or t
  misc_feature (1414)..(1414): n is a, c, g, or t
  misc_feature (1449)..(1449): n is a, c, g, or t
  misc_feature (1505)..(1505): n is a, c, g, or t
  misc_feature (1549)..(1549): n is a, c, g, or t
  misc_feature (1553)..(1553): n is a, c, g, or t
  misc_feature (1555)..(1555): n is a, c, g, or t
  misc_feature (1562)..(1562): n is a, c, g, or t
  misc_feature (1581)..(1581): n is a, c, g, or t
  misc_feature (1610)..(1610): n is a, c, g, or t
  misc_feature (1633)..(1633): n is a, c, g, or t
  misc_feature (1659)..(1659): n is a, c, g, or t
  misc_feature (1663)..(1663): n is a, c, g, or t
  misc_feature (1678)..(1678): n is a, c, g, or t
  misc_feature (1692)..(1692): n is a, c, g, or t
  misc_feature (1700)..(1700): n is a, c, g, or t
  misc_feature (1760)..(1760): n is a, c, g, or t
  misc_feature (1765)..(1765): n is a, c, g, or t
  misc_feature (1771)..(1771): n is a, c, g, or t
  misc_feature (1803)..(1803): n is a, c, g, or t
  misc_feature (1823)..(1823): n is a, c, g, or t
  misc_feature (1854)..(1854): n is a, c, g, or t
  misc_feature (1869)..(1869): n is a, c, g, or t
  misc_feature (1877)..(1877): n is a, c, g, or t
  misc_feature (1898)..(1898): n is a, c, g, or t
  Peptide Sequence Number=SeqID_6359
  Probeset Number=SeqID_10045
cacgacctcgccctcccccgcactcccttctccactcccactctattatatcatcgacgctatactgtctatatcatatagtcgcctgaagtactctgatgtttgcacgagatgaagagncgtaggtgagcgctcgcaggcatagagtactatatatattagtgtatatgtaatctctgtctcgccgtcatatgtattgatgtatatgagtgtagtaagtgtcactcatntngcgcgcgctactcaagtgatgctgtctctcggcgctactcatgcatgcnctctctagctgntgattgtacgacgactccatcttatatctagatcacngtgtgtcttctcgtgcttctgtctantagtgagcttcgcgtcacccttgngtgatgcgctcgacagggtcgcgcgcacgtggtnactatatatatgtttatactatcttcttcgtgnctgtgctcgcacccatcccggcgtcgacgtcatagtcagctcgtatgggagcagtagtgagatgaggacaagagcgacgcgaaccgcgcaactactgtcgacactagcacgacgactcacgctcatctgcatcatgctcactactgtattctagacgcgctatctagctacgttgtcgttttagtatcgcgctcctctgttactcgtctcttgtagtcggctcgcgtagtatcgactgcgtgtcgtcgcacagctctgtcgcctcatatatgttatctttgctctcgtcgttcgatgcgtccatgtgcgctgtctgtgacgagcggtatcatatctgtgcgtgcganacgatcactgtagacgnacgatctgaagctatatgctggattatgtcgaagtatacgatcacacatagacagcctcgacgccatcaaacaaccatcctcagtcactctcacagctatactatttgtgtatcaantactacgtgtacttgttggcgtacatccatcactgccactcttcgtcgtatatgtactattagtaangtagagngagctacgagatgttgatatggcatgatgtgataactttgagtacgtacgagcacatataagcgtctgcgcagtcatgtcactctctaacgtatatgatgtatatngagtcttcgttgacgtctctagcaggtatatgcatcacgctactgatgacgcactgctgtcatctctctacgtgctcgagaccgtgttgacgtatnttgtcacgctgacgctgcgcatcactgctacanctgtgctgcataattctgttacatcctgtatatcatctgtcacgtacgcnagctncgttgcatacggcccgctatactactcatcattttagatgttgctacgactatgatacatatacacttntnactgttatacatgtataattattcgactgtcagcatggctcatcactactnatcaatcgacagtcgtgtcactagtgtacatgggncgacgcggcgattctcagtatataatcttattcgccgacctcttctactctgctgnttcatatatgacaacactgcacatgtgtgaatgatatgcgatancatngngcagttntactcagtgctatatcgcntcgtatatgtgtcggcatcgactatactncagtagcatgacaggtacagcgntagtagcgtgcacgatagacgaatcngcgnatcgcagcgtacgtngcatatcactatcntgtctcanagtgatatcgttgctaacatatgcgtacgagtgcacgatgtgtatcacgttacgatatcnatganactcantctcagcgatatgctgtatcgatctcccacgngcatagctcacgactatcangactcatgattagacatgatgatatgagtcncgttatatgatgagnagtagacnatcatatgggatactgggtgn

SEQ ID NO: 267 - DNA, 472 bp, Glycine max
  Probeset Number=SeqID_10046
aaaccgcgtacggcaccatccggctaatcgccaccgctcgaagctacggaggagattgattcaacctctctctatctatatcggaaacgtctaacggcggactaatttacgtgtcgacggagctagaagcagcttatcttctccagatctctaaccgattctcaccgcttcctgtttcaccggttgggtgatcaaagcaatggttcttgatgggattgtatcttcaccattgaggagacaccagtctctaaagaaacagtgggaagatttgggtagctgctcaaccgttgttaaccggcatcgatatttattaacagcattgcttctcttgggctttctctgcacggtttatctttactttgctgtcactttagatgctaggcacaactcctcctgctacggcttggctgggaaagagaaggcaatgtgtcaagccatctctaaagggaaactcaaattggtttgataaatt

SEQ ID NO: 268 - DNA, 517 bp, Glycine max
  Peptide Sequence Number=SeqID_6368
  Probeset Number=SeqID_10047
atggggtttgaagtgtttcacccacatctccaactagtggggttgtggccacgagacagttttgccagcggtgataggaagaggagaggtacagttagggttttgagaatgatgagtaatctcacagctttagagatccgatgaggcatgaggagaagctgagcttggaaatgtcgaggtcaacggcgaaattgaaggtgtggccaaatttgttgccgttttggtggaagttgcaaccaagtcctttgagatccaatgatgcagtgtccctcgtagagatattgggtggaggcgagggatgaatctcgcgtgagaaagtcgtaatgttgcatgggtcgatggcggtggtttagagggcgcaagtgaaggggaattctgggtttaggttcaaaaggcgatttaggaagtggcaacgggttatttgggtggattttttcttctttttctaaattttgattcttagtctcatgttgcttgaacttcttgatatcccaatgtgaaagaactttgattgtgg

SEQ ID NO: 269 - DNA, 1507 bp, Glycine max
  misc_feature (1)..(1): n is a, c, g, or t
  misc_feature (7)..(7): n is a, c, g, or t
  misc_feature (43)..(43): n is a, c, g, or t
  misc_feature (58)..(58): n is a, c, g, or t
  misc_feature (102)..(102): n is a, c, g, or t
  misc_feature (109)..(109): n is a, c, g, or t
  misc_feature (136)..(136): n is a, c, g, or t
  misc_feature (175)..(175): n is a, c, g, or t
  misc_feature (277)..(277): n is a, c, g, or t
  misc_feature (311)..(311): n is a, c, g, or t
  misc_feature (328)..(328): n is a, c, g, or t
  misc_feature (405)..(405): n is a, c, g, or t
  misc_feature (407)..(407): n is a, c, g, or t
  misc_feature (488)..(488): n is a, c, g, or t
  misc_feature (537)..(539): n is a, c, g, or t
  misc_feature (602)..(603): n is a, c, g, or t
  misc_feature (626)..(626): n is a, c, g, or t
  misc_feature (628)..(628): n is a, c, g, or t
  misc_feature (634)..(634): n is a, c, g, or t
  misc_feature (765)..(765): n is a, c, g, or t
  misc_feature (828)..(828): n is a, c, g, or t
  misc_feature (1017)..(1017): n is a, c, g, or t
  misc_feature (1173)..(1173): n is a, c, g, or t
  misc_feature (1294)..(1294): n is a, c, g, or t
  misc_feature (1342)..(1342): n is a, c, g, or t
  misc_feature (1378)..(1378): n is a, c, g, or t
  misc_feature (1384)..(1384): n is a, c, g, or t
  misc_feature (1418)..(1418): n is a, c, g, or t
  misc_feature (1423)..(1423): n is a, c, g, or t
  misc_feature (1430)..(1430): n is a, c, g, or t
  misc_feature (1432)..(1434): n is a, c, g, or t
  misc_feature (1436)..(1436): n is a, c, g, or t
  misc_feature (1438)..(1438): n is a, c, g, or t
  misc_feature (1440)..(1440): n is a, c, g, or t
  misc_feature (1442)..(1443): n is a, c, g, or t
  misc_feature (1475)..(1476): n is a, c, g, or t
  misc_feature (1482)..(1482): n is a, c, g, or t
  Probeset Number=SeqID_10048
ncggcgntcagagtacgagacacaacgtgagagtgagagagcncgcgagtgctgcgtntggatgtagttcatcgcgagcacgcagcgcacgggtgctaagtngtaatanacagcgtgaaacgaggcgtcacaacangagcggcggagtagatagatagatatgagtcgtgcagtngggtgtgtgtgaatcacaaacagataagaagcgagtaaggtgttagggatggtgacaggcgtcgcagcagcgctgcgatgatatatatcacactcgaggcgncgcgtgcgaagtatgcatgagaggatgcgaacgngagtgtgagtgagtttnatctggtcaagatgcgcccacgaccgccaagcgtcgtcgtcgagagcgcgcgcttctcggtgagcgagctcccgcgngntgattttcagcacgcgcgcacccatcttttattatattgagtacataactgccacgtggcggcgacatccgcagaatcgantgaaaagagtataattaataatgttgtaataatatcctcctcggttgtnnngggggtagtaggggtgggggggagagagagacaccacaccaacacataggggggtggggtgtnntaataatacagggagatgtgccncnctcttncatgcaccaccaccccatctcatatcatatctcatgatccaccacatatattaaacgcgcgaagagtgtgtgggagacctgaggaagtttacatatacatagagtggattgatatgcacgaatttacacgngaatcgagatcccgcatcggttaatataagtaatgttagttattcttcaccattttgtatagngtgtggatattgtatatcacacgtcctctttatatttaactcaacccactatctcatcgcagtcttcgcacctaatcttgtaaaatttaatcatattaaaaatatacgcgctgagcaatcatgatcataaggtaacgcactgactgaaacataccaaggtatacaacatattcctcacccactgtttanattttggatgatcatttacagtatagtgtatactgtgagaaatacggatatatatttaacaagaagaatataaaacatacaatagatcacgtatccaaacacggatggggacgcttgtatccagccaccgcacaacagcgcgagcacacccagccnctctcacggcgcagaagcgatcacacatgctgcgagatacacgacattgtttgatgggagcagcagaagaaatacatggttaaagatgagagaggggcggaaggggaggggctggtggggngtagaaaagggagacgaacaacagagcgagtctccttattgtttctcngtgttggtgtggggggaaggactcacaatagatagnagtctngctcacatttattggttttgttccccaaataacncaccngttttcncnnncncncntnnagaaggaaagggaagcgcggcgcgggcggggnngggagnaagagaagggaaggacacaacttaa

SEQ ID NO: 270 - DNA, 983 bp, Glycine max
  misc_feature (1)..(17): n is a, c, g, or t
  misc_feature (836)..(983): n is a, c, g, or t
  Peptide Sequence Number=SeqID_6369
  Probeset Number=SeqID_10049
nnnnnnnnnnnnnnnnngtaagggtgagggtgagggtgagggtaagggtgaggaggtggtggggagtgatagtagtatggtttcttctttggaggaggaggtggtggagagtggtagtagtatggtttcttgtaaggtggaggaggtgatggtgggggtggggaatggtagtagtatggcttctttggtggagaaggtgaaggtggtggaggagaatgataataatatggcttctttggtggtgaaggagaaggtgccgcccgcagagcggtactattatttcttccccccccgccatcccagtactactacttccccctacatttttcctctttcccccccccctgcccctttatccaccccccatttcttccccctccctctctccccattcctccaccccccccccgcccctattcttttttatccccccccctttttccccatttccctttccccccccccctcctcttcctcacccacccccccctcccattttttttaaccccacccccaccccctccccatttttcccccctccctccccccttaccctctttctccccccccctccatctacactctcacactctaacactcctgccccataaacccacctatatttatttccccccatatcccccacacccccacttaatcttccccacttttttccccccccccccacccattttcaccctttcctcttcccacccctccttctctctttctctcacccaacaccctcctctcccaccctctcttccccgcccccacctcctgacaccttccttgacacaatccccccccccgcccccccccccccttactctttnnnnnnnnnnnnnnnnnnnnnnnnnnnnnnnnnnnnnnnnnnnnnnnnnnnnnnnnnnnnnnnnnnnnnnnnnnnnnnnnnnnnnnnnnnnnnnnnnnnnnnnnnnnnnnnnnnnnnnnnnnnnnnnnnnnnnnnnnnnnnnnnnnnn

SEQ ID NO: 271 - DNA, 791 bp, Glycine max
  misc_feature (791)..(791): n is a, c, g, or t
  Probeset Number=SeqID_10050
attcaccgtttctctctcttccttatcatcaaacttgctctgatctgatcagcgcttttgaaaatgtcggagggatcagaagaaacgaagacaaagatcgattccaccggagagttatcggacgtcgataacgagaactgcagtagcagtggaagtggcggcggcgagacgaagaagacatgcgttgattgcggaacattcaaaactcctctctggcgtggtggccctgccggacctaagtcactgtgcaatgcttgtgggatcaagagcaggaagaagaggcaagcggctctcgggatcaaaccagagaagaagatcagaaaaagcaacagctgtgacagtgatctaagcctcgaagatgatggccgtaacgtcaataacaagatcaagaaaggtgatgatcacaaaacttgcagtagcaagagtggtactagtactagtagcagctgcagcaaaagagtgagtaagtttttggatctgggattggaagtgccggtgatgaagagatcagcggttgagaagaagaggctgtggaagaaacgcggcgacgaagaaagagccgccgtgcttctcatggcgctctcttgcggctctgtttatgcgtaaacgatggagatcaagcttctttgtttggtgtcgttcgagaataattaaagtgaggggttctgattaattatttaattaacttaagacaatagagataactgtgtaatagctagtgatgtcgtggttttttttggcttgttcccactgatgttatgtgttcttttgctaatcaagtttcaattttn

SEQ ID NO: 272 - DNA, 549 bp, Glycine max
  Peptide Sequence Number=SeqID_6370
  Probeset Number=SeqID_10051
tatgttgcataatgcttgtgtattgatcgatattgattgacttggtgatattgtgtgttgatccttgagttgtgaatgttgtgaaaatgaatgagacgtgttgtgttatgatgtgatgttgggtgacaaagtggtgaaatgatgtgaggtatgtttaagtaagttttattttgtttttatgatatttatacctacatgttgtctcgttactcttcattagttaggaatgtgataactcactcccggtgtgctatttgtgtttggatcctgtgatgatcttgaagcttatgttcgtgggagcagatgaataggtggatgattatgaagaacctgatgctagaggacacgggaacacaatgctctgagaggatgtgacattagggtataggttctatattaattgtatgaagttttagacggtcttgttttgagccgaagtgaatttattatttatttggacaatttttattattatgttagaaaggtgaatgtgagccttctaccctcttgaaatgcttatatttaaatgtgttttaaattgttttaatc

SEQ ID NO: 273 - DNA, 253 bp, Glycine max
  Probeset Number=SeqID_10052
ataaaatattaattatttagttaaaaggccaatcctttattcacaatggctgaggaacaaactactcaagttgccgaactcggtgaagaacaaaagaacttccaagctcaattcaagcttttcggtaagttcgactactccgaaatcaaggttgaagatgtctgcttcaaggattacatcgccgtcagcaacatcaagtcccaagtcttcatcccccacactgctggtagatggcaaatcaagaaattcagaa

SEQ ID NO: 274 - DNA, 414 bp, Glycine max
  Peptide Sequence Number=SeqID_6371
  Probeset Number=SeqID_10053
gaagttaaaattcttccaaggaggcaaaaaaaaatggcccaccaaaggaaaagaggagttccagagaccggccaaaaaaaaaaaaatggtataacccccccttaaaagtttttaagagaaaggcttgctaagcccttgtgcaagttaagaggaaggctttgcccaaaccaccaccacccaaatgatgttgggaagatttcgtttatgtctgtccccccaagcagcccaaaaatgccaagcccccatggtttaggaataaccccttccccccttttttatttgtctctaagtagctcatcttcagaattcggacttgtaaattgtttgatttattgatgaagcatgattaactctgcgcgggttgtaatttttgtttacaagtaccgcccaagtattggaggatagtagggtccc

SEQ ID NO: 275 - DNA, 1507 bp, Glycine max
  misc_feature (39)..(40): n is a, c, g, or t
  misc_feature (45)..(48): n is a, c, g, or t
  misc_feature (51)..(52): n is a, c, g, or t
  misc_feature (65)..(67): n is a, c, g, or t
  misc_feature (261)..(261): n is a, c, g, or t
  misc_feature (814)..(814): n is a, c, g, or t
  misc_feature (831)..(831): n is a, c, g, or t
  misc_feature (948)..(948): n is a, c, g, or t
  misc_feature (967)..(967): n is a, c, g, or t
  misc_feature (1205)..(1205): n is a, c, g, or t
  Probeset Number=SeqID_10054
ggtttttctttgtctccgggctgctgcccttcctccttnnggtgnnnnggnngcgatgggcgtannnacattacttgatctacccatctcaccccaagaaatacgcgcccagggaggcaactccccgccgtcttattctgcgttctcgccacaccccgccttgtgattacttcctcggctcctcttctatctctcttctccttcgtgcgcgcccctgctgcgcgacgcctcgggctcagcaacctctgtcgatagacgtgntaccaaactagagcgaggagaggatgtcacagaagcactctgtgatcagtgaggcgaccgctctctatccctctgtgtctgacattttagtgcttttgtgttgttgtctagacccgcaacgagcagcgcggggtacccttcctctttatagaacccaccccatactcttgccctcgcatggcggccaatgtcggagtaccgtagcacaccatctccgcagagaacatccgcgagtgctctgctctagagccgctctcccggcaaaggcgtcggtgcgcatcgtgctggcgcagcacgtcgcttcatctgtctatatactgtctctatgcccgccgcgccacggaccgcgtctcgcgcggcctcacccgtgacacaccaatactcctcacgtcgcgatgttgcgcactcaccaatgcgggaaccggcgcaggcagagataaggacgagacaagatatatatgttagcttaaacctattcgtgatgcgatgtgggagtcgagttaattctgaagttatattttatttattaacttagatatataaataatagtanaagattgatagaagagnagtggtgttgaaaacacgcagcaacccgcgcgtccgtctctatggcgtgagtgataatgtgcatatgtgtcgcactatgttagacatgcttgccacccacctcccacacgctgcccncaaccactgtcccacgtcntctcggcgcagaacgtactgcaaactgaatatcgaggtgctagccgtctttcatcgcctgatgttgtcgtcgattgactgctgataattggactgcgcacatcgatccttcctgcccctcgcatgcgttgtgactgtctggagagctggcgcagcgttgatacgcaacactgctgcgtgcgctggcgtcgtgtctggacgtggagcgtaggaggcagctggactacgattgttcactncgactatactgcatgactattgctaggcctcataccgactgcaactgcgcgctcgattctgtcgccctgcacgggcccgttattatgcacgcgggcgtcccgagcgcgcgcggctgtccggatgtcaggcgcgtgcgcgtgtgctgcgtgggagtcgtgtgtgggatctcgacgctggatgagtggcagtctcgcgagcgacgcgtgctgtgagtgcacagtgcctgcgagtgcgagccggcagcatactcgtcgcacgctgtatcgctgcgctacactaagtaccactctctcgtccaccg

SEQ ID NO: 276 - DNA, 1571 bp, Glycine max
  misc_feature (62)..(62): n is a, c, g, or t
  misc_feature (167)..(167): n is a, c, g, or t
  misc_feature (541)..(541): n is a, c, g, or t
  misc_feature (759)..(759): n is a, c, g, or t
  misc_feature (905)..(905): n is a, c, g, or t
  misc_feature (1082)..(1082): n is a, c, g, or t
  misc_feature (1242)..(1242): n is a, c, g, or t
  Peptide Sequence Number=SeqID_6372
  Probeset Number=SeqID_10055
gtggatgtgcgccacgcctcgcccctcgtcctctctctcccacctaacgtacatcgccatgnatgtagatgattggtggtcagcgctttcttcctttcatagagatggcgacttcttaatctgtaaacgttttctacttctgttctcatccgtggtgatcgttgacncaccgctaccataacaacagaggagcacgaactctacgtattttggtataacattcttcgctgctctcgctgtcctcctgctccagctccaacgctcactcggtttgtcacacgaggtgtcttgttatatatcgcgaggtgagtgtctagactcatgtctgagggatctcgatgacgcacgatcggtaacacccaccgcctacatcttccaccgacttcctcttatagtgtgatgacgaccgttggctatctttctcgtgtatatccgtctgtcacgcgcgaatattaactaactgagataagacgtatagaatatataccagatggctctacgatgtgacgaagcgtgcccgtgtgcatcgtcactatggccnctctagctctgctctgagtgatacctaatgaactcgaatatgatctttacgtgagaccatcgagagtcagtggatcgctattagagtacaatatcacccgcctctcccctgacctccatatcgacatcctagagacaaagataagcgatataccccgccacaacagtcacccacaaatggctcgctgcgccgacgccattcttatcgtggatgcgtcnatacttattctagcgaattaccgcgccacgcctccccacttccgataccgccactgcgtatgactacggtccagttgcaacgcatcgacagctagacacgtcatactcgctgtccttcgacacacacccattacacatatttatangtctgaccatacgcagctatatgtgctcacacgctgtgtgcacgtgtgtcagctctcgtaacaacacgtcatccgtaacgctgcactcgctagagtactatattagatcgcaccgatgacataaacgccgtacgagtgtgcgcagtccatcgacctgtcacctatcctgatatgaanactcataatgcgcactaccaggtgtgcgctggcaataactaccgtgataccaggcgcacgtgaggctcggcgcaactctctacacttgactgccacttgaatatactcctagctagctcatacaatatcattagctactcgtccgctcgtgtcagagaangcggtagcgacgcatgagtctcatctgctctaagtgttgtacgcatcgttagcagcccacgcgtctgcctcgcatcatgaaacggaccgatcgcagcccacccgtgcgcgcgcgctggcgaaagactgttcgtgacgacacgacagtctagtacgtcgcgcactatcgagtgagcaagtcccgaccgcagagcatagaaatgttaacttcagagcaatctcaataagatctcgatacttaattactcagcacgtagcgactatctatcgatcgcgcaacatctctcatctccgcgcggacgcatgcactgactcgaatcacgctcttcg

SEQ ID NO: 277 - DNA, 653 bp, Glycine max
  Peptide Sequence Number=SeqID_6457
  Probeset Number=SeqID_10056
actgaggaagacaaagcagtaaaacccaatcagaagaccctcactctcagaccactcttcacgatctgtaattacaagaagcttagatttgacgcaagcaggcaccatggacagcatagttgattctctgaataatgcctatcaagattttgttgctgcagcagctaatgaggtagaagccaaagaaagtgctggttccattaaaacaatggcagcagatactgctctagaaaactttaaccagaagtgggaattgattataggatcatgagatcaagatgaggagcttgtggagtctgtgaagacaaggataggatctgagagtgctggtgcatgaggcaacaaggcctgtgtaaggaaaacctgaacaagctaccatgaccggacttcctcgcattagtgcagctcggtatgcacagatgagtacagctgatggacggcttgcgactgaatagcagcactgtatctggagctggaactgctaattcgactcttacccacccctcagctccgatggatgccagactttctgacgatgctgcgcagtagcattaatgggactgggatgatgaatagtctatagcttctctctctatgaggagcatgcctacacgatagtgctgataaagcatttatacaagacttagggatag

SEQ ID NO: 278 - DNA, 1557 bp, Glycine max
  misc_feature (1)..(2): n is a, c, g, or t
  misc_feature (7)..(26): n is a, c, g, or t
  misc_feature (35)..(35): n is a, c, g, or t
  misc_feature (52)..(52): n is a, c, g, or t
  misc_feature (55)..(55): n is a, c, g, or t
  misc_feature (62)..(62): n is a, c, g, or t
  misc_feature (78)..(78): n is a, c, g, or t
  misc_feature (84)..(84): n is a, c, g, or t
  misc_feature (135)..(135): n is a, c, g, or t
  misc_feature (141)..(141): n is a, c, g, or t
  misc_feature (148)..(148): n is a, c, g, or t
  misc_feature (150)..(150): n is a, c, g, or t
  misc_feature (161)..(162): n is a, c, g, or t
  misc_feature (182)..(182): n is a, c, g, or t
  misc_feature (192)..(193): n is a, c, g, or t
  misc_feature (202)..(202): n is a, c, g, or t
  misc_feature (213)..(213): n is a, c, g, or t
  misc_feature (215)..(215): n is a, c, g, or t
  misc_feature (312)..(312): n is a, c, g, or t
  misc_feature (401)..(401): n is a, c, g, or t
  misc_feature (454)..(454): n is a, c, g, or t
  misc_feature (458)..(458): n is a, c, g, or t
  misc_feature (585)..(585): n is a, c, g, or t
  misc_feature (593)..(593): n is a, c, g, or t
  misc_feature (613)..(613): n is a, c, g, or t
  misc_feature (637)..(637): n is a, c, g, or t
  misc_feature (654)..(654): n is a, c, g, or t
  misc_feature (764)..(764): n is a, c, g, or t
  misc_feature (766)..(766): n is a, c, g, or t
  misc_feature (771)..(771): n is a, c, g, or t
  misc_feature (804)..(804): n is a, c, g, or t
  misc_feature (932)..(932): n is a, c, g, or t
  misc_feature (1100)..(1100): n is a, c, g, or t
  misc_feature (1226)..(1226): n is a, c, g, or t
  misc_feature (1324)..(1324): n is a, c, g, or t
  misc_feature (1510)..(1510): n is a, c, g, or t
  misc_feature (1524)..(1524): n is a, c, g, or t
  misc_feature (1546)..(1546): n is a, c, g, or t
  misc_feature (1557)..(1557): n is a, c, g, or t
  Peptide Sequence Number=SeqID_6458
  Probeset Number=SeqID_10057
nnggggnnnnnnnnnnnnnnnnnnnnggggggggngggtttttggtgcgtgngcngtcttgntgcggggtggtgtttntgtgangtgtgttgtatagtcgttgatggtgggtgagtatgtttagtatgttgcganaggacngcgacananagagcacgcgnnaaactgtagcgcgtgatganagagcggagnngccgggacngcgggaggcantnggtatgacggagggcgtatgcatcttaccaactacaactctctcgcttgtctctccgtctcgtgcgcgtgtgcatcacatgtcctcgcctgcgcgcngtcgccctgctctgctggacctgtcgtgcgatctctctctgcactgtgcgtactgccgcctactctccatacctcgctgtcacactctnatgactctctctccattctcacctctatctcatctcactgcacctcctccttnctcncgcccgcctcctccctcctcctctctctcgcctcctcttctctcgctctctcggctgtctgccgccactctccccactccgtcgctctcgcctgcgcgctctgtgcgctgcgcgcctcgtgagagtncagatagnccagcgtatctctacacccnctacacacacacgatcacataccncccctccacattccgcnacacgacaccgaccacaccactcgcctgaccacgcgcactcgctaccgcgctgcgccgagccagcgcgtgacagcactctagcgtgatctctgggtgcgatgtgtcgcgnanaggtncggctacgatggcacgctgttcgtcagtatatnaggagaaatacaacactgctgctcctatgtcctatgtgtgaccagcgcacacatcactcacacacctcgcttacttacctgcatcacctactataatcatactgctcgtctgcctctctctcgcacancatgtcgccgcctgatcgataccagaactatatgacaagatacaccacgagcgctcggcgatgtcggcgtgcatcttcggctcgcgagctgctcaacgccgccgcacactacatctcatcattctgatatcagcaaatgtacttgcctaccgttgtaccaagtgcgancgctcatacctatcataaatacgatatccacacccatacatactccaaagaagaacacaagacgatcgtgatgacctctcgctctcaacatgagcatcaccaacacagtccagtcagtctcaatcngtggcattcgatatgatatgttacgaagcactcccgcgctgcataccgtccaccgtgcacacaccgaccttctcgacccgactcatacctctgcacancacaccacctcacttcgctcaaacatctactacacatcctgcgtacaccttcatctctcccagatatgcgtttcagactccccgcaagccgcgtgcgaagtgccaatgcgctcccggcgcgagatataacgacacaacaccacaaatatctctctgctctacgccaaccacagcactccattgcanctgcgctaccgtcncacaccgacacactcgctcgcnacacaacaccn

SEQ ID NO: 279 - DNA, 663 bp, Glycine max
  Probeset Number=SeqID_10058
ctgcagttccgcgccgtggcggccgacaccggcgccatcggcggcgaccgctcgcacgagttccaggtgatcgccgacaccggcgaggacgccatcgtctactgccccaccagcgactacgcagccaacatcgaactggccgaggcgctgtccctgatcgcccagcgcggtgtcgccaccgaggccctggaaaaggtggccacgcccggcaagagcacctgtgccgatgtggccgagctgctgggcctgcccctggactgcaccgtcaaatccctggtgctggccaccgacgagaccaacgacaaggggcgagatcgtcaagagcgccgtgtggctgctgctggtgcgcggcgaccatgacttgaacgaagtcaaggccggcaagatcgagggcctgaaggcgggcttccgcttcgccaccgagaaggaaatcatcgagcacttcggcaccaagcccggctacctgggcccggtcaagctgctcaagcccgtgaaggtggtgggccgatcgcaccgtggccaacatggccgacttcatcggtcggtgccaacgacgaaggcttccacataagggcgtgaacggggggccgtgacctgcccagcccgatgggggggggccgacatccgcaaccgtggtcggagggcgaacccgagccctgacgg

SEQ ID NO: 280 - DNA, 1003 bp, Glycine max
  Peptide Sequence Number=SeqID_6459
  Probeset Number=SeqID_10059
atcgaaaaacttagaatcacggtttcctctcggtcctcctgtgtgcggcgccgccgctgcgcacagcacacatctcgcgcgagcgcggtttctccggcgtccggccggccatggcactcactaacctcctgccctcctccatctcctcgcctccaccccatccacttcctgtcctttgcttctccaagactgcagcatggtgctcggctgcggcaaaggagccgatgatgcgcgagcagaacagttcaacggaggcagtagcacggggcagcggcagcagcggcatcatggaggccatcattaaggatacctagctcttgctgggctcctgtgaggtgagccgtggtggcactccacttggattctgcccgaaccaaacaaggcctgggagatcaaattactaaacggtgagtctgcctctcatggaaaaaaagagagggaggaggtacacctatactggtagtagaacatcgacatcaaaagagaaaactactattgctgtattattagaygwtaacgatgccwtgtatcaaaacacaaggggaaatcacagcaactgtatgttaagttacctactactccctccattcggaattacttgtctcggaaatggatgtatctagacctaaaatacgtctagatacatctatttctgcgacaagtaattccaaacggagggagtaagctttaggagtggcaaagttgcctgtacttgcattttacatgttctacttctaccaactggtaacagtactagcctaacacaagtttacacaactgagcaaagataaaaagagactaggattagtagtgcggagcaatagttcagtggttacaggacactactagtaaaagaaaaagcgaaacaggcatggaaacactgttccaatgcttgcttgatgagcaccactgaagaaaatattcattcattgccttttgtccgtgcgtttcaagccggcacgccaaaaaaaaaaaaaaaaaaaaaaaaaaaaaaaaaaaaaga

SEQ ID NO: 281 - DNA, 1819 bp, Glycine max
  misc_feature (143)..(143): n is a, c, g, or t
  misc_feature (190)..(190): n is a, c, g, or t
  misc_feature (196)..(196): n is a, c, g, or t
  misc_feature (229)..(229): n is a, c, g, or t
  misc_feature (295)..(298): n is a, c, g, or t
  misc_feature (345)..(345): n is a, c, g, or t
  misc_feature (352)..(352): n is a, c, g, or t
  misc_feature (356)..(356): n is a, c, g, or t
  misc_feature (363)..(363): n is a, c, g, or t
  misc_feature (445)..(445): n is a, c, g, or t
  misc_feature (453)..(453): n is a, c, g, or t
  misc_feature (455)..(458): n is a, c, g, or t
  misc_feature (460)..(460): n is a, c, g, or t
  misc_feature (525)..(525): n is a, c, g, or t
  misc_feature (535)..(535): n is a, c, g, or t
  misc_feature (537)..(538): n is a, c, g, or t
  misc_feature (541)..(541): n is a, c, g, or t
  misc_feature (593)..(593): n is a, c, g, or t
  misc_feature (634)..(634): n is a, c, g, or t
  misc_feature (636)..(637): n is a, c, g, or t
  misc_feature (701)..(701): n is a, c, g, or t
  misc_feature (808)..(808): n is a, c, g, or t
  misc_feature (875)..(875): n is a, c, g, or t
  misc_feature (951)..(951): n is a, c, g, or t
  misc_feature (1144)..(1144): n is a, c, g, or t
  misc_feature (1169)..(1169): n is a, c, g, or t
  misc_feature (1214)..(1214): n is a, c, g, or t
  misc_feature (1287)..(1287): n is a, c, g, or t
  misc_feature (1289)..(1289): n is a, c, g, or t
  misc_feature (1297)..(1297): n is a, c, g, or t
  misc_feature (1351)..(1351): n is a, c, g, or t
  misc_feature (1353)..(1353): n is a, c, g, or t
  misc_feature (1372)..(1372): n is a, c, g, or t
  misc_feature (1461)..(1461): n is a, c, g, or t
  misc_feature (1494)..(1494): n is a, c, g, or t
  misc_feature (1529)..(1529): n is a, c, g, or t
  misc_feature (1592)..(1592): n is a, c, g, or t
  misc_feature (1675)..(1675): n is a, c, g, or t
  misc_feature (1755)..(1756): n is a, c, g, or t
  misc_feature (1783)..(1786): n is a, c, g, or t
  misc_feature (1792)..(1793): n is a, c, g, or t
  misc_feature (1795)..(1795): n is a, c, g, or t
  misc_feature (1801)..(1802): n is a, c, g, or t
  Probeset Number=SeqID_10060
cgacacgactcgttagtcgactatcatcgtgtctgacgattgagcgatgtatacgtctactcagagatgtacacgtctatcactgtgagtagtatagtatctggatgtacgctaactcatcatcaatggcgcatatcacatantgcgtcgtattgagtagtttctctaactagacgtacacaccatcatntctacntagtattatgctgagacgtggcctcagtcgtgnttctgatcatataagatagcgttagcgatacatctacatagtcgatatcggtctcgagacacacgnnnnagcgagcaacacgtgtatacgagtgtcattacccactagtgtaacgntcacacntcgntcgatcncactcatctcgctcacgcgccttgaatcgacgtattgagttatatagaagtgatagctgctcatgtcgcatctcaagcgtcnctatgcangnnnntngtggagacatgcctgtgcgtcgtcacgatcctccgactccagtcaatgcgtcgtcaccgtcagtnggggcgcganannacnacagatcgtcgagtgctgcgagatagcgtgttgtagattagtaatccgtacntatacttcacgtacgactccatgacatacatcactacgaanannagtgcgcgagcacgaacagtgatctcgtgatcgtatgttagctcatctgatactcgtctgtatngacacacatctactatatgtctgtagagtagtggtgatgtcatgcagacgatgagctagcacaacgcgcacttcttgtagcgatcgaagcgctcgtcgctactattnaggcatccttagcgtatcgtctgcgctggtggtgtgtatgagcgcaacaacatatacacggcgccgnagactcttactcagctcgatgcatagcgctactcgcgtcagctcagtccatgcatatctctatataagatatatcntagaggcaagagctagacgtatctctcatgtttgtccatgttgtgtcgatcgtatgtactgggtatgatactagtccgctctcgtcggcagagacgaagtagcgagagatgggcgatcttgttaatgctatcatatttgatactatgttgtgtgagagtagtcagtcctgcacgtattctcgtatcgactatntagacgtatctaagagtcgagcagncgatacattgtgcagctatacgtgatgagttacagagaggatganagggcatgtaggatgaggagtgatagagggagtatgtgtttacatcgataattagtcacacaatctgtgaaanangataagtncggctcaacgtcgacatcacaatatcgccgttactccgactctagacgcgaccncnggtagcagcgcagcagatntgatctattaagtctcactaatgtgtgtgttgctgctgagcgtacgcttgcagcattgatcttatgatgtctgagagagtggctgcggncgctggtagtataagagtcggctactacgatanacgtacgacagacttggagagtacgcggctggacnatgtgagcacgtagacagggcgagtgggctgtgagagagagtggtatgcagctgtttggtgcnttagaagcgagacagagggtagattcatctggccactcacctcgtgcctgagtcctactgcgcaggctaataactcaaatganttgtatcgtgtctgcgcgggcctgcggcgatcgcgagatgtgcgaggagcttctcgaggactttgtagcctcctctcctnnccactgtagtgcttcttctagcggtannnngttctnngngggtgnngcgtgtgagttccttta

SEQ ID NO: 282 - DNA, 1657 bp, Glycine max
  misc_feature (26)..(26): n is a, c, g, or t
  misc_feature (105)..(105): n is a, c, g, or t
  misc_feature (192)..(192): n is a, c, g, or t
  misc_feature (395)..(395): n is a, c, g, or t
  misc_feature (482)..(482): n is a, c, g, or t
  misc_feature (649)..(649): n is a, c, g, or t
  misc_feature (844)..(844): n is a, c, g, or t
  misc_feature (1042)..(1042): n is a, c, g, or t
  misc_feature (1095)..(1095): n is a, c, g, or t
  misc_feature (1119)..(1119): n is a, c, g, or t
  misc_feature (1126)..(1126): n is a, c, g, or t
  misc_feature (1191)..(1191): n is a, c, g, or t
  misc_feature (1289)..(1289): n is a, c, g, or t
  misc_feature (1300)..(1300): n is a, c, g, or t
  misc_feature (1360)..(1360): n is a, c, g, or t
  misc_feature (1369)..(1369): n is a, c, g, or t
  misc_feature (1481)..(1481): n is a, c, g, or t
  misc_feature (1488)..(1488): n is a, c, g, or t
  misc_feature (1519)..(1519): n is a, c, g, or t
  misc_feature (1529)..(1529): n is a, c, g, or t
  misc_feature (1561)..(1561): n is a, c, g, or t
  misc_feature (1573)..(1573): n is a, c, g, or t
  misc_feature (1581)..(1581): n is a, c, g, or t
  misc_feature (1624)..(1624): n is a, c, g, or t
  misc_feature (1651)..(1651): n is a, c, g, or t
  misc_feature (1657)..(1657): n is a, c, g, or t
  Peptide Sequence Number=SeqID_6460
  Probeset Number=SeqID_10061
ctctctctgccgcaccgcccgcgtgngtagctctctgtgtgatgcgtgtgttagagcacacaaacgaccatcgatatatgagacttgagagacgctgcgcgcacntactcttctctgtcgacagatcatatcgtatagataataatgctgatcacaccctctctcaacttccgcgcacacctcgagtgttcncgtgtgttctgccgtatactacacacgcgcgtctgtgtcgtggtcggtgcgccatattacaggatattggctcactgcagcacgcagtggcagattgatttgaggtgacacggaggagcagtgagaggacaatagatgctgtagtatgatactgcgaagaagcgttatactctatgttatttcgctcaatcgatggtctgctnatacgtgtgagcggagctgcacaaggaactcgtacataatacatctatacagcaacatacatatacacaccaccacttacaaacacnttcggacggtagactggactctctcggacgcgcgtgactgcgagctttgatattattaccttagcgctgatgtgatcttgtgtttagttgttgatctgtcgagagtccgcatccagctgcgtagtagatctgtaacggtttcatagatggcacggatcgtagccacnacgtctaaacgttgttcgagtggacactgtgcatccgaatattagaagatggagatataattgtagatgacgcatcaatgctctatctgacgccctataacaccaacaagacagagctcatcgatccttgacgaagtgcgacagcgcctgtaactaggctagatcttagcgcaatggcatcactgtatggcgtgntagatgcgaccgtccacgtagtgagatacatcaatactctaggtgtgagtaacatgtgcaacggtgcacgctgcagcgcgcaacatagagtgtatgagcacggactgcgaagagtgcttgaacgcgtagcgtatgcgtgtgatggcgtcatcgctatgtatttgtatggatatatatactttcagttattatggcaancgcagccggtcgctcatgtgtgtctgggtgcgcctgatagagatgtcagtacngaggagactgcaatcgcacgacgncgaacgngtgtgtgatgtagatatatatctatgctacaaccgcacacaatcgcgcggactacatcacatctnctcatgagcatcacggtacgggtgcagagcgtcagctgtatgagcatagcgcgctctagggtgatataatgtagctgatatatgtcgcgtggcctgancacagtgctgncgctaccgctagtctgatgttgtatgatgcgcgcggagcgacgtcgcagtagatgcatcnctgtagttncactgcattgacagacgcacgatacgagaacgtgcggtgtctgtcacgcacgtatgctctgctgtcacgacttgcagctacgatgatggctcgcttgacgctgcgcgtgcanctcgtgncgcctgctcactgtggcttatgtgcgatgcnagtcgtcttncgacactatcatgatagctactctaatcgatntgcgcatgcgtncatatcgnactgcttagactacgtctgatgcgtctgaatagtgtgtatatngagtcgatgcgctgagcacgtagagtnatacgn

SEQ ID NO: 283 - DNA, 768 bp, Glycine max
  misc_feature (1)..(2): n is a, c, g, or t
  misc_feature (7)..(7): n is a, c, g, or t
  misc_feature (17)..(17): n is a, c, g, or t
  misc_feature (33)..(33): n is a, c, g, or t
  misc_feature (736)..(768): n is a, c, g, or t
  Probeset Number=SeqID_10062
nngttcntagtcgagcncaagacgataaatttncgaatagtattgaaggatatcgggaagtatacataaactcggtcgactattagcacacgattggttttcaattaatattggaacagttacaaaagacgatatttatttttattcaaaggcaaatattgatttgtaaagttcgacgaatatccgaagatcgtagtgtatttcaactaaaagatataattaaattagcacaagttgaagttaaagaacgtccaaccgaacaatttattttcgagctaattgaaaaaaccacaggcaatcgttagttttaacagctcatcgtgatcgtgttaaagaattctggctacaagaaattcgcgagtttgccaaggattacgacgaaactaaagatacagcaactgaagaattgcaaataatttcacccgaagccaaatcaccaccttctgaaaaagaggataaacctatcgagaaaaaagttgcaacaaaacgagacgcaactaccgaagaagctaaaccgcaaaaaatcccaagaatagaagctactgaaagtgagcctagcaaaaaagttgcacaagaagctccgaaaccagaattaaaaaaagaaactaaagaggaaaaagtaacagaaaaacctaaagaagagaagcccaaagaaaaagtaacagaaaaaccaagagaagaaaaagttaccaaaaatccttcagaaaaagctgaattgactcaagatacttcagtnnnnnnnnnnnnnnnnnnnnnnnnnnnnnnnnn

SEQ ID NO: 284 - DNA, 547 bp, Glycine max
  misc_feature (63)..(63): n is a, c, g, or t
  misc_feature (137)..(137): n is a, c, g, or t
  misc_feature (144)..(144): n is a, c, g, or t
  misc_feature (172)..(172): n is a, c, g, or t
  Peptide Sequence Number=SeqID_6461
  Probeset Number=SeqID_10063
gatttgattcgtctttctctctctctgactcgaaattttgcagatctggaaatggcgacggcnacgtaccctccaccgccaccttaatacagactttacaaagattacttgcaaaccctaagtctgctcccgacccntccacgnctattggaggcacttatctttgttttgnaggccattacccactagggatgttctaaccaccttggaagaacaggggtgggccagctccattctaagggccttatgttgatttcaagaagggacttgaggtcctctcacggaaagtggaactaaccggtttgggacttgcggaaattctattgggaaacctttcccggttgggggggagggaaaaaaaattttcccggttttttaaaattttaccccccttttaaatatttgggggcccctcaggggggaggaaaactttttttaatttttggacacttcaaaaaagggcggaaaaaaaaaggggggggcttaaaaaggggggggagaaaaaaaaccaaaggccctttaaaagacctttggacaactttttggg

SEQ ID NO: 285 - DNA, 1772 bp, Glycine max
  misc_feature (17)..(17): n is a, c, g, or t
  misc_feature (24)..(24): n is a, c, g, or t
  misc_feature (35)..(35): n is a, c, g, or t
  misc_feature (37)..(37): n is a, c, g, or t
  misc_feature (43)..(43): n is a, c, g, or t
  misc_feature (50)..(50): n is a, c, g, or t
  misc_feature (52)..(52): n is a, c, g, or t
  misc_feature (102)..(102): n is a, c, g, or t
  misc_feature (136)..(137): n is a, c, g, or t
  misc_feature (140)..(142): n is a, c, g, or t
  misc_feature (146)..(146): n is a, c, g, or t
  misc_feature (204)..(204): n is a, c, g, or t
  misc_feature (327)..(327): n is a, c, g, or t
  misc_feature (329)..(329): n is a, c, g, or t
  misc_feature (367)..(367): n is a, c, g, or t
  misc_feature (411)..(411): n is a, c, g, or t
  misc_feature (418)..(418): n is a, c, g, or t
  misc_feature (645)..(645): n is a, c, g, or t
  misc_feature (658)..(658): n is a, c, g, or t
  misc_feature (744)..(744): n is a, c, g, or t
  misc_feature (774)..(774): n is a, c, g, or t
  misc_feature (997)..(997): n is a, c, g, or t
  misc_feature (1183)..(1183): n is a, c, g, or t
  misc_feature (1356)..(1356): n is a, c, g, or t
  misc_feature (1526)..(1526): n is a, c, g, or t
  misc_feature (1569)..(1569): n is a, c, g, or t
  misc_feature (1573)..(1573): n is a, c, g, or t
  misc_feature (1587)..(1587): n is a, c, g, or t
  misc_feature (1686)..(1686): n is a, c, g, or t
  misc_feature (1688)..(1688): n is a, c, g, or t
  Probeset Number=SeqID_10064
ttatgttttttgtatanaatagtntgtggtgtatntntttgtntttctantncagacagaaagaaaagagacaacacagacaatacacaacatcaatcactnatagaatacacacatacctaatatcatccctcannatnnntacnactctcatcccacactccctctaccacacctctctattacacaaccaacaggctacanacacatacactaatttacaatgcggcgttattatcagatccacactacctcgcacctcgtcttataaacttacaccgctatatcatacatataaggacaatctacagacgtacagccagccanancaacaatactacatgatacttatattatacacgacacnttcacactactgttatatacacgctacataatctgcatctctcntcaatanataatacatcatacatatattatatcacatattaatcaatatatgcaacatacatgtcacaagcacagcactactaataatgatcggtatgtctttactacactatccctccatctcgcgccatctatcgtatatctatgcatatcaccatagcttatcacgttcttataccatatttctctacattatattatactgccgtctactcgtctctcggcctctattcntatatggcaatgnctctcgtgtattatctcactctgtcacatcatcaacactgccgcgtctacgtccgtcttgctgataagatgagtatgcgtctctcntcgcaccgcgatgctgtctgttgcgagtcntcgatgcgcaggatagtaaatgcgataacatcgacacaacatattagtactcatctcacgagtaaacaaccactacacacacaaacaacatgaacattaatcacagctaagcactatgacatcaactgatcgatattcacacgcacaccacgaccactcaccgatatcatatactctacacttgcacgcgctccatctctagtcgtacacactcaccgctgtntcgcgctcgccgtctgacagatgaacatagcatataacatgtactattctctctctcacacaccatcattgtagcgtgctacacatcatatcagcacttactcatgttctgagtcgtgtctccagacccactccacttgtcctcgcgccatacgctcattcgcgattcgagtatgatcatccccanatatataatgcgtcaaccctccatcacactcttctcgctatcgctcctaacctacgcataccctatctatctctttatgttcgtaatatattatgcatcactctctgtatcgatatctctctctatgtgttaacacacactcacgaccacactctgcacgatctcatattccnctatgacgacacctcagcgcatctcatatattagtctatctgtcgttgtgtgcgtcgtggtcgatcagcgacacactcgcgatatcatccattgtgctactagcgtgtgacatcgtgcgtgtatgtctcatttacctaatctctctcatgataccctatctgatattggntatacattacgcatgactatacatccacacatcctgaacgaanacanctctcgactatcanttagtcaacacacactcttaccacgctattgcacttcagcactcaccctccagctcacgcgtacgtacgctcattgtctgctctcgccacaaacatctntncgcctaccacgctcaatataatagcacatcgtctcacgcccatgccacgtgctaacacatacatactaactatacaccagcgca

SEQ ID NO: 286 - DNA, 1384 bp, Glycine max
  misc_feature (758)..(758): n is a, c, g, or t
  misc_feature (956)..(956): n is a, c, g, or t
  misc_feature (962)..(962): n is a, c, g, or t
  misc_feature (997)..(997): n is a, c, g, or t
  misc_feature (1071)..(1071): n is a, c, g, or t
  misc_feature (1334)..(1334): n is a, c, g, or t
  Peptide Sequence Number=SeqID_6462
  Probeset Number=SeqID_10065
tcccccccccacttctcccaccactttctctttttgtatttgttttatccccctttagcctcttggcacaaataaccaaaaccttcctcatactatatatttctcgaagcgatactcgacttttcatcccaaatatctttctcgaaaaacagaaattaccacacatccccaacgaaataccgagcagctattcatcgtcatgaagcagggccggccctgagaatacctcaccgacgaaattaaagttaagacactcataacaatctactacgcacacgcacagccaaacttactctggttatacaccttacgactatctactgcttcctcgcgcttcaatgccatccccccgccccccccccttgagctctgctctcctgacttttaccacccctcgtcaacccccccgcgccccccgctatactcacccacccacctaccccccactatttcacccacctgcctttggtttctgccccccagcttcgcccaccttctacgcgcccggttattttgttttttatttttttcacgccccctcctctcctttttttccccccccccccccccctccccattttacctctctgttaacccccgtgcgaatatttacccccccgcctattaattcgcccgcagaaatccccacgccctccgcgtactatttcccacccccgccgaccccccccccgccttgcacctttttatttttttccccccccacacaactctcctccccgagtacctctcctaccctnctccccggcctcgcgcacggaatatctggttcacactgctcagatggcgtggttactggaccccgcgcccctactcgcgccgccactttcctcctaatatattacattatagcgccgcgtatcacccatccatagtgacaacgcgcgggcatctattgatgtttttctatctcctcccccgcctccgcccgcgctatntggtcntaatcatactactccctcgttgtgataatccaggnaagacaccaccctcgctactcccttctctacctctcacccacgtcgcgccgcccgcgcaaccagggcagttgcnaagagatcatgcgaccttactatatctacacaccgcgtacctcctcacccccacctctcactgtattccgccctcatttcgtctacatactatccgctcaccaccaccccgcttatcatcctccctcaccgactcccacgcacgccctgcacaccacgcattatattgtatgagacctatagttagatattcacatctctactcctaccctaatatgccgctctattttatgactccgccccgacccggatatcacaatctantcatcctcaccatacatcacattatctctgccatcactcgccatgcgctc

SEQ ID NO: 287 - DNA, 706 bp, Glycine max
  misc_feature (1)..(104): n is a, c, g, or t
  misc_feature (705)..(706): n is a, c, g, or t
  Probeset Number=SeqID_10066
nnnnnnnnnnnnnnnnnnnnnnnnnnnnnnnnnnnnnnnnnnnnnnnnnnnnnnnnnnnnnnnnnnnnnnnnnnnnnnnnnnnnnnnnnnnnnnnnnnnnnnnnataaaaaaaatgtttagtgctgtctctaatcatgaatgaaattcataaaatcaggagccagacccacataattttgtgatttctaacaaatattaaccaatagtaaaaagcgtgttattgagtgttttgctaacatttctcttgatgtcaaatatgttgattatgttattgactttgtttttgtttttgtttttgaataaaggttggctaacagatccccttatgccttaacaaaaaaagtgattcacaacatagacaacaacttttctcctgacgacacgccagattttggttccttgaacttgaactttctttaaggcaactagtgttggttctgctctatgtgaagtggtactttctggaatagcatttgcatgcatgtagaaccaaagaaactaatataactatgttattgctctcgagaccatattttatgcctaattagtgaacttgaatgtgtcaactatgacatgaaagttgggttattttggattataatgcgtagaaaatattcattatgctcagaaaacctgccccttttaaatgttattcgtagaccttaatgtatttggacaaattgattatcgattgtgtgtaacann

SEQ ID NO: 288 - DNA, 1364 bp, Glycine max
  misc_feature (18)..(26): n is a, c, g, or t
  misc_feature (28)..(31): n is a, c, g, or t
  misc_feature (34)..(34): n is a, c, g, or t
  misc_feature (57)..(57): n is a, c, g, or t
  misc_feature (63)..(63): n is a, c, g, or t
  misc_feature (74)..(74): n is a, c, g, or t
  misc_feature (76)..(77): n is a, c, g, or t
  misc_feature (301)..(301): n is a, c, g, or t
  misc_feature (370)..(370): n is a, c, g, or t
  misc_feature (503)..(503): n is a, c, g, or t
  misc_feature (665)..(665): n is a, c, g, or t
  misc_feature (775)..(775): n is a, c, g, or t
  misc_feature (1047)..(1047): n is a, c, g, or t
  misc_feature (1213)..(1213): n is a, c, g, or t
  misc_feature (1260)..(1260): n is a, c, g, or t
  Peptide Sequence Number=SeqID_6463
  Probeset Number=SeqID_10067
gtttgttgtgcgcgcctnnnnnnnnntnnnnctntcgcgcgggtgtgtgcggggtgntatagntttgtgataananncgaaccctcatgtggtggggagtgcacacaccgcgcggagggggaggaggcatgcttactaggtaggctagggagtctactccgccgcgctgtcatggtaggattaggttagcgcaggcagggatgtcactctcacctaacgatagccttccattcggtagaagaagagagagtggtgtaggtgtgtggggttagatgattcgtaggtatccgcggcgcggtgncgtgtctgtgcccgccgaggaatatatgttacttacctgtcatacaaatgatgcacacgcacatactcncagcctaatcaagtttaagttgggatgtacgtgggatgatgaggccaagtgtagcgggtacctcgtgcggagcgatgcggtgctgtgtgaaggtgggagtgggggcgaggtgtggtgcctgggcgtgcgcggnctcgtcagcggccaatccatcaccccgcgctccatcagaagggaggacactagcgtagtgtgaggtgtggggacagaaagacgatcacatacagaaagctcaacagccccacgcatgttctcgttctatgaggtttgcggctttggctggcgcgcatggctngcggataatggcgttgacaagaaatggctcggccgcggccatttctgtacagcaaaggagggagtgatagtaccgtaagcgctaagagtagacttctccgctctacacantgtggatgggcgcgccggctacacccgagctcagtatgaagatacgataacagcatcgacacgacttctcagcactgccagctactgaagggattcacagagctagtcttatgccacaaacctataaagtgtcctcaccttcacccggtattgaggacaagggccggtggggaactacgtcctatacgtggcatgctcatagcacggcccacacgaaactgatagtgtgataccgcagaatcaagccatgagacataacagagaggatacgnctgagcgcgcgcgcggcgtgcgtgacgccgtcacgagggcgtggacgcgcactggtgcgggcacgcacgactcgtctgtgacaagcggagttgcgcgtgctctgcggtcgagacgttgctacacggcgtgcgcccaggcgcagttatctccgcggagccgcctggngcgttagtgcgtgcgaagtgacatcatggggagtgtccgcgcacganctcgcgctgctgtgacgcagagtgtgcgcgaggcaatgctacactatcatacagaaattctagagagcaaatgatccgcgcgcatacaggagatacgacatacg

SEQ ID NO: 289 - DNA, 690 bp, Glycine max
  misc_feature (690)..(690): n is a, c, g, or t
  Peptide Sequence Number=SeqID_6545
  Probeset Number=SeqID_10068
cattccattcaagagatacagcaatgatctttctaaactgagagggcatgtgagctttaaggagattcttcatcttggaccattcatggaccccaggtctgaggacaaagataactgcagctaccgtctagttggtgtcattgagcacgaagggcatcaaataaatggagggcactacattgcttatgtgcggggggcaggtcacaaccatcagagcagtggttcttcctcgtgggttcgtgcaagcgatctcgacatcaaggaagtctccctagaaaaagttctcggccgcgaggcgtacatgcttttctacgagaggatggaggactgatgcatgtccggcattgtacccaactaagcaatcagaagggcactgacaaaagaagcagaaggtgttttgatggcctggtgtaccgtcctacttacatagtctatatagtctgtcgtccagtccaattttgttgattttggcgggctgggtcattgcagttgcaggattttgcattggttgcaacttgtagcgtggtcagctggagagaaccttttttctctgtccatgaaagtatagtaattcttgtcggaacgacatgggataggttcgacagtgaatattttttgttagaaacgagattgaatacacgtaggaagacactggatattttttgcattctgcaattaaattcacctctn

SEQ ID NO: 290 - DNA, 535 bp, Glycine max
  misc_feature (503)..(503): n is a, c, g, or t
  Peptide Sequence Number=SeqID_6546
  Probeset Number=SeqID_10069
gggccccccctcgagtcagtacgtaggccccccccccccccaatctcaatctcatcatcatcaccgccgtcttggctctctctatcattctctctctctgaacccttcagtgagacacaacacacaagctatagtccattggtaatggttaattagttagtgagtgaaaaatgaagtttggtttggactttgttggagtttggacaccactttggtttttgtttggtggaagcttcataacttatgccagctaatctcattcgccccattaaattattcttttgctgaaaagtcgtttctgttttctttttgtgcttttccttcttcctaattattttaagaaactctgtctctgtctgcttcaatccactttggccctcactggaaaagtagtagtagtggtacttaaacgccattaaaagttatgtgatctttggaagtatgatacaggtggtgtgagtgtgatctatctatcttgacttaggagtttggacaaagtcaanagcagataaaatgatgccctactgtgaaaggg

SEQ ID NO: 291 - DNA, 1807 bp, Glycine max
  misc_feature (1)..(1): n is a, c, g, or t
  misc_feature (26)..(26): n is a, c, g, or t
  misc_feature (35)..(35): n is a, c, g, or t
  misc_feature (40)..(40): n is a, c, g, or t
  misc_feature (81)..(81): n is a, c, g, or t
  misc_feature (166)..(166): n is a, c, g, or t
  misc_feature (294)..(294): n is a, c, g, or t
  misc_feature (363)..(363): n is a, c, g, or t
  misc_feature (384)..(384): n is a, c, g, or t
  misc_feature (421)..(421): n is a, c, g, or t
  misc_feature (440)..(440): n is a, c, g, or t
  misc_feature (447)..(447): n is a, c, g, or t
  misc_feature (513)..(513): n is a, c, g, or t
  misc_feature (533)..(533): n is a, c, g, or t
  misc_feature (569)..(569): n is a, c, g, or t
  misc_feature (679)..(679): n is a, c, g, or t
  misc_feature (686)..(686): n is a, c, g, or t
  misc_feature (722)..(722): n is a, c, g, or t
  misc_feature (759)..(759): n is a, c, g, or t
  misc_feature (775)..(775): n is a, c, g, or t
  misc_feature (802)..(802): n is a, c, g, or t
  misc_feature (836)..(836): n is a, c, g, or t
  misc_feature (838)..(838): n is a, c, g, or t
  misc_feature (952)..(952): n is a, c, g, or t
  misc_feature (1027)..(1027): n is a, c, g, or t
  misc_feature (1056)..(1056): n is a, c, g, or t
  misc_feature (1171)..(1171): n is a, c, g, or t
  misc_feature (1306)..(1306): n is a, c, g, or t
  misc_feature (1450)..(1450): n is a, c, g, or t
  misc_feature (1457)..(1458): n is a, c, g, or t
  misc_feature (1465)..(1465): n is a, c, g, or t
  misc_feature (1490)..(1490): n is a, c, g, or t
  misc_feature (1507)..(1507): n is a, c, g, or t
  misc_feature (1528)..(1528): n is a, c, g, or t
  misc_feature (1546)..(1546): n is a, c, g, or t
  misc_feature (1550)..(1550): n is a, c, g, or t
  misc_feature (1554)..(1554): n is a, c, g, or t
  misc_feature (1558)..(1558): n is a, c, g, or t
  misc_feature (1599)..(1600): n is a, c, g, or t
  misc_feature (1655)..(1655): n is a, c, g, or t
  misc_feature (1657)..(1657): n is a, c, g, or t
  misc_feature (1698)..(1699): n is a, c, g, or t
  misc_feature (1701)..(1701): n is a, c, g, or t
  misc_feature (1703)..(1703): n is a, c, g, or t
  misc_feature (1743)..(1743): n is a, c, g, or t
  misc_feature (1764)..(1765): n is a, c, g, or t
  misc_feature (1767)..(1769): n is a, c, g, or t
  misc_feature (1771)..(1772): n is a, c, g, or t
  misc_feature (1780)..(1780): n is a, c, g, or t
  misc_feature (1786)..(1786): n is a, c, g, or t
  Probeset Number=SeqID_10070
natgcaggcggagcagacgacggagngagcagcgnaaacngtacgatcggtgtcagagttgagagaactgcgaatgcttcnatcacactcacacatatctcagtaccaagtagcaacagcgtcagagagcgcagacgtgagtcaatcgcatagtgtgtgatgggtnagatgagatatagtagtagtcatgtactagtttatgtagtgtatgtcatgtatatctctatctctagttctgcgtgtatatgttgattcattataatagcagtatagtagtcggtctttgaagcgcgncagcagtgatatcgatgtgcacatatctgtgtgctactcagtacttcatggctcgtgttgatcatagtnctcgccgatagaccagcacgngcgtgcatgatgagtctatgacgtacgtgatcgcgtngtacgtatagagtcgatgncgagagngagtcatgtatcgtatgatcatcagacatctggcgagtatgatgagcatagtgagcatggcgtagnagctcactagcactatatcntgtcgtagtacagtgctgagtagtatgtcctgctcnagatcgctagctgaagcgtgagatagagagtactgcacgtgtacgtctcgcatacatacactagtatgatagatcatatcaagtcacagtgacatatcatgctgagtcgngctgtgntatcatgatcaatcacacacccatacatcacatccncgtgcacatgtgtacgagacatcgtgcaggcgtgtgngtagagtcgacactcnaaacatgtcacctatcacgccatatancactgtgacgagaatatgtttactgatcatgtancnatgtcaatccatcaatccaccacatctatacagataatagtcatcgacgtcgccttctcatcctgtgttgccgtgtgctgctgtcatagttgagtgtatcactctagcccgctnttatctctgtgtcttgctatattcagtagagtaggtacattgtgaggatattaatttgatttcatttgtatatgngtgttatgtgtcaatctaacagtatcagncgagacatacatgattaccagcgacgggcagggcatcgagcagcagttgacgtggcgagcgcgtagaagagcagaggaggcagagtacgacaccaaggagcaccgagaaatctgnaatctctacacaagacaagcatagatcgtgcgtcgtatctagcatgcgtataacacatgagtatcatacacaatttacacacttgatccacacacacaacaccagaactctagccacaagtaactatgctgagtnctgttgcatctcatctctctctcacatcgcggataaacataccaaacagctataagccacagcaatagtgagctatagatgtcaacctgtgagctacaacacagctgagaagcgactacaaccacggccactcggtgcgcgtanctgcccnncctgttngtggattgtccgcagcgcggccgtnggcgtggcctgcccgtngtgcgagaattagtgagttgnagagtaggaggtagccantcanacanttcntttatcgaatacatgaatccttatctactacacatctcacnncctctacttactcactcaaacacgtgacatagccgcaatacacagatgttatatnantaatactcgtagtatttctactgcctctctcttttatatanntntnaataaatgtgagggagatgcgcgaggagtgaggagtagancactcgcgacagcgcagcacnnannncnnccaagggnaagggnccaacacaaccacacacaatc

SEQ ID NO: 292 - DNA, 181 bp, Glycine max
  Peptide Sequence Number=SeqID_6547
  Probeset Number=SeqID_10071
gatggctaattgcgaatctaaggaccttaaattttcaagttataacctgtttaatcttatgctctgcctactgataccaggactaaatattattactgagtatctctttggtatcatctaccccggaagatcaatagcaaatgtatgctttaaaaccttggtgatttgaagcttggtcact

SEQ ID NO: 293 - DNA, 451 bp, Glycine max
  Peptide Sequence Number=SeqID_6548
  Probeset Number=SeqID_10072
acggttgttgcggcgagcgagcaagcaagcgagcaagcgagcaaacatcagaaccgagaatgcctaagcaaatccacgagatcaaggacttccttctgacggcgagaaggaaggatgctaggtctgtgaagatcaagagaagcaaggacattgttaagttcaaggtcaggtgctctaggtacctctacacactatgcgtcttcgaccaagagaaggctgataagcttaagcagtcacttcctccaggtttgagtgttcaagacctttgaagatcctcttgaagtcaaagggatatgtcgatgcgacctgctttgaatatctttcgcttggataattttgatttttgttgccttttgaattactattgttcagactctttcccttttctattgcaagactgagtttttattctgttatttgctatcaactttgttagtaacatgtattgtcc

SEQ ID NO: 294 - DNA, 1634 bp, Glycine max
  misc_feature (1)..(1): n is a, c, g, or t
  misc_feature (105)..(105): n is a, c, g, or t
  misc_feature (140)..(140): n is a, c, g, or t
  misc_feature (234)..(234): n is a, c, g, or t
  misc_feature (266)..(266): n is a, c, g, or t
  misc_feature (481)..(481): n is a, c, g, or t
  misc_feature (489)..(489): n is a, c, g, or t
  misc_feature (538)..(538): n is a, c, g, or t
  misc_feature (545)..(545): n is a, c, g, or t
  misc_feature (660)..(660): n is a, c, g, or t
  misc_feature (733)..(733): n is a, c, g, or t
  misc_feature (1007)..(1007): n is a, c, g, or t
  misc_feature (1026)..(1027): n is a, c, g, or t
  misc_feature (1064)..(1064): n is a, c, g, or t
  misc_feature (1080)..(1080): n is a, c, g, or t
  misc_feature (1323)..(1323): n is a, c, g, or t
  misc_feature (1360)..(1360): n is a, c, g, or t
  misc_feature (1412)..(1412): n is a, c, g, or t
  misc_feature (1434)..(1434): n is a, c, g, or t
  misc_feature (1436)..(1436): n is a, c, g, or t
  misc_feature (1443)..(1443): n is a, c, g, or t
  misc_feature (1538)..(1538): n is a, c, g, or t
  misc_feature (1549)..(1549): n is a, c, g, or t
  misc_feature (1557)..(1557): n is a, c, g, or t
  misc_feature (1592)..(1594): n is a, c, g, or t
  misc_feature (1599)..(1600): n is a, c, g, or t
  misc_feature (1602)..(1602): n is a, c, g, or t
  misc_feature (1605)..(1605): n is a, c, g, or t
  misc_feature (1612)..(1612): n is a, c, g, or t
  misc_feature (1614)..(1614): n is a, c, g, or t
  Peptide Sequence Number=SeqID_6549
  Probeset Number=SeqID_10073
nggtgttgagaggtgatggcaggtatacgtgcgcggccccgctcgacttgtgcgtgctcgtggagtgtcgcgaggcacacgcgcatcgctgtgtggtaggagagngggcagtggtcagtatattacatctacagttcganaggcgtcgtaatactacacggcgcggcgtggtgcgtagtagtgatgagatattcgtgctccgtactcttgcatttagttgtactgctctggtgnagcgtagaaggaagaatattctgtgcgatagntaattatatcatataagtgctgacgcgcgtcgctcttactgttcggtagctaggtccgctcttagaggctcgtcgcattggtgctcttcaagatgaatttaagagtatgttcgtgctctcgcgatttgagcgagtgggtgagttggtgagagtagtagaggtggtctgtgcgcagcgcgatctcagccgcgggcgtgttgtagcgtcgttgcgtntctgattntttgcgtagggtgtaggtggctagtggacacgacgcagaccagaaacanctctaangccacgacagatagatagcagacaccagcacgcgcagccatcctgacaatcacacatcttcgtgtaggtgtcagtgcggagtgacagtgcggtggacactagaatatgaggtgantgatagacggagtgtgcgccttgtgcgctggggttccgcggtgtgactagtagggcgtgtcgtcgcacgggtntggtgagagatgaggtatgttgtttcttcgcactattactcacattatattatatagtctttgttcaatacgaggtagaaatgtgattgttggcccgcggtcagaagacagtaatgtaggatgtaacgatatatgtagagcacagcacgagcatattgtgctcgaccgatcagttctttctctctttcattatattataaaatatatgttagtgagggttatttatgtattggtctctatttaattttcttattcttatctcatcttgtagtantgttcgtgaggaggtgggnnggagtgggaggggtggtatagaggtggggcgtgagtnggtggtgacagaggangggaaggagagaggacgcaaggcgagcggttggtcggtgggtgttcacgcgagacacgtcgtcgatggcagtaccgtgcggcgcggtccccctatgtcgctcacgccgatgcgctgttcgccatatctcgcgtgtctcactataagaacagtagtcggtagggacgctgagcccaactatcacacatactcctgcacccagggaactcagcactcacacgcatctccgcatagagatctctgntgcgcagtcgacatgatattaagggggacgtctcacncacacgacgagtcgtgagccgagcgcggcctcccctaccgtcgcgtccacanccccgctattcagtcgtagtcncntccaatntcccacctagttccgacagcggacacgcaggtctcaatgtggctacatgcaccggctcggcttacgaacccgccagtgccccagcagtcgaggantatcgatgtantcactcanacagaacgagtgccacgagggtatgagcgccaagnnngtggnngnggnggagggngnccacaccacccccccccccc

SEQ ID NO: 295 - DNA, 1336 bp, Glycine max
  misc_feature (208)..(208): n is a, c, g, or t
  misc_feature (1271)..(1272): n is a, c, g, or t
  misc_feature (1276)..(1277): n is a, c, g, or t
  misc_feature (1293)..(1294): n is a, c, g, or t
  misc_feature (1296)..(1296): n is a, c, g, or t
  misc_feature (1298)..(1298): n is a, c, g, or t
  misc_feature (1302)..(1323): n is a, c, g, or t
  Probeset Number=SeqID_10074
cgggtcatgtgactgcgcgaccggcctacgcacgtgctagggcacacggatgtgtgactgaggcatgttaatcgcagaggcaagtgatgagacgagcggggagggacagaaatgtgcgcgggcgtgtgccagaggacgggagactactaggagcggaaagcggaatcggatttatcattacagcagaatggtaccagtatgcgctccntttctcaatacgtacattagacggagagacagtgcaaagccgcggccccgctcaccctcagaaaaactgaggccaggacaaaaaagaggaaggtctatgagaaatagaagagtagaaataaatatgaggtggggagagcgtgccagggcgggtccacgtattcaccgtcaatgttacgcagtgtctcggcacgtggcgtgaatagacaggtgaggtagggagtagtgagttatattacagaaaggaaatagaatgcacagcacagcggagatggaaagaataggagcgacgctatcaaatgagagagtactacgggtgggcggtgtggtgcggcaacacccagaagggtgggaaagcacggacctcattgtctaatcgccggtaaggagagggtgtgtgggcggggagaggcgggagaaattcgtccaaaaggatggttagttggggggacggaaggtaatgcttgtgcgtcttacctgtatagttttaatactgcctattttcttgttatatatttttataaccatatcgccagtttgtattccactatgaagtacgggaggtggtgctggtggagggaaaaatgtttgattgactgcttttgtccgattattagcagaggttaaaacgaatgggaagaccataccaccacagctacagtggggcgagtgttactaccagaaagtaaaagagattggtgtgcgtaatgattatttttgttttaattgtatcacactacaatgttgttgaatcccatccttaactctcccaaagacggggaggggagtgcgtgggtgcgatcttacacatcaataatcatattagacacttgtggttgttgggatgttggtggttagttggtgaccatcttactgaaatccatttctcacaacatatttgtagtgtgtgggtattgtccttcgctggtacaagaggtaaatggaatggtgtgggtgtttgtggaatgtgcttgaggtggttaaaagaaaaagaagaggaaggaggcttcatcgtatagccgtgggagctgcaaggcgggggcccccggaccccaattttgttnntttnntttcaacctaactctnnantncttnnnnnnnnnnnnnnnnnnnnnnggcacccccacac

SEQ ID NO: 296 - DNA, 1423 bp, Glycine max
  misc_feature (1)..(1): n is a, c, g, or t
  misc_feature (13)..(13): n is a, c, g, or t
  misc_feature (63)..(63): n is a, c, g, or t
  misc_feature (77)..(77): n is a, c, g, or t
  misc_feature (109)..(109): n is a, c, g, or t
  misc_feature (111)..(111): n is a, c, g, or t
  misc_feature (193)..(193): n is a, c, g, or t
  misc_feature (341)..(341): n is a, c, g, or t
  misc_feature (521)..(521): n is a, c, g, or t
  misc_feature (654)..(654): n is a, c, g, or t
  misc_feature (684)..(684): n is a, c, g, or t
  misc_feature (709)..(709): n is a, c, g, or t
  misc_feature (712)..(712): n is a, c, g, or t
  misc_feature (903)..(903): n is a, c, g, or t
  misc_feature (1007)..(1007): n is a, c, g, or t
  misc_feature (1063)..(1063): n is a, c, g, or t
  misc_feature (1081)..(1081): n is a, c, g, or t
  misc_feature (1112)..(1112): n is a, c, g, or t
  misc_feature (1177)..(1177): n is a, c, g, or t
  misc_feature (1318)..(1318): n is a, c, g, or t
  misc_feature (1320)..(1322): n is a, c, g, or t
  misc_feature (1324)..(1324): n is a, c, g, or t
  misc_feature (1331)..(1331): n is a, c, g, or t
  misc_feature (1403)..(1403): n is a, c, g, or t
  misc_feature (1405)..(1405): n is a, c, g, or t
  misc_feature (1416)..(1418): n is a, c, g, or t
  Peptide Sequence Number=SeqID_6550
  Probeset Number=SeqID_10075
ncgtgtagcgatnagagactgagttcgtgcgtcgacgtctcgcggcagtgttgtatgtgtgantgtgtgtgagagtnggagagtgcgagacggcagcacgtggctggtntntaggccatgtagcgcaccaacaacatcatgtcgatgttttcgtatatcactctacgcacatgtatgtgatcgttcgcactanacgacgaatgtatgtgagggctgaggtggtgagagttgcagggatgcagacggtgtgtggagtcgaggcgctgttatacagagtctgagtggttgcatagcgcatggcacgctgcacgtagggtgtggagagtcgagcgaggagtganaagatagtgtactatatatcatgtatgcacgacgagagcggggagggagagggcgagttgagatgtggataatatgagagagcgcagagactgaataggtagtatatgagatacagtatatagtctgatgtagtagtagtatgcagatattgtgtgtagttggtcgaccgactcagttcnatgatgatcagcgagacagagtgcgtacgtacggcgaggtgtggtagtgtgttgtagtcgacacacaagcgcgcgctgcgacgtcgagcgcggaccagcatgatatgtacacacacacacaatttaacacacntatggtctcctcattctctacgactgttcngcgtgctagtcgtgtaggtataganatntcacacacatgaatgggagcagcggcagagtattgacgtagggtgtgggagcgttctctatatcatcaagtcgttgtcagttattaaccacttcgtgttgtaacatgttcactctagtgtgtagtagtcacgagctgacgttcagttggcggtggttgtggtgtatatgaaatgtttgttatatgtgatgngcatatcgtgtcatatttcgctgcagataaagcataagcacacaccgtatcaccacacacaactagacaaatagagaacagaagcaagtatccaacaatataanaggtcatatatgtggtatatatataatatattattacaagcgcgcgaggcagacanaccaacaacacccaaaancactagcgcggcgcgccgcagaacacggatnggatgaggattatctcacaacacacttctcctcctagacacaaacgcagtaggagagaaaggagngggaaggttcgcggattccccctgcgcacgctccaccgggagcggatcacacaacatacgtttatcattgtagcccgggcggcgtgcacccccgcccggtgcgaggctggcgcagcccctttgtattctcccacccggctntnnntntcctctnggacgagccgtgtgcgagaaggtttgagcgcaaacaatgcccaccgcccctcatcgccccccacaataacananaaacacccctnnnaaaac

SEQ ID NO: 297 - DNA, 422 bp, Glycine max
  Probeset Number=SeqID_10076
ggctcgtgctcgagccgaatcggcttgagaatataaaaaaaaataaaaaaaaaataaaaaataactaaatggattactatgagctctaataaaagggaatatgcctagaactcatcacggtcctgccgacacgtgcatcctcccactccgtgtgagacacctcatgttgggcactcggtgctgtttacagtacatgggccagtggcttgaaattgaaagtcggcgatagtcttgatttcaattatggggctggtcacacagtggacgaagtgaaagaaagtgattacatgagctacaccacttgcatttcactaactacacacagtaatggtatcaccacaatcaccctcaagactgccggcactcactacttcatatgtgctgtgtctggccattgtgatggcggcatgaagcttgctgtt

SEQ ID NO: 298 - DNA, 501 bp, Glycine max
  misc_feature (487)..(487): n is a, c, g, or t
  Peptide Sequence Number=SeqID_6551
  Probeset Number=SeqID_10077
atctccctctctcatcgctccgatccgtttccgttcccatttcacagagaaagttgccgacttttcgagctttctccggtaccgcaatgacggcagatgctaaagatgctggaatggatgctgttcagagacgcctcatgtttgaggacgaatgcattcttgttgatgaaactgatcgtgttgtggggcatgacagcaaatataattgtcatctgatggagaatattgaagctaagaatttgcttcacagggcctttagtgtattttattcaactccaactatgagttgcttctccagcaaaggtcgaaagcaaaggtgactttccctctggtgtggacaaacacttgttgcagccaccctctttaccgtgaatctgagcttatcgaggaaaatacactcggagtgaggaatgctgcacagagaaagcttcttgacgagctcggtattgtagctgaagatgtaccagtcgacgagttcacccccttnggacgtatgcttta

SEQ ID NO: 299 - DNA, 1913 bp, Glycine max
  misc_feature (1)..(1): n is a, c, g, or t
  misc_feature (94)..(94): n is a, c, g, or t
  misc_feature (106)..(106): n is a, c, g, or t
  misc_feature (139)..(139): n is a, c, g, or t
  misc_feature (160)..(160): n is a, c, g, or t
  misc_feature (188)..(188): n is a, c, g, or t
  misc_feature (203)..(203): n is a, c, g, or t
  misc_feature (335)..(335): n is a, c, g, or t
  misc_feature (341)..(341): n is a, c, g, or t
  misc_feature (349)..(349): n is a, c, g, or t
  misc_feature (414)..(414): n is a, c, g, or t
  misc_feature (443)..(443): n is a, c, g, or t
  misc_feature (490)..(490): n is a, c, g, or t
  misc_feature (542)..(542): n is a, c, g, or t
  misc_feature (545)..(545): n is a, c, g, or t
  misc_feature (586)..(586): n is a, c, g, or t
  misc_feature (601)..(601): n is a, c, g, or t
  misc_feature (611)..(611): n is a, c, g, or t
  misc_feature (618)..(618): n is a, c, g, or t
  misc_feature (648)..(648): n is a, c, g, or t
  misc_feature (696)..(696): n is a, c, g, or t
  misc_feature (702)..(702): n is a, c, g, or t
  misc_feature (704)..(704): n is a, c, g, or t
  misc_feature (717)..(717): n is a, c, g, or t
  misc_feature (720)..(720): n is a, c, g, or t
  misc_feature (728)..(728): n is a, c, g, or t
  misc_feature (791)..(791): n is a, c, g, or t
  misc_feature (804)..(804): n is a, c, g, or t
  misc_feature (807)..(807): n is a, c, g, or t
  misc_feature (878)..(878): n is a, c, g, or t
  misc_feature (899)..(899): n is a, c, g, or t
  misc_feature (901)..(901): n is a, c, g, or t
  misc_feature (961)..(961): n is a, c, g, or t
  misc_feature (1040)..(1040): n is a, c, g, or t
  misc_feature (1126)..(1126): n is a, c, g, or t
  misc_feature (1130)..(1130): n is a, c, g, or t
  misc_feature (1155)..(1155): n is a, c, g, or t
  misc_feature (1159)..(1160): n is a, c, g, or t
  misc_feature (1162)..(1162): n is a, c, g, or t
  misc_feature (1164)..(1164): n is a, c, g, or t
  misc_feature (1174)..(1174): n is a, c, g, or t
  misc_feature (1215)..(1215): n is a, c, g, or t
  misc_feature (1236)..(1236): n is a, c, g, or t
  misc_feature (1240)..(1240): n is a, c, g, or t
  misc_feature (1246)..(1246): n is a, c, g, or t
  misc_feature (1252)..(1252): n is a, c, g, or t
  misc_feature (1276)..(1276): n is a, c, g, or t
  misc_feature (1287)..(1287): n is a, c, g, or t
  misc_feature (1302)..(1302): n is a, c, g, or t
  misc_feature (1316)..(1316): n is a, c, g, or t
  misc_feature (1343)..(1343): n is a, c, g, or t
  misc_feature (1352)..(1352): n is a, c, g, or t
  misc_feature (1363)..(1363): n is a, c, g, or t
  misc_feature (1368)..(1369): n is a, c, g, or t
  misc_feature (1375)..(1375): n is a, c, g, or t
  misc_feature (1386)..(1386): n is a, c, g, or t
  misc_feature (1396)..(1396): n is a, c, g, or t
  misc_feature (1398)..(1398): n is a, c, g, or t
  misc_feature (1414)..(1414): n is a, c, g, or t
  misc_feature (1417)..(1417): n is a, c, g, or t
  misc_feature (1423)..(1423): n is a, c, g, or t
  misc_feature (1451)..(1451): n is a, c, g, or t
  misc_feature (1471)..(1471): n is a, c, g, or t
  misc_feature (1506)..(1506): n is a, c, g, or t
  misc_feature (1526)..(1526): n is a, c, g, or t
  misc_feature (1555)..(1555): n is a, c, g, or t
  misc_feature (1583)..(1583): n is a, c, g, or t
  misc_feature (1595)..(1595): n is a, c, g, or t
  misc_feature (1597)..(1597): n is a, c, g, or t
  misc_feature (1603)..(1603): n is a, c, g, or t
  misc_feature (1605)..(1606): n is a, c, g, or t
  misc_feature (1653)..(1653): n is a, c, g, or t
  misc_feature (1685)..(1685): n is a, c, g, or t
  misc_feature (1687)..(1687): n is a, c, g, or t
  misc_feature (1690)..(1690): n is a, c, g, or t
  misc_feature (1695)..(1695): n is a, c, g, or t
  misc_feature (1698)..(1698): n is a, c, g, or t
  misc_feature (1717)..(1718): n is a, c, g, or t
  misc_feature (1721)..(1721): n is a, c, g, or t
  misc_feature (1725)..(1725): n is a, c, g, or t
  misc_feature (1773)..(1773): n is a, c, g, or t
  misc_feature (1775)..(1775): n is a, c, g, or t
  misc_feature (1778)..(1778): n is a, c, g, or t
  misc_feature (1782)..(1782): n is a, c, g, or t
  misc_feature (1789)..(1790): n is a, c, g, or t
  misc_feature (1794)..(1796): n is a, c, g, or t
  misc_feature (1818)..(1818): n is a, c, g, or t
  misc_feature (1830)..(1830): n is a, c, g, or t
  misc_feature (1838)..(1838): n is a, c, g, or t
  misc_feature (1853)..(1853): n is a, c, g, or t
  misc_feature (1879)..(1879): n is a, c, g, or t
  misc_feature (1885)..(1885): n is a, c, g, or t
  misc_feature (1890)..(1890): n is a, c, g, or t
  misc_feature (1892)..(1892): n is a, c, g, or t
  misc_feature (1897)..(1898): n is a, c, g, or t
  Peptide Sequence Number=SeqID_6552
  Probeset Number=SeqID_10078
nccgcgcatcatttgtcgtgtgtttcatgatcgtcgcgttgcgcacgttctacatatctcgtcgtgaatctatatcgtcgtagtcgctgatgtnttctgtatgatnatatatcgtatagatcgcgacagttatattatnacgacaaacaccaacacacanccatcactcccatctcaattcgaatcgnttatatgtgtgggtngacgaggcacttctgtctcttgtgaatattatcacgctaccgttcacgcagctccatcgcacgtattcttcgacgcgcagacgcgccactcaccctctacatctctcgtgtgatatcacgcgcgtatatatnataatntcgatatnaatagatgatgttatgtgcgtatgtattatagtagtttgtcgtactcgccacagcggcgcactantacgtcgatgtcgatcgaacatcagaatnatatcatcaatatataatagtaatctgtataacgaagctagaacganacattgaatataaatgagatatctgaatatacgtcatagatattcgagtcgncgnttcgatcgtcaccgcgacgtcgcgttcagtcggctctgtgntgtcaattatatagncgctcgtcancgtcgtncatcgcacgcagttcgataaatcatcgtantcgtcgttgtatgtgtgatcgtcgttatgcagtcgcgtcatatactgnagtagnancacggtatggtgntgnccgatgancatgcgtgtagtgctgagtcgatgatgttgtgtttcgttactgtcgtcgatatcagcgtatgntggcgtggactgngtntcgatgcgaatgtgaggagctgacgcggagtcagtcgtatggtttattgttctgtgtgttatcgaaatcgnacgcgtatatatatccagtgnangtgtagtgtactataatataatatacatgtttacgtatgttcattaaagcacgaacgtgngtagtaatcatacactttgatatagtatatagacgagacgtacacggatcaagagagtttgagtatatagtagagtaantcgatagtatatagtgcacgctgcataatatatcacgtacttgcatcatacgtgtagtcatattgagtcgtatcgtatacatcatncatncatcgtaatatacactatcgaacgntcanncntncacgcgacgnatttatcgtttatgcgttcacagcatctatcagccacgagnacgctgagatcgtatcagtangtgncatcgngtgtancgtgacagtcatatgtcagtgcgncgtatcgacgntcgatcgagacgatncgtcctgcgatcantacattcgtgtatgatacgatcatagnatcgaatantgacgcagtgntcatnntcgtgntttgcgattcntctactagcncnttcagtcgtcatcatnatntgacancgtcgtttatgacttatactgcatcagntgagcatacatacacatganatcgagctatcgcattatacatacagtatactatnaatgattgcatttatcgagnatagtaatttacatacaaacgatcaaatncgaaccctgatcgacatgcgtcacggtnatcctagtatantnatatcntnntaatgtctatacgatatgctcacacgactaccagactgcgctgatgnaacgatacatactagaattgtcaataagaacncnggnacgangcnggcgagcgacgacgagagnnagncganagtgtctgatggaagtatatataaactgctcactatatatcatacagncncgnttangaacacnncaannntacacatcaatacacaacacangtagagaaaccngcagagcngatagtatgctatgnatctatctacatacacaactagcgtnctcgangctcnantcgannaggctggcaatccca

SEQ ID NO: 300 - DNA, 564 bp, Glycine max
  misc_feature (107)..(107): n is a, c, g, or t
  misc_feature (366)..(366): n is a, c, g, or t
  Probeset Number=SeqID_10079
tcagctacgtaggcccccccccccgaaggagccagaaccttcgttgaacaaagacaaactgtcgaaccccacaccttcttgaaggaagttgatgttgttgaaaccanacccgttcaacaaactatcgaagtcatggaagccagaaaggtcgtcaaggatgtccaatacactcaagctgtccctgtcaagaagcaaatcgaaaccatcgaacctcaagtcgtcagaaaggatgttgaggtcatggaaccaagacttgttaccaagactattcaagtaattgagaacgtccctgtcaaaaaacaagttgaagtcattgaatctattcccagaatccaagaagtcgagaccttcgagcctcaaaccttnaccaaacaagtcgaagtcactgaacaagtccctgttaccaagactgtcactgtcactgaacctgtccacctcaagaaggctgtcgaattcgtcgaacccatcatcaccacccaaaccatcaccaaggaaattagacctgaagttattgtgaatcaagaattcactacaagtgtcggacctgctacttatgttggtgag

SEQ ID NO: 301 - DNA, 1400 bp, Glycine max
  misc_feature (109)..(109): n is a, c, g, or t
  misc_feature (115)..(115): n is a, c, g, or t
  misc_feature (117)..(117): n is a, c, g, or t
  misc_feature (147)..(147): n is a, c, g, or t
  misc_feature (217)..(217): n is a, c, g, or t
  misc_feature (232)..(233): n is a, c, g, or t
  misc_feature (456)..(456): n is a, c, g, or t
  misc_feature (977)..(977): n is a, c, g, or t
  misc_feature (1135)..(1135): n is a, c, g, or t
  misc_feature (1249)..(1249): n is a, c, g, or t
  misc_feature (1251)..(1251): n is a, c, g, or t
  misc_feature (1294)..(1294): n is a, c, g, or t
  Peptide Sequence Number=SeqID_6623
  Probeset Number=SeqID_10080
acagcgtgtgtgagtatgtgcgcatataaggctgtccgcagtaacgtagcgatgtagcataggctgactgagtcgcggcgactgaccgtgagtgtacattataatcctncacacncnagttcatggttgtagacggtctcgtgttcngactcttctgtagcctctaccttctatccgccagtggagagttatcacattgctcgatactgactgccgngactgcgtcacgagnnacagaggtggtgagaagggatgggtgtgaacatagacatgcaaagtaagtttagtgggaactccgttatgatatgatatagggatagcgatgacttatgagagagaacggtggaggttgagagttatatggtaagtgatcggagctgtatagatagcacaaccttcgcctggtgtctatagtcgctaattaagaactggaacgtatggtaatattcgagcgtntccctgagtgctctctgtaagacagaggactatatattagcgaggatcagaggagggattacgggtagatgcggcgagtacaataggaagatcaagcgcttcctacatggaccgcctcccatgcgagaggcgacttacttcctctcctcatcttgtgcacgacgagcatgacccacgttgcatcgactacagagcagtggatgtgtgatcatcatactagaataacgctgtccatgtcagtcgggcgagacggcgacgttgttctgcgttatattgacgtcgctacaacgtacaggtgagaacagcacgatcctctgcgctgaccctgagtggccaatatatcacataagacaagcaccggcgcagagctcaaagcagagtgtcacacattctggaacgctacgcagaatcgtcgctgagtgagagggcaggttacggaagcctcaacataatggaggagagactaggtagtgcatggactaggactacgttagtagtgaagcgagccatatacatgatgntcttgtacattagtcatattggacgtctatctatatttgtgctgtgtattccacgcgcgggccggtgcagcgagacgcggcagacctcgccatcatcgcgcatatgtgatactctgccacgcgcagcgagcgagagctacagccagacaagtggaagngagtactatccgacccgagacaggtaagggacactctataacaagaacaaggagagattgcaattggccggactactcctctgccgtcgtccaccggcgtgggtatgctcacgnanagccggcccacgcacgctccgccccggcggcagcatggaatgngagcgcatcctcgccagactatatttggagatcgtgtgtggttcaactacgagaagaaagatcagtagacacggggcgagagtcacacgcgggtagagaataagaa

SEQ ID NO: 302 - DNA, 1729 bp, Glycine max
  misc_feature (16)..(16): n is a, c, g, or t
  misc_feature (22)..(22): n is a, c, g, or t
  misc_feature (31)..(33): n is a, c, g, or t
  misc_feature (36)..(37): n is a, c, g, or t
  misc_feature (81)..(81): n is a, c, g, or t
  misc_feature (92)..(92): n is a, c, g, or t
  misc_feature (120)..(120): n is a, c, g, or t
  misc_feature (142)..(142): n is a, c, g, or t
  misc_feature (146)..(147): n is a, c, g, or t
  misc_feature (155)..(155): n is a, c, g, or t
  misc_feature (164)..(164): n is a, c, g, or t
  misc_feature (180)..(180): n is a, c, g, or t
  misc_feature (191)..(191): n is a, c, g, or t
  misc_feature (211)..(211): n is a, c, g, or t
  misc_feature (233)..(233): n is a, c, g, or t
  misc_feature (252)..(252): n is a, c, g, or t
  misc_feature (262)..(262): n is a, c, g, or t
  misc_feature (282)..(282): n is a, c, g, or t
  misc_feature (374)..(374): n is a, c, g, or t
  misc_feature (395)..(395): n is a, c, g, or t
  misc_feature (403)..(403): n is a, c, g, or t
  misc_feature (419)..(419): n is a, c, g, or t
  misc_feature (490)..(490): n is a, c, g, or t
  misc_feature (520)..(520): n is a, c, g, or t
  misc_feature (554)..(554): n is a, c, g, or t
  misc_feature (557)..(557): n is a, c, g, or t
  misc_feature (560)..(560): n is a, c, g, or t
  misc_feature (737)..(737): n is a, c, g, or t
  misc_feature (817)..(817): n is a, c, g, or t
  misc_feature (829)..(829): n is a, c, g, or t
  misc_feature (851)..(851): n is a, c, g, or t
  misc_feature (1075)..(1075): n is a, c, g, or t
  misc_feature (1137)..(1137): n is a, c, g, or t
  misc_feature (1182)..(1182): n is a, c, g, or t
  misc_feature (1209)..(1209): n is a, c, g, or t
  misc_feature (1265)..(1265): n is a, c, g, or t
  misc_feature (1334)..(1334): n is a, c, g, or t
  misc_feature (1508)..(1508): n is a, c, g, or t
  misc_feature (1574)..(1574): n is a, c, g, or t
  misc_feature (1580)..(1580): n is a, c, g, or t
  misc_feature (1668)..(1668): n is a, c, g, or t
  misc_feature (1680)..(1680): n is a, c, g, or t
  Probeset Number=SeqID_10081
gttttttggttgtgtntttaancatttgcgnnngtnnctcacccctgcctcgcaccactagaacgatactataactatatntaacataaganagtatataaaatatgtacacttatcacntattaaatgtaggaggaggggncgcnncccacatntctcctccncacctacctctaccgntccatgtgcanatatagatgtgtggctcgcngcgatagatacgaatatagacnacgaaatcatctatactcnactcactgantgatggcacacagcgtgccncccttctctacacatatatcatgggtgtgttgtagtatatgtacaatgatgtattagtacattatgatcgtctctctctctacttgctgacngcgcgttagctcgcgtgttcnctgcgaantatagtatatacttgnggaccactccgggtaagacgacagacgacaaccctcacgtactccctacctctcacccatcctcagcatgncactctagtagaacgctccgaatctggctngaatcgacttcgcgagtgcttgtgtacactgatnagnccntcattctttctccgtcacaccccgttccgtatactactctacctacataccacccccacgcagcttctgttgctcgtgccgtctgcgctacgtggtgtggtattgtggcccgcacagactgcgtgcatatgacttctctattgatagcgtaacgtgcagatatatctacgcggctanacatggatatatacacatcatacataacatggagtagataagaagagagatacgacactaccgcaccccgactcatgcgncatcacaagcanactcatattataactatatatngtgctaccagcgctgcctgccgtcgaccacacgcgaccgcactgtgcatagtgattacatctatctcgtgtgatggtcacactgtcgagacacgtacacactgtcgtcagacgcacgatatgatttagttctgcacgtctcgcattcgttctatacgtctaattattagtgtatcacgtgcactaggcacacgcacagcgatatggtgaaagcgtgtagcggtntatacacacgctctgtcgcaccgtgctgaatcacctcgtgatacgattgatgtatcgcgctnccacgtcctagcagacctgcgatgagtggagcgcgaccgagagtncagcatcagactgcagacacgtcgcgncctatctgatgccacgctgcaacgtgcagcgcgatctgttagcgctgcacgacgtncttgaacagtgtgtgagagcacgctctactctccccgcctctgtactctctctacacacactacactanaccactcttgacacgtttgatgcatcatgtatacatattacacatccacacaacctctacatacgagtcgctatataggagctatgtgtcgcctacacgtcctctatgtagatcagcaacatcgatatatattcacgacgtatgccgagctagactcgatctcacgtgctgtanatcagagcttatgttgcccgcatactgcacatcgtgtgtatctcagatgctaagatgagatggtgntgtcanagtacatgtgtggtcataagagacatacgatacgtacgcagagcgacaccgtcacgtcacgtagcatatagatctacgtcgtggggcncgagcagtatgnctctgcatcctaagacagcgtgaagtcgctatgcagtcgcgcacgcact

SEQ ID NO: 303 - DNA, 1394 bp, Glycine max
  misc_feature (22)..(22): n is a, c, g, or t
  misc_feature (30)..(30): n is a, c, g, or t
  misc_feature (55)..(55): n is a, c, g, or t
  misc_feature (94)..(94): n is a, c, g, or t
  misc_feature (146)..(146): n is a, c, g, or t
  misc_feature (189)..(189): n is a, c, g, or t
  misc_feature (237)..(237): n is a, c, g, or t
  misc_feature (239)..(239): n is a, c, g, or t
  misc_feature (467)..(467): n is a, c, g, or t
  misc_feature (481)..(481): n is a, c, g, or t
  misc_feature (586)..(586): n is a, c, g, or t
  misc_feature (646)..(646): n is a, c, g, or t
  misc_feature (698)..(698): n is a, c, g, or t
  misc_feature (768)..(768): n is a, c, g, or t
  misc_feature (780)..(780): n is a, c, g, or t
  misc_feature (826)..(826): n is a, c, g, or t
  misc_feature (1005)..(1005): n is a, c, g, or t
  misc_feature (1048)..(1048): n is a, c, g, or t
  misc_feature (1066)..(1066): n is a, c, g, or t
  misc_feature (1076)..(1076): n is a, c, g, or t
  misc_feature (1214)..(1214): n is a, c, g, or t
  misc_feature (1242)..(1242): n is a, c, g, or t
  misc_feature (1306)..(1306): n is a, c, g, or t
  Peptide Sequence Number=SeqID_6632
  Probeset Number=SeqID_10082
gtctgagcgagtctcttgctancacacccnccaatacacctcttcgtcatcttcnctattatgtactaataaaacatatataaatatataaatnctatctgatatgcatacaccatcacgtacacactgcatctgtatactgcaanccacaccacacaacgcactatcacacagagtaatctatctcgnggtagacgacttgactgatgatagagatagtacgacgaatgtgaaacncncgtgctgacacaccatatagcagcgaatactaccatcatacactctatttcacacactctcaccatctaacacctataaacaaacattattaagtagataatactaatacaaagtatgaacattaatatatacaacgctataacttacacgactctattcatgcactctcacaccactcgcctactcactctcttcctgcattgtgtcgagacgtaattactctaganggttcgtctgattncatctgcatcatctcatcgcatactgcaacagtcgtcgatccacctactgtctctcgtgaatacatctcgctatactggcacctctgcatctctgtctcttctcncacacctctactcatgctgtggtcgctctgttgtatcatgacgcgcttttatctatgtcntatactattgagatatataaagtagtattattacaaaataagatataaaaanaaatagatataagaatacagacacgagacatcgatggtaatgtcacacaccatccatatatcataattcnacgaagattctntatttgtgagatgctgtgtgtttatctctcactcccccccactctncgtcccacctagaatcacgctcagcgcagtcatgcatgctagtcgactgatatatacgcttctctacgctacacatcagacttctcatctatcttaccccttggttatttatcgcctctcctgctcattctctcttatactattatatatataatgagtaagatacaatctgatatcgnacactgcatcgtattgcatctgagaatgagcgtatggttctanacttatatctcttcgttnctcgactcancatcttcttctagctcttcactgacacatcattagatctgtgcaggtgactcacatcgtctatataatcgctacatgtatattatctagactactctcgcacctccacactcgctcacgctactctctctcctgcatncactactatatattcttcatcatcaccnacataacactcacctactcagacggatgcttgtcgccgtctagctcagcgtacgtctcaatatncgatcatcatcgtactatacttgacgcgtatcatctcatagactcctgagtttatacactcaactacacagcagtatatcagctactg

SEQ ID NO: 304 - DNA, 1473 bp, Glycine max
  misc_feature (97)..(97): n is a, c, g, or t
  misc_feature (103)..(103): n is a, c, g, or t
  misc_feature (220)..(220): n is a, c, g, or t
  misc_feature (371)..(371): n is a, c, g, or t
  misc_feature (436)..(436): n is a, c, g, or t
  misc_feature (524)..(524): n is a, c, g, or t
  misc_feature (542)..(542): n is a, c, g, or t
  misc_feature (576)..(576): n is a, c, g, or t
  misc_feature (893)..(893): n is a, c, g, or t
  misc_feature (896)..(896): n is a, c, g, or t
  misc_feature (920)..(920): n is a, c, g, or t
  misc_feature (930)..(930): n is a, c, g, or t
  misc_feature (1006)..(1006): n is a, c, g, or t
  misc_feature (1040)..(1040): n is a, c, g, or t
  misc_feature (1333)..(1333): n is a, c, g, or t
  misc_feature (1409)..(1409): n is a, c, g, or t
  misc_feature (1473)..(1473): n is a, c, g, or t
  Probeset Number=SeqID_10083
agaagagagagagagaaacaacatatcacatacataaaggcaccacatgcactcacgagaagaggtcatgatattttggtggttgggcgcccccttntatttntttgtatcaatattgagtgtcgcgggcaagggttcgtcctaaacgtaggacggggaatggctataagagagagagtcgtttttttttattttcattcttcttcagcggcggcgctgntacgtattctccagtgtagggagtagggcgcccacgtctcttatagtgtagtctcccaccactcgggtgttgctttacgatcaaagttataaatcaccctttctctctgtccctcactagactacacacgagacgagtatagatagctcgnaagccgcggctcgagagtgcgtgtagtcagagagcgagtatgagtcctgtgcgtctgaggtgtanatctgcctggtaggtggtctgctgtggaggtagaataatgtggtgtgcgactgatttgagtacaccaagcacatgaagggagtagtgntggctcaagcttataacnactccgtatgctacacccggcagcgtgtattcantcagagagcaagagatgagaacacacgcgtgtgaacgcgattgatatagattgcgatggctcctgctgataactaacgatactctatccacagaataatcatactagcaaaaacacattgtattaatagaagaatgatgtggatgaatgcatcaatttgcgacgcgattaagcgcgcgcatagtatatcgcacgcgtcctcaggaaccatcgagtataacgaacgtcactctatcacacaacactctcagctgtgccgtcgttgcacacgccgtagcgtgtgttgagatgaatccttgctcgtggattgagatatanacnacacctccaccgctcacatgctgncgcgctgcanccgctctctctaactcctttccgcgccgcttctgcggactacacacgcacacatagattgcgccgacgttctgtgngcacgtgctgttgatgttgtactactctcttctncatcgcgcgagggtgtcatccagaggtatgaggtctgcggctgatgagtacgactacacaatgtatctctgcctcctgatactagagcgttacgacgatcgctgagacaagacgcacgtgactaatcgcaacataagtggactcatgtgtacctatccacgcgagctagcacatcgataccgtagaccaccgcataagatatatagtacttatgaatgatgaccgtgtcacggtactactataagctaccatacacgtataatcacaaatactagcgagtgacacacaaagtnctaccactatatagatactcaataaatctcatacactactatgaatactgcgtctcgacgcgatctctcacacacngtctactacacgacagagtcttcatgcgtatgtagcttcatacaataatatctcgtgatataan

SEQ ID NO: 305 - DNA, 1445 bp, Glycine max
  misc_feature (13)..(13): n is a, c, g, or t
  misc_feature (21)..(22): n is a, c, g, or t
  misc_feature (45)..(45): n is a, c, g, or t
  misc_feature (53)..(53): n is a, c, g, or t
  misc_feature (87)..(87): n is a, c, g, or t
  misc_feature (93)..(93): n is a, c, g, or t
  misc_feature (797)..(797): n is a, c, g, or t
  misc_feature (838)..(838): n is a, c, g, or t
  misc_feature (863)..(863): n is a, c, g, or t
  misc_feature (1325)..(1325): n is a, c, g, or t
  misc_feature (1404)..(1404): n is a, c, g, or t
  Peptide Sequence Number=SeqID_6633
  Probeset Number=SeqID_10084
ttccttctttttncctctttnnattttgtatctattttataaggngacaaaancacacgcagaacgcgcggcgggcgtggcagcgcncgcgtngtatgccttatgtcgtgcgcgacgtggggtaaagcgtatatatattagagtaggtcaagtaggatccgaagggaggggaggactgaccctagattacagatctgagttctgctcgttcgtgagtgtctgggatgtagtaggcgtagtccttcattattcttctataccatcttttcttctccctgccttcttattccctacttcttgctcttcatatgttcagagcatagcaaggtacagctatctactcctacactgttctcgcgttgctaccgcgtctgtcgccacgagtcaggacactacacacattaacctaccaattatcataacagatatagacagaatatagttacgttaggactgtcgtccaagagactatgctgccaggactcacacacacttcgctcaccactgatgaggcgcgcgtctggtctctggcagctctcagtccttcagcgattagatgttcagcttatcgagaggattaaggtgcagttgtattactcgatgtagaggcatgagcgtctcgtagctctaggctcgagagcacgacgtcttgtcacgtgcttctatcagtgttcccgagtatctgtaatcgctcagaacgaagaggtgtgctgagtagccgagagcaacgtatatcctcagttggtacgtccagtccacgtagtagccttccagctgggacataccactccgatganagtccagtgagcgcggactgtaggtccactagatgagctcntgtggtgttgagtcacagaatatancacagctctgcggtcgcgcggaggagtggatatgagactctccgtctaacgtgcgtgttgcgctctcctactattctgctgtatgatgtataaggactatatatcacccgatactactcatatactcctatatcatactaggttaatagtgatagacgatatgtagcccgcaaatcgtatccgatcttcagggcgagagtctagctgctgggacgaaatgcggtagcgatcgacaacaccatctcgcacgagtcggagagagacgagttgtctgcatgtcttatctttgagagtgttagcgcacatgtctagagatattatgtctaagtacggcgtgagagggacgtcgactcggcggctcactgctatagcctccctcgccgtgtttgcacttcttctagatctcttctctctgctcactctcgcatgcctatcacacggagtcgtccttgctgtgacgcngcgcgatcgtccacacgctctacctcgcctacgcatggcatactcgtgcttatatcactcgtcacctctacatctgtgngatgcacacactaagatcacatctatgtactccataaccgg

SEQ ID NO: 306 - DNA, 1345 bp, Glycine max
  misc_feature (481)..(481): n is a, c, g, or t
  misc_feature (642)..(642): n is a, c, g, or t
  misc_feature (881)..(881): n is a, c, g, or t
  misc_feature (907)..(908): n is a, c, g, or t
  misc_feature (1063)..(1065): n is a, c, g, or t
  misc_feature (1287)..(1287): n is a, c, g, or t
  misc_feature (1314)..(1314): n is a, c, g, or t
  misc_feature (1329)..(1330): n is a, c, g, or t
  misc_feature (1332)..(1332): n is a, c, g, or t
  Probeset Number=SeqID_10085
ctgtctccgcgtctccggctccgcctgctgtgcggaccgcactgcttggcacattgctctgactgctcccttcgtcctcgtcctgttgcacgtgctcagttactctgttcaagacagcagcaagtgaagaggttctaataatatgtacaagttcttataagatatctacctcactcgtcatcagcaagtatctgtgtgtctgataaatagtcgacagacaaggcaacatgacctactccacgagaggtgtagtgtgacctagttaggtatagatggggtggatgaagaaacataccaacacacaatcataagaccagagacacggcagccccgcacgaacacgcccccaccgctgaccacgagggtggatagaggtggggggcggggtgggaacacaacaaccgtcacagcactctacgcagatcggcgagcgtcacgagcgtggagcgtgtgcggtcgttgtcgttgcgtggggtggtgncagttgaggcaggaagaaggttgtctgcgtacaggttggtacgtgattcatgtgtgtggtctctcggggcgagggaggccggggaggggggtgccgagactcccccctcgccacctcacagcaagaccagcaagcagggcatgggtaggtgtgggtttgtncgcagactccacatccatacatctaatatccaccagggggaggtacgtgggcgtcgctgtgccgtcacgtagcacattgcagtgcactcacgaaggctgactcatggtggcagcttgtttttcttttctactatgtttgagcgacacaccaaacatcaccatagcactacagaagacaatcagtatttgtcctattacattctcaccctcgggccgcattcgtggtgatggactttttngtgattacaaaaaatagcccgtaatnnactagaccagcgcaagacacccacgcaccgcgacgactatctattatatatccacctcatagtgataaaataagggatgattcgagttagttatttttattttttgtctatacaagtaatttataaaggcgcctacttggctcccgttcttcgcnnnaaagatagagcgcttgtgaatatgaaagacgcggcgctcccccacgtgtgggcgcttcgcgcagaggtatagttatagccataggtaatcgaacacacgcgcacaaagggcatctgttcagtaggtggggggggggggtgggaccctcttttttgttatattctctcccctgttctcttccccctcgggtgcgggaaggccgccgggcgtgggtgcgccttncttcggtgggggggcgggggggggganggggggggaggcggnngnggccacacaaaaa

SEQ ID NO: 307 - DNA, 1897 bp, Glycine max
  misc_feature (1)..(1): n is a, c, g, or t
  misc_feature (135)..(135): n is a, c, g, or t
  misc_feature (140)..(140): n is a, c, g, or t
  misc_feature (146)..(146): n is a, c, g, or t
  misc_feature (158)..(158): n is a, c, g, or t
  misc_feature (180)..(180): n is a, c, g, or t
  misc_feature (193)..(193): n is a, c, g, or t
  misc_feature (201)..(201): n is a, c, g, or t
  misc_feature (208)..(208): n is a, c, g, or t
  misc_feature (246)..(246): n is a, c, g, or t
  misc_feature (428)..(428): n is a, c, g, or t
  misc_feature (442)..(442): n is a, c, g, or t
  misc_feature (469)..(469): n is a, c, g, or t
  misc_feature (476)..(476): n is a, c, g, or t
  misc_feature (513)..(513): n is a, c, g, or t
  misc_feature (542)..(542): n is a, c, g, or t
  misc_feature (692)..(692): n is a, c, g, or t
  misc_feature (711)..(711): n is a, c, g, or t
  misc_feature (732)..(732): n is a, c, g, or t
  misc_feature (737)..(737): n is a, c, g, or t
  misc_feature (756)..(756): n is a, c, g, or t
  misc_feature (865)..(865): n is a, c, g, or t
  misc_feature (1115)..(1115): n is a, c, g, or t
  misc_feature (1129)..(1129): n is a, c, g, or t
  Peptide Sequence Number=SeqID_6634
  Probeset Number=SeqID_10086
ngcatgtatgcttactggagtccatgtcgtctgatcgtgcagtaaatatagctagatatatgatatgatgaatatagagttcgacgatatcagaccacagctattaacactgcgcacagagcagatgtattctgnaaagnatgtgntgaccgagtagnagacgaggatagtctagttatngatatatacgagngtgcgtgnatgatgntcatgtcttctatattgacgtgagacgttccccagtantctgcatgcgtaccgtaatcagagtcgcacacgcgaggtcgtatagagagatttcagcatggcaatgtatagcgtacgcgtgctatgtagtggatcgtgctacactcgtcgactactttcaatcacagagaagcacgcgcggcgggagtcacagtaaatcaactaatagttagcgtatgagngtgtggtgagtcanataccctgtctctctcagaccgtacangttgggnactcctagtcgcgctgaccggacacagtgtagtagcngcagatatgtcatagaagatcttgtgatngaggagtatttattataatcgcagacacagcgtacgcgcagcaaacgtaacagagtagcgcgtcatgcagactataatcatcagatatcagcgaacgcgatgacagagtcagaccgtgatatactgtgttggcgcatggatgcgagatangctacgacggagataattntatatgcaacacgctctaatngtagnaacctgtctctcaagtctngcagctgtgctgaaccgtcgtaaacatatacacataacttgtatcaatagcacgcagtttatcgacgcagcgtctgtctataagttagatgtagccagagatgcatacnggtctgacgcaggtatccgacgctctatcaatctagcgagcgagagctcgactcaatgcatgagagcgtgtataagtagcgcgtacgcctggtatttcattgcggatatattacctgtgcttatatataacgcaacattcacatgcgcatagagcggggctgtaagggcagtctggacgagaggtgtaatataatctgcaccattatggacagatcgtgacaatagaatggctcgtgccaatcgatacanctggtcagcggtcnacgtccataatagattatcacatatattgtctcatgtcattagagtgtcagctcactgttgtacgaatgtggcgctgtcggaaatccactcgcgcaagaacaagcgaacaataccgacgccggcgtgatctagctggagtggacgtacacattcgatagagtgtgtagcgattgattagtaataataccaattcctcaccaggcgatcgcatagatgcgcgaaggatgtgaggagtgctatttttatcgtgcttttatccatctaaatatataacaaccacattcgccctagaactataaaaaccactcaaccatccatctgtgttccttttattatatatattgtcgctatgccacgcttctttctgtaaggatagacacaacaagtgccgcggagagtaaaatggtgattaattaaatagtgtcggctctgtcttttaggcgtctgctaatttatcgcacctcctaatttagtttcacagtaactcgcgggcgagttatattctatatttgtgtcggatctcgtggtatggttaacttagagatgaagtcggtggctgacagcgtaagaatattaccctcgacaccacgcgcgcgtttgattatcccacttttgcttagttactgctaaagtggacagttactacaactaacggtgggagattaacacaggttttcgcggcgtagctcaagaagcccgctgccgattgttctatcttccttggttttgagtgcgcttgtgatggccgttgttgattataataatgt

SEQ ID NO: 308 - DNA, 306 bp, Glycine max
  Probeset Number=SeqID_10087
accacataaaactaaaagagcatctcctcttagctcttgcttccttctcgagcgtaaaccctagatcccatctccaaaatgttcagatccgtgctcgtccgttcctcttcatcggcgaagcaatcgcttctccaccgcagcttctcctcctccgtccccgagcgcaaagtcgccatcctcggggccgccggtggaatcgggcagcctctcgctctcctcatgaagctcaaccccctcgtctcaagcctctccctcttcgatatcgcaaacacccctggagtcgccgctgatgtcggtcacatcaac

SEQ ID NO: 309 - DNA, 600 bp, Glycine max
  misc_feature (157)..(158): n is a, c, g, or t
  Peptide Sequence Number=SeqID_6635
  Probeset Number=SeqID_10088
tatcctagagacattttgctgttagagatgcaactaaggaatttgttaaaaggacagaagaagaaaaatatatatcacaatttgacatttctaaattcatggattttcgttacagagcacaccaaggaattatagctattaaaaaatccaccgttannaaaatgtaaaaaagattgcatgcaagtgtataataaactatgtgatttattttttgtatgtaagaacataatgaatctccatatttctctaactcatattttatcaattgattttctattaattataacttcctaaattcatctataaattgaatttccttaaagagtcaaatctactacatatgactatgttccttgttaaaatttggtgggaatccatcaaattaaaaaaaaagtgggtgggtgaactaaacctgggaaaaggggaaaaggtaaattgggggggtaaaaaaaaaaaagaaaagggaaaaagggtgccaattttatctttctggcgaaaaaaaataaaaattaaatttttgccggggaaaaaaaaaaagggaaaacggggggaaaaaattcccggggttgggggctccaatatttagcccaaacccctctt

SEQ ID NO: 310 - DNA, 516 bp, Glycine max
  Probeset Number=SeqID_10089
ggtttcataaaaaaaatcattttttgacggatgaagccttgcacggtggtgtgacccacagaacacctctccgattcagaattccgataagcacccagsacacctaatcccaaatcgtcatcttcaaccgccgcacgagagcggtagaacaagcccagatccgaaaaaaacaacaaagatcatgaaataacaaactcagatctgaaatcgcaacagtatcctgaaaattacgtgtcttccgcactcactccgatctgtatttttatggcgcactggaccgagtcggaggtgagggactaggggtcggaatcgagaaggaagggaggagccgtcgggcatcgttccgtcggcaaggcgccgtcgtcgacggcggtgcaatctttttttactctgtcgacggagtattttggaataagttggactacctctgatttgctgggacaccagcatcagaggatcaaaatgtccttcactctttgatgaatcgacgatatgtatgactcattcttggattgt

SEQ ID NO: 311 - DNA, 268 bp, Glycine max
  Peptide Sequence Number=SeqID_6636
  Probeset Number=SeqID_10090
ctgcagagggatccgaccggaccccctgaggttaacttttgctcaaaaatgtgtgcccgaaccaaacggctggatagggatattgtgaaggcaataaaggtcgacatggaacctatccccatccatagagcctgacgacgcgcccatcattgtacgaacagcaccggtgaaaacgatacctttgccaaaccaaccgatgagaagccttactcaccaaagattcctaaaggttgggttggcaaagcccttggacacccaatacctgaaa

SEQ ID NO: 312 - DNA, 456 bp, Glycine max
  misc_feature (442)..(442): n is a, c, g, or t
  Peptide Sequence Number=SeqID_6637
  Probeset Number=SeqID_10091
tttcacttctcgtgcgttcttcatttttctgccgccgcctgccgccgcctctctgcctggcagccgtcgcctgagtcgcacaggggccgcctctccttctcccgccctgcggtcgctccttcccccccccatcggtcgccgtttcctgagtcgcactggggcggccgctccgtctcccgccctgcgggcgccgccgcaagatcttggacgggccccaagatcttcaacggcgcagccggcccgcgccgcccggcggccctctctctccatcgaaggatcttcggacggcgcccgagatcggttcctccgcgcgtcgtggttgagatccctcgcataggatatcggcatggctggcgaaggcatctcgatagatgaatttatggagtacgactcgatggtcagcagacatttaaaagtgagaacgaagcgtacaagttctacntagggtatgcgaag

SEQ ID NO: 313 - DNA, 594 bp, Glycine max
  Peptide Sequence Number=SeqID_6710
  Probeset Number=SeqID_10092
ccctccccatcaccgtcgtcacgtcgaccacagggccacgctacgcctacacgtaccgcacgtagcgtagctactagagagctaggtagctagcacatttcattgattgtcctgctgatccgttcggcatggagatcgcgaggaggaggaggtcgctgtgctcgagccgtcgccggcggtcggcggtggtggggcggaaggtgcgggagctgcggcggctggtccccggggcggcggttatgcccaccgaccggctgctcgtccgcacggccgactacatcgcgcagctccgggccagggtggagctcctcagggcgctctcggagctctgcgaaggccatggccatggcgactcccctagctagttcgcaacctctgctcttgtggtatggcgaatatatacgtgcatatatcgcacgtatagacggatggtatatattgaacgattatggttgatcaagtagcgtataattgagtacctaggtgcgactatacataccaatcgtatgtgttctagaagtatataggggttttgtttttctgtccagtatttcttgtaattttcgcggccgattcacattctttttgtattca

SEQ ID NO: 314 - DNA, 1977 bp, Glycine max
  misc_feature (61)..(61): n is a, c, g, or t
  misc_feature (112)..(112): n is a, c, g, or t
  misc_feature (124)..(124): n is a, c, g, or t
  misc_feature (136)..(136): n is a, c, g, or t
  misc_feature (339)..(339): n is a, c, g, or t
  misc_feature (400)..(400): n is a, c, g, or t
  misc_feature (855)..(855): n is a, c, g, or t
  misc_feature (898)..(898): n is a, c, g, or t
  misc_feature (1010)..(1010): n is a, c, g, or t
  misc_feature (1016)..(1016): n is a, c, g, or t
  misc_feature (1120)..(1120): n is a, c, g, or t
  misc_feature (1155)..(1155): n is a, c, g, or t
  misc_feature (1157)..(1157): n is a, c, g, or t
  misc_feature (1229)..(1229): n is a, c, g, or t
  misc_feature (1245)..(1245): n is a, c, g, or t
  misc_feature (1323)..(1323): n is a, c, g, or t
  misc_feature (1356)..(1356): n is a, c, g, or t
  misc_feature (1422)..(1422): n is a, c, g, or t
  misc_feature (1457)..(1457): n is a, c, g, or t
  misc_feature (1503)..(1503): n is a, c, g, or t
  misc_feature (1539)..(1539): n is a, c, g, or t
  misc_feature (1599)..(1599): n is a, c, g, or t
  misc_feature (1618)..(1618): n is a, c, g, or t
  misc_feature (1636)..(1636): n is a, c, g, or t
  misc_feature (1669)..(1669): n is a, c, g, or t
  misc_feature (1688)..(1688): n is a, c, g, or t
  misc_feature (1691)..(1691): n is a, c, g, or t
  misc_feature (1693)..(1693): n is a, c, g, or t
  misc_feature (1781)..(1781): n is a, c, g, or t
  misc_feature (1801)..(1801): n is a, c, g, or t
  misc_feature (1805)..(1805): n is a, c, g, or t
  misc_feature (1881)..(1881): n is a, c, g, or t
  misc_feature (1928)..(1929): n is a, c, g, or t
  misc_feature (1962)..(1962): n is a, c, g, or t
  misc_feature (1974)..(1974): n is a, c, g, or t
  misc_feature (1977)..(1977): n is a, c, g, or t
  Peptide Sequence Number=SeqID_6711
  Probeset Number=SeqID_10093
atatgtatttatgtctttgttattgctatgagctagcgaaggatctgagatgtgtttctgngtggtgtcgcgccaactacacacccacacgccagagatcaagataagtcanacacaatacacntccctctccccncgtcagatgtacgttatctgtgatacagcccatcccgcaacccccatgcacttccactctgtcccggtgtattgtcgtcgttctggtcgttcgagcgccagcacgctctgctggagacgaagacctgccgtctcgcactcgtctgctgcccgcgcatggctagatggcattcgtaatagcagaacccaaatacatctatatgntactatatttatatgatatatgtagtaatggtcgtattcagtgtgtcatgagtggtgatanctgttccttcttgtgactgatttactctccaacactatctcgtctctagctactctatcgtagcctcaccacgagaatagtatagacaactgagagcggtcgaagctcatggctagcaaggtgccagcggtgtcgatgagatgtcatcatgtatgtaagactcatgttcgacgctcagcaacgatgtgagtagtgctcgtgtatagtatcattactatgatattcttacgacgacgatattaaatgagatgacgatctcgcgtcgcgtggatctagcgtgcgtagtaccgacaatcgacgttctctgtacaccatctactatgtctctttccactcataataaaacacatctaataaatacagtatcaatttatattgttatatactatctgcactgtgacatcatatacactctttctctatagactagatacatatagaggcgcataatcatnaccgactcatattccacatcatatcgaggagaatatatgttanacacgtgatgctctctcgctgctgcggcatcgtctgcatcatatgtattgtatactacatcacgaacgtgcgtggcgactgtacagataatctatgaatcgatcgccgtagncgactnttgtgcagagccagcgtccgcgagatgatactctcaactctgacttagggattgatgcgtgagcggcaacacactctgcggcattctcactagcagctctgcangagagtgtatgtcactcgtgccttgcgcgcaggananactacagtatgctgatgactgctgtcacgacgaccgcacgatcatgatacacatcgaaccatacacgtgcgntgtacgacaagactangtcggcgactggctgcgagtcagcagccacaccttaagtatgcatctcatgcttcttgcagaggacgtagcgtctcanctctgcagtgttatcgtacatatgtacgtcagnatgtacctgtcatgtacatctgacgtactgatataataggaggacgcgtgtcgcgacatcacagantctatagactactccgtgacgtatagtgactgagntacggtgcagtacatgacactctgacgaacgtgtaacatgtgatgnaatagctgtacgcagccgtgtctgtcacgtcgtatntcagctcacgatgatgaagtcgagcgctacacatgtacgcatagatatgatagacgtgtntcatgacggcacaacagangatagtggtgcaacgcanacacagcgctatcgaatgagtacgatgtacgangtactccgtcagattctcnacntntaatcatatcagctctgtgtataaggatactcatgcatgagctagacgactactggtctgtcatcgcgcttagcatcactatcgtgcnttcgtctcgtgtcatagtancgtngatcgagtgtctgcgtctcgtgacgtggtgcggatgatacttgacagcatagtgtcatatactacatgctgctgtnctgtatcctagtccgcactcattgaagctgccttctacgactgttgnntcgtatatacgtcgtcgtactcttgcgtctgtncatgtacctccnatn

SEQ ID NO: 315 - DNA, 1453 bp, Glycine max
  misc_feature (1)..(1): n is a, c, g, or t
  misc_feature (5)..(5): n is a, c, g, or t
  misc_feature (70)..(70): n is a, c, g, or t
  misc_feature (682)..(682): n is a, c, g, or t
  misc_feature (1275)..(1275): n is a, c, g, or t
  misc_feature (1327)..(1327): n is a, c, g, or t
  misc_feature (1351)..(1351): n is a, c, g, or t
  misc_feature (1362)..(1362): n is a, c, g, or t
  misc_feature (1365)..(1366): n is a, c, g, or t
  misc_feature (1376)..(1376): n is a, c, g, or t
  misc_feature (1379)..(1379): n is a, c, g, or t
  misc_feature (1383)..(1383): n is a, c, g, or t
  misc_feature (1385)..(1385): n is a, c, g, or t
  misc_feature (1388)..(1388): n is a, c, g, or t
  misc_feature (1404)..(1405): n is a, c, g, or t
  misc_feature (1408)..(1408): n is a, c, g, or t
  misc_feature (1412)..(1412): n is a, c, g, or t
  misc_feature (1424)..(1436): n is a, c, g, or t
  misc_feature (1441)..(1443): n is a, c, g, or t
  misc_feature (1452)..(1453): n is a, c, g, or t
  Probeset Number=SeqID_10094
nagantctcgacgaggtgagcgatgcatgacgaggggatatagaatatatgagtatgcagagagaggagngtgagttgagggatagtgagagccgtaaagcttaattcgtcgcgcgtgcagtaatgatatggttgaagttcggctttctttctgtattattcttcggccactcgtcccgcacatgcggtgctcatatacttatgtcttgtacacgcacagacctgtctttctctcaccccctacacacacccgcggctcctcctcttcacttcgcgctcctcccgtctcatgctgttgagcgcccgccgggtgagaagaatagaattcgcacgacgaagccacaaggcacgaggagcgcacaaaaacgccccgtagacatagtagatctctatcaccattgtcggtgtgtgagtgttgtagaggaatacatttcgaagagcatatatataggcgtctacaaatgaggtgtgtatgccgtcattccttgttttgtgctcgcctcgcacctaccgagagtctctcgatgctatttaatcatatcctatatatcggcagtgtgaaaatatgtatggttggtcttgtctcggcgtcgtctatgtggtatatcatattgctgggtcggcaggtctgcatgagagtgaaatcacggtaaaactataacaagagcgcgcgggccgaggnaccacgccgcttatactataatcatgatatatatggtttgttcgtggccgcgtcgccggcagaatataaataaaaatacaattggcgtcgcgggcgaagtcgggtgatcaccaacacaaatcgcgagccatcgcttcaaatttatacactgtattcgtcgttcggtaggtgaggcttctagctttgaggtcgaagatcaatacctccactatattccagcggcgagtccttctagttcgacatccttaaatcattatttatccgcctctcaaactgcgcgtcctaagcttgatactaccttcttcgcttcctctctggagtgggcgacgatgcgcgggttggcaatgcgtcggcgtactcaggggatctcagtacacataacatcagcacaacagagtaataagcaagatagaaaacactagccgcagagggcggcacggacacaagctgggcggcacaacaagcgagggacaacaccctcgccgcggcgccgacctccggggcgccctcaggcgcacctccaactagtcggcgtggaccgcgccctcgaacatgttgatacttgttttatcttgttctgttccgtgttgtgntttgtcgcctcattataacttcaaatatacagcgccggcatatattaatatngtgtgcgctcgggagaaagggatncatgagggaanggnnaaagggagtnatnaaangngangaaaataaaatagaannggnaagnagggggggaaannnnnnnnnnnnnaaaannnaaaaaaaann

SEQ ID NO: 316 - DNA, 648 bp, Glycine max
  misc_feature (377)..(377): n is a, c, g, or t
  Peptide Sequence Number=SeqID_6720
  Probeset Number=SeqID_10095
tttcaacaaagcctgctcatcttcctcggtcttgtgtttacgatttctctctcctcactctctccctcttcttcctcgaagcagagctctttaaatcgctcctcttctgcctcccactctttctccttgttggccccttcgcccctccctctatcactggcactgatgtccgcgttgaccgtggcgaggttgtcaactttcccgatcgggagcctgagctcaatgaggacaccaatatgaagtcctcacaatgacagcggaggcccgaggaagccaccactataggcccggtggttttcattagtgcggtagaaaagtgaaaagaatctgatggaatcgagaaatgtgtgatgatgatggaggaggagaaggagtgngagtgaggaggatttgtagatggtgaagaattcggaggggaagctagggaggtgggaggcaataatggaaacgttcggggggccagggaaatgcaattaaatcaaatttgttagtgtgaatttttctgtggaaatgcagttaaatgatcagccagaggagattgaagtggttgatctacacggtggcagtcatcgttatgcttcaattcatagggagggtgtgtatgatgcggcaactgcaagacgtggtagtgatttggaatgggtatga

SEQ ID NO: 317 - DNA, 496 bp, Glycine max
  Probeset Number=SeqID_10096
gggtgcctacaagtatgtttcagagctatggaccaagaagcaaactgatgtcatgcgcttcttgcagcgggtgaggtgctgggagtataggcagcaaccttccattgttcgtgtgacaaggtctacccgccctgacaaggctcgtcgcttgggcttcaaggctaatcacgggtatgtgaattaccctgttcgtgttaagagggggggccgaaaaagaccactttcccaaaggattggttattggaaaccccccaaccacggagttacccaactgaaattttagccaagccagaggtgaattgccgaggatcgagctggacggaagctgggtggacttatgcgtctcatttcttactgggtgagtgacgactctacttctaaatacttcgtagagaatcgtggggatatagctcatgctcgtattaagtatagatcccgcagtccatagagctcggccatactcattcacaagcgcagagagctgaataggcttagc

SEQ ID NO: 318 - DNA, 1682 bp, Glycine max
  misc_feature (14)..(15): n is a, c, g, or t
  misc_feature (20)..(23): n is a, c, g, or t
  misc_feature (25)..(27): n is a, c, g, or t
  misc_feature (29)..(31): n is a, c, g, or t
  misc_feature (33)..(38): n is a, c, g, or t
  misc_feature (54)..(54): n is a, c, g, or t
  misc_feature (79)..(80): n is a, c, g, or t
  misc_feature (104)..(105): n is a, c, g, or t
  misc_feature (114)..(114): n is a, c, g, or t
  misc_feature (227)..(227): n is a, c, g, or t
  misc_feature (236)..(236): n is a, c, g, or t
  misc_feature (238)..(238): n is a, c, g, or t
  misc_feature (284)..(284): n is a, c, g, or t
  misc_feature (287)..(287): n is a, c, g, or t
  misc_feature (305)..(305): n is a, c, g, or t
  misc_feature (307)..(307): n is a, c, g, or t
  misc_feature (312)..(312): n is a, c, g, or t
  misc_feature (384)..(384): n is a, c, g, or t
  misc_feature (407)..(407): n is a, c, g, or t
  misc_feature (529)..(529): n is a, c, g, or t
  misc_feature (562)..(562): n is a, c, g, or t
  misc_feature (564)..(564): n is a, c, g, or t
  misc_feature (570)..(570): n is a, c, g, or t
  misc_feature (663)..(663): n is a, c, g, or t
  misc_feature (744)..(744): n is a, c, g, or t
  misc_feature (852)..(852): n is a, c, g, or t
  misc_feature (905)..(905): n is a, c, g, or t
  misc_feature (1039)..(1039): n is a, c, g, or t
  misc_feature (1184)..(1184): n is a, c, g, or t
  misc_feature (1194)..(1194): n is a, c, g, or t
  misc_feature (1219)..(1219): n is a, c, g, or t
  misc_feature (1288)..(1289): n is a, c, g, or t
  misc_feature (1307)..(1307): n is a, c, g, or t
  misc_feature (1309)..(1309): n is a, c, g, or t
  misc_feature (1342)..(1342): n is a, c, g, or t
  misc_feature (1349)..(1349): n is a, c, g, or t
  misc_feature (1444)..(1444): n is a, c, g, or t
  misc_feature (1526)..(1526): n is a, c, g, or t
  misc_feature (1537)..(1537): n is a, c, g, or t
  misc_feature (1539)..(1539): n is a, c, g, or t
  misc_feature (1542)..(1542): n is a, c, g, or t
  misc_feature (1574)..(1574): n is a, c, g, or t
  misc_feature (1597)..(1597): n is a, c, g, or t
  misc_feature (1625)..(1625): n is a, c, g, or t
  misc_feature (1660)..(1660): n is a, c, g, or t
  misc_feature (1682)..(1682): n is a, c, g, or t
  Peptide Sequence Number=SeqID_6721
  Probeset Number=SeqID_10097
gggggggggggggnnggagnnnntnnntnnntnnnnnntagacacatataatancttgatctttcatatagatcacccnntcacaacacaccacccagaatgcnnacatatatntgaaacgtaatgagaggtgaggtgaggtgtatatagagcatatgcatagagtatatcaagaaagatggtacaacagtagtgtgagagtggcgcgcggagtcgacgcataaganataaggagngngtgtctgtgggtgtcgccgatcgccgctctacactccgccagttcngcnctcccgcgcgacacacgntntgccnccgccgccctccgcggaccctctctcactctgtgtgtcttccgatcttcttctcatgtggctgagagtgaangacgacagagccgtgtcataganaggcaagagggttgggggagacgtgtaataatatataggagttgtgtgatatgagtagattgtgcgatagatcgagtgaggttgtatggttagtgagtatgatgcgcagcgtatatatctgngtcttgtcatttatatattagtattgtacctgntncattanctatcttaatctatattaaatataataagatacacatatatacaactatcacaatcactcatctagatactatctatacacatacgttcacanactatatacacttcctctctctaacacagacacgtgactcagtgaaagccacgaatgacaatgagaagcaagagtgaatanataacgcgtgagcggtgtggtgcgtgtggttgtgtgtggtcgggtgagcgatcgagagaagaggcgcgtgaggaccgtcacgcgacacagatactgcagtctcgtcantcttatatcatctgcaagagtcgtcgacactaattacgtacatgagtgagcanatggagagatacgtgagtggtgacgatgaatgataagatatcaatatgcgtgaaacgactatgcgacaacatgcggtgatgatcacatgcctcgtgctagagatatgtagaggattcaagactgatcagaccanatatgatagatactattgttaatgtgatacgcatatagtataggcgctgctacgctgcgcgcgcgtatgtctgacacataacacgacagcgagtagcgatcgactcgtatcatgagacgagcgtgctctgctcagacacaatatnagatacgacngagtgcaccatgatgtcagtcatantagtcttcgttgcacgcgtcacagcgcttaatgactacacaatctgatgatataaatctcaaagacgtnncgcgacatcgccgactananctggcgacacatagcatgcgtgcactagacttnagtgcanatagtgacgtcgaccgtgcatgatactcgatactatgcatatagtccactctgagtcgcacgcagtacatataactcaccgtgctccagagtacngatgagatatgagatgacgaagttgccgagagtatgatcgtatcaggtgagtacgtaactatcgactgaacgacactatgtnctcgactatananagnaatcacgacactgctccactactccagtaatntgactactgctcacgagtgactncatacttatgtgttcatccgatgcgatnagtcaagaaccatgacatactcaacacgactgacncacacaatctgaatcatattgn

SEQ ID NO: 319 - DNA, 603 bp, Glycine max
  misc_feature (1)..(4): n is a, c, g, or t
  misc_feature (12)..(14): n is a, c, g, or t
  misc_feature (23)..(23): n is a, c, g, or t
  misc_feature (603)..(603): n is a, c, g, or t
  Probeset Number=SeqID_10098
nnnnggaagggnnnaagggaagnaggaggggaaggaaaaaagtgttgtttaaaaacaattgggtccgggccccccctgagtagctacgtaggcccccccccccatggccaattaatgtctacaatcattgcgctgggtctttgtgccgagtcatgctaaaatcctgtcaaacaccatattgcaccacctatcttacatatagtgagtgcaggcaccaattaatcggtcaggataaacttgtcagcggcaaaggagatgccatgccacccaagttctttcgtataagcagcacccttcaattgtaatttgtttactgctactaaaattgagatctgagacacagaaactaagataattgggctttgaatgacatgcctcaaacctcatgcaaataggactttgagttccgcgggggagtttgaaagagaatcttaaattctacaaacggtcaattgaattattatatttaatacgatttaatctccaacaggatatagtaaaggatatagtgacaactctgatggggaagagagagaacaaaagaaaaaaagcctcaacaacctgccacgggctccgtcaaagattcagggagaggaagacgcn

SEQ ID NO: 320 - DNA, 436 bp, Glycine max
  Peptide Sequence Number=SeqID_6722
  Probeset Number=SeqID_10099
tacaattataatacattttaaaacatgaatttcttaaaaatctcttcaagactttctcgtctctcttactccagcttgagaaccttcgcaagcggtgaatccagctctaaaactaccactattggcggtgttccaagaaacactagatcagacgctggtactggtttcccaccaagagaggccagcaaatatcttaaggaagaagataccagaggagctggcggcggtactgccagaggagagactgttaccaaccgtaatactgttttagatactgatcatggcaaggtcagtcctcataacagagatactgaaagacgttagatttacataaagtagtaactcttccagaatatttgctatgtgcgtatattataaataaattctgtatgtctatatactttacgatccaataagtgtcggaaatttccttccg

SEQ ID NO: 321 - DNA, 1619 bp, Glycine max
  misc_feature (33)..(33): n is a, c, g, or t
  misc_feature (37)..(37): n is a, c, g, or t
  misc_feature (56)..(57): n is a, c, g, or t
  misc_feature (110)..(110): n is a, c, g, or t
  misc_feature (119)..(119): n is a, c, g, or t
  misc_feature (127)..(127): n is a, c, g, or t
  misc_feature (139)..(139): n is a, c, g, or t
  misc_feature (144)..(144): n is a, c, g, or t
  misc_feature (161)..(161): n is a, c, g, or t
  misc_feature (167)..(167): n is a, c, g, or t
  misc_feature (451)..(451): n is a, c, g, or t
  misc_feature (487)..(487): n is a, c, g, or t
  misc_feature (548)..(548): n is a, c, g, or t
  misc_feature (550)..(550): n is a, c, g, or t
  misc_feature (593)..(593): n is a, c, g, or t
  misc_feature (602)..(602): n is a, c, g, or t
  misc_feature (703)..(703): n is a, c, g, or t
  misc_feature (807)..(807): n is a, c, g, or t
  misc_feature (811)..(811): n is a, c, g, or t
  misc_feature (1002)..(1002): n is a, c, g, or t
  misc_feature (1106)..(1106): n is a, c, g, or t
  misc_feature (1111)..(1111): n is a, c, g, or t
  misc_feature (1178)..(1178): n is a, c, g, or t
  misc_feature (1203)..(1203): n is a, c, g, or t
  misc_feature (1223)..(1223): n is a, c, g, or t
  misc_feature (1255)..(1255): n is a, c, g, or t
  misc_feature (1344)..(1344): n is a, c, g, or t
  misc_feature (1379)..(1379): n is a, c, g, or t
  misc_feature (1484)..(1484): n is a, c, g, or t
  misc_feature (1512)..(1512): n is a, c, g, or t
  misc_feature (1539)..(1539): n is a, c, g, or t
  misc_feature (1611)..(1611): n is a, c, g, or t
  misc_feature (1619)..(1619): n is a, c, g, or t
  Probeset Number=SeqID_10100
tttggggtgtgtacttctttgtcctctccactncttnctccccctcttatctgttnntttgttctgctcaatactttcctcttcgtctacaaaggagaaaggtaataagnacatatctnacaatacnatagcgcgttanctcgngcgtacgttgatactcnaagaangaaactaaaggggatgattattttgactgaagagttgaatagactccaacaacacatctagataatagtgatatacagagtgattagctcactcatatgtgctaacatacagcttcactccactccccggcgcctagcacccacgctactgacgataatacatgagcgacactaggacattacactatatgaacaatacattcgatatctctctcatacatatgagttatattgattaggtaaatactatatatatataatacgataattatatacatatatanttcgtatgatcttgttctattctatcctacatctcnatactatactatcgtatgatagcataactaatttaccgacgtgagctgtagggtagagganantcgaagtatgatcaatatacgctatatctctgccttcacccgncgccgcgcngtcagatgcaacaccgcactgctctacgcgcggagctccaatacttacctcatctcagctacctctctgaacttacatgtataatgacatccctcacaacngatcatcctcgcttctctggatatatatatgtgatgactgctgatttgattgtacacgacaatatagtagcatagatcattatccctgtccttctctgccttcnttantgctcggaatgagagataactattagtgacgctctgatatgtgtacctgttctgtattaattatcactctacgcgctatttgttcagtccttgctatcactctacacaacgccagcacaatgattcaccatcatagtacagcctaaaataacaagatgacatcgaataatatactaagctatatgagagtntatattacgtgctattagatataatgttatgtatatatagtatgtgatcgaatagtcgtaaagtacattaaatattatttgaatacgataataacaccaacatncgcancaatctagacgatcacatactgcgacactatcattatcatgacatctgacagtagactgcacaaccnatactgtcctatatgatgctatcantcaatacttgtcacgtctgntcactacgcgcaaccaccagtctactatctantgtatattacttatacatatatgataacagagcgatcagcgtattgctgctgtactatctacgcatcactctaacacattcatactctnttaacagacagacacgatattcgcaacatatctcncatttactcatatctactattacatgtagatagaaatatagagagcagagaatagatgatacaaataaacatcgccgctcgtcaagtacgccacatgctcagcantatagtatacacagatatagcaccgctntatcgtgcgtctactatcgtctgtatncgtatatcatatcacgatgcctatgtactggtgacttgatcgatctcacacacaagatctcgcgcgtgttanctcaacgn

SEQ ID NO: 322 - DNA, 811 bp, Glycine max
  Peptide Sequence Number=SeqID_6723
  Probeset Number=SeqID_10101
gttctgtcttaaatcagagtttttgctcctttctctgttcatcttttcaccagaaagaaaaaaaatggctttgcaaatgcagacttccactacgatcttcaaaaaccccacaccatctaccgccgccgatgcactcaccggaagattcttcccaggaaccgtcgcggttcgtcgggaaacgttaacggcgtggcgaggcgtcagatgcagcagcggtggagttggagacgccgggaagaaaaaagcggttcctaactccaactacgtagtgcctttggacaagttctcgtcctcttcttccatcactcgtcctctgattgagatacttcgagatctcaacaagaagatccctgataacatcgttaagagccacgatcctggatccagtgctgcttcttctggtttcatcccttggttccatgctaatcggatgctcagcttctacgcacctggttggtgtggggaggttcgtgacgtcattttctcagagaatggtaatgtcaccgttgtttatcgtcttaccattcgtggctctgatggtgaggcacaccgtgaatcgactgggacagtaaccatcactgacgatcacatcgaggatccggttgctgcagctgaggaaattgcattttgtagagcttgtgctcgatttggtctcggcttgtatctctatcacgaagagtaggccaagtatgcttaccttttttggttgaacaagtgtctatcaacttgttagagagacccttatgcattctagagtgctaaatatatgtaatcatgtctacaaacaagttataataatacatatataagc

SEQ ID NO: 323 - DNA, 447 bp, Glycine max
  Peptide Sequence Number=SeqID_6724
  Probeset Number=SeqID_10102
ttctttaccatcaaatctcgaatctattgactgaggaataccgctcgatgaaaccgcctgggacagggattatgttggtggcggcggtgaattctatgctgaccttgcagacaaaagggtcgcacagcaaaaggctcatgtgtcacttgccatggacacattcaagaattaagttcttaaagagccgcacgaagtcgatgctctaataactacgtggaaagattctctgttgatggctacgtgtgaaagcagcactgccttggcaagcggttgtgctacaatattgaagccctatgagttggcatctgtgacatgttgggagctcgctgaaatttgcaaagaagtcgggcttcctcctggcgatgtgaacattctcactggattacagacctgaagcgggtgctcctttagcaactcatcccgacgtagacaagattgcctttactg

SEQ ID NO: 324 - DNA, 470 bp, Glycine max
  misc_feature (232)..(232): n is a, c, g, or t
  misc_feature (277)..(277): n is a, c, g, or t
  Peptide Sequence Number=SeqID_6725
  Probeset Number=SeqID_10103
gagaagaagtatcactcatataatactctgtatcatttcatttcgataatcatccatagctactgaagaaaatggcaaccatctctgctgctatcacaaccccatcgatctcccgcgcaactcttgtgcaaaagcaggtctcatctcccgttcttggtttgccagcaatgggtaaggtgggaagagtgagttgctccatggaagaaaaaccttattctgtgaaagaaagcanctctagcatgttggggatgggggcatctctaataacagctaccancactacagccatatcaagcccagccataaccttaataaataagagactaagcactaaaagaaccagacttccctttaacctcagcaacaatcttcttaattaaatccttttcgacatctttaatcttatctaaactctctattgtatctacacttccactcttaaagaaaataaaaagtcgaaactatccctt

SEQ ID NO: 325 - DNA, 1438 bp, Glycine max
  misc_feature (1)..(1): n is a, c, g, or t
  misc_feature (154)..(154): n is a, c, g, or t
  misc_feature (167)..(167): n is a, c, g, or t
  misc_feature (239)..(239): n is a, c, g, or t
  misc_feature (506)..(506): n is a, c, g, or t
  misc_feature (681)..(681): n is a, c, g, or t
  misc_feature (691)..(691): n is a, c, g, or t
  misc_feature (693)..(693): n is a, c, g, or t
  misc_feature (804)..(804): n is a, c, g, or t
  misc_feature (931)..(931): n is a, c, g, or t
  misc_feature (992)..(992): n is a, c, g, or t
  misc_feature (998)..(998): n is a, c, g, or t
  misc_feature (1080)..(1080): n is a, c, g, or t
  misc_feature (1112)..(1112): n is a, c, g, or t
  misc_feature (1147)..(1147): n is a, c, g, or t
  misc_feature (1177)..(1177): n is a, c, g, or t
  misc_feature (1230)..(1230): n is a, c, g, or t
  misc_feature (1236)..(1236): n is a, c, g, or t
  misc_feature (1244)..(1244): n is a, c, g, or t
  misc_feature (1259)..(1259): n is a, c, g, or t
  misc_feature (1286)..(1286): n is a, c, g, or t
  misc_feature (1288)..(1288): n is a, c, g, or t
  misc_feature (1328)..(1328): n is a, c, g, or t
  misc_feature (1341)..(1341): n is a, c, g, or t
  misc_feature (1372)..(1372): n is a, c, g, or t
  misc_feature (1399)..(1399): n is a, c, g, or t
  misc_feature (1406)..(1406): n is a, c, g, or t
  misc_feature (1408)..(1408): n is a, c, g, or t
  misc_feature (1410)..(1410): n is a, c, g, or t
  misc_feature (1414)..(1415): n is a, c, g, or t
  misc_feature (1417)..(1417): n is a, c, g, or t
  misc_feature (1431)..(1434): n is a, c, g, or t
  Peptide Sequence Number=SeqID_6808
  Probeset Number=SeqID_10104
ngggtgtgtgttgtctgtgagactttgtatcttgctatgttttacacatctacgtccaacgtgattgtgcgcgatatcggtgtgttgtctgatctgctcataaaatcagtacatagaccctactctctacgacagaatacaatcgtcattcgtntgtcctatatgtngaaggagcggtgcttattcatgacattggtccgtgtaccttctccatcctcacgcggcgtggtgcgaagggntatgcgattctccaccctaacacaatcccttagggccttacatgtccttctggtgtgctcaggcgcggcgatatcccagtatcgtacgtacgagatacgtttgattggtataagtgacgtgtactgcacaacttcgtgtatcgtggtgtgcaatacgggtggagtcgtatttgcatagtagtcgcgtgtgacgctccgtggaacgcgatcgagaactcggattccctaggtgttaaagtcttgccactagacttataagtatgagtntggtggggcgattacaacctcgtgccgtacgccaacacccactccccacacgaacctgcaccaagggattgcatgttcttgtcgtatgttggagagacaagtctatcttatccgtgtatagccgagaggcctgactcgagataggacgatgccaggaatcatcctacttgtaatnatgtatgtgntntgtcttccgctatcaacgactgataccacaacggttatatgctacagactcatgttgtcgaggtctcctacagctactgctatactcatttgtacacgatggtgtacgtanatgcctgtgcacagtcactgtactcaagtctactttgggatctgagagccatatcgaatctgcgcgtaggagcgggtgtgtatacgtgcacacctaacgtcacagtcgtgctacatgtctatttctngtgtcagacgagcacgtagtcatacatgcttcgttctctgtgatctgctagatgaaggggnacttcnctgtatatggctgagttgtctctcgagatcttgattgtactattgagctatctcgatggcgacggcgactactaacataatnagcaacttagatctatatatacagcgctaagncgatatattagtactcaaggctgcagtcatgcatntatgtatcgcacctcatatctagatatatngagatcctagctgtctagagtcgttgtggcagtcgtgggggagagcacactcncttaanatgtggcncgtcttacgtgatgnttgcgtaggagcgagggagaaagagcntntatgagaaagatatatagtatcctacatgctgtctcgttnatatttgttatanttatatactaccgataatgggaggaaggggngagcttcgcgtctctgctcgtcgttcncctcccncncntganncncgctcccggcgttnnnncccc

SEQ ID NO: 326 - DNA, 2098 bp, Glycine max
  misc_feature (1)..(1): n is a, c, g, or t
  misc_feature (10)..(12): n is a, c, g, or t
  misc_feature (16)..(22): n is a, c, g, or t
  misc_feature (25)..(27): n is a, c, g, or t
  misc_feature (30)..(30): n is a, c, g, or t
  misc_feature (32)..(35): n is a, c, g, or t
  misc_feature (37)..(39): n is a, c, g, or t
  misc_feature (42)..(44): n is a, c, g, or t
  misc_feature (48)..(49): n is a, c, g, or t
  misc_feature (54)..(54): n is a, c, g, or t
  misc_feature (70)..(70): n is a, c, g, or t
  misc_feature (73)..(73): n is a, c, g, or t
  misc_feature (77)..(77): n is a, c, g, or t
  misc_feature (81)..(83): n is a, c, g, or t
  misc_feature (86)..(86): n is a, c, g, or t
  misc_feature (89)..(89): n is a, c, g, or t
  misc_feature (91)..(92): n is a, c, g, or t
  misc_feature (97)..(97): n is a, c, g, or t
  misc_feature (99)..(103): n is a, c, g, or t
  misc_feature (106)..(106): n is a, c, g, or t
  misc_feature (129)..(129): n is a, c, g, or t
  misc_feature (166)..(166): n is a, c, g, or t
  misc_feature (168)..(168): n is a, c, g, or t
  misc_feature (173)..(173): n is a, c, g, or t
  misc_feature (190)..(190): n is a, c, g, or t
  misc_feature (196)..(196): n is a, c, g, or t
  misc_feature (209)..(209): n is a, c, g, or t
  misc_feature (231)..(231): n is a, c, g, or t
  misc_feature (235)..(235): n is a, c, g, or t
  misc_feature (263)..(263): n is a, c, g, or t
  misc_feature (281)..(281): n is a, c, g, or t
  misc_feature (320)..(320): n is a, c, g, or t
  misc_feature (343)..(343): n is a, c, g, or t
  misc_feature (345)..(345): n is a, c, g, or t
  misc_feature (384)..(384): n is a, c, g, or t
  misc_feature (387)..(387): n is a, c, g, or t
  misc_feature (403)..(404): n is a, c, g, or t
  misc_feature (418)..(418): n is a, c, g, or t
  misc_feature (430)..(430): n is a, c, g, or t
  misc_feature (437)..(437): n is a, c, g, or t
  misc_feature (452)..(452): n is a, c, g, or t
  misc_feature (457)..(457): n is a, c, g, or t
  misc_feature (463)..(464): n is a, c, g, or t
  misc_feature (471)..(471): n is a, c, g, or t
  misc_feature (481)..(481): n is a, c, g, or t
  misc_feature (526)..(526): n is a, c, g, or t
  misc_feature (530)..(530): n is a, c, g, or t
  misc_feature (535)..(535): n is a, c, g, or t
  misc_feature (541)..(541): n is a, c, g, or t
  misc_feature (559)..(559): n is a, c, g, or t
  misc_feature (624)..(624): n is a, c, g, or t
  misc_feature (778)..(778): n is a, c, g, or t
  misc_feature (799)..(799): n is a, c, g, or t
  misc_feature (814)..(814): n is a, c, g, or t
  misc_feature (950)..(950): n is a, c, g, or t
  misc_feature (1022)..(1022): n is a, c, g, or t
  misc_feature (1055)..(1055): n is a, c, g, or t
  misc_feature (1059)..(1059): n is a, c, g, or t
  misc_feature (1167)..(1167): n is a, c, g, or t
  misc_feature (1207)..(1207): n is a, c, g, or t
  misc_feature (1285)..(1285): n is a, c, g, or t
  misc_feature (1397)..(1397): n is a, c, g, or t
  misc_feature (1451)..(1451): n is a, c, g, or t
  misc_feature (1578)..(1578): n is a, c, g, or t
  misc_feature (1670)..(1670): n is a, c, g, or t
  misc_feature (1677)..(1677): n is a, c, g, or t
  misc_feature (1696)..(1696): n is a, c, g, or t
  misc_feature (1767)..(1767): n is a, c, g, or t
  misc_feature (1806)..(1806): n is a, c, g, or t
  misc_feature (1831)..(1831): n is a, c, g, or t
  misc_feature (1845)..(1845): n is a, c, g, or t
  misc_feature (1866)..(1866): n is a, c, g, or t
  misc_feature (2048)..(2048): n is a, c, g, or t
  misc_feature (2058)..(2058): n is a, c, g, or t
  misc_feature (2090)..(2090): n is a, c, g, or t
  misc_feature (2097)..(2098): n is a, c, g, or t
  Probeset Number=SeqID_10105
nccccccccnnncccnnnnnnnccnnnccncnnnncnnnccnnnaccnncgccncctctctcctcccacnccntccntccnnnccnccncnnctccncnnnnncantcatccccattatgttcatacantatctcacaatttcatttctatcttctattagttctncncgcantttcgtttatctttctntatatnctatttatcatcnttatatatattatacatccatnatantatctctttctttttatgttattaattntttttgtaactacaccancgagacgagcccaatacacaacgctgacgagcactcaanatcaccgcacaccaaaccacccnancgaagaacatcataccgaccaaatgcaacagacacgaanccnagacgcaccatacaannaccaccacgatcantcacaacatctnacgacanacacgtgactcgacnacagngcagcnnaccgacnagcagacaanctcgaacacaccgactctctcattctcatatctcacgcctcgtgntatncaacncgacanctttatcgtgtcatatcnacaggtactctaatacatcatcatgccgttctatactctcttctctatcgccatactatttgttncatcgtacattcagttatcactcaacataatcatatctatcgcgatagtctcgtctcgctctatacgttaaatctgcacgtcgccatacaccactgtgatctttcgggcctcgctcgtcgccggcgccgcacgcgccgtcgctctctcgactgnctgcactcctctcgtctctgnctcctcgtcgtgganacgtcgcacgaccgacgacacgagccgacgcgcgtgctcgctgacctctccttcctcatgtgctctacgacgacaacgccgcgtgctctatcccgacagtcatcgcaacatgtatatggtctgttctatacctcanctatcgttctacgtctacgcgccgctgtcctcgtcggtgacgtgcggccagctccgcgttgctgtgttgggngtcgccgaggggactctgccgtctcctagctgntcgncgtacgatgtcgttgcggtcagtgctgcatacattctcgtgtatcgtgctcgggccagcacgcgcatccaccgcacattagatgatagtgtgtacataaccggaatanacagatatcgcgtctttgtgagccgccacgctcacacgtntgatagcacgcctcgctctcgtacgatcacttggccactacacggcacgcgcaagggagaacggcaggtcgagcgtgncagtatcgagactgcgtatcaatctatatctaccgacgtacgactcgtgtgtgcgtatgtcgcgcgcggcatctagagcctcacgatgcgtgtacgagcgtggtacggcgtntagcaatgtagagatgttagtgctgacttggagaatacactcttcgtcatatanagactgattcatagtgtctctctatcttcagatgatctcgatgtctgcagctatgagacgagagcagccacacggagcgacgcggcgcacacactcagcagcgcgctgcgactgacatagtacatcnctcgctatacgtcatggatcgcagacaaacactcactaaatctctcatgagagtcatgacgcgctgtgagagacgctcgagctgtctcgggntcgtgcntgtcgccgttggtactttncactgattgcccaccgtcgcagtgcgctcgacctgacgtgatctgcgtgtctctcgcgtctgttctgttancatacgcgactcattatgatgtcgttcttagcgctatgnctgctatgctgcgcgagtcgccggntgtcggccgcagtngtggaagcagacctgctcccngcagatcagactagcgacgcacgctgactgactacgctatccacacgcgtcgtcactagtcctgtacgagccgacgcgcaaacacgtcacatctccagccgtgctgacgcttcaagtctacgcctactccgtgccgagcacgactctcacgtgccaacgatcgaacgtgctcactctccccncccgccccancacactagtcaccttcaccaccatcatatcanaattacnn

SEQ ID NO: 327 - DNA, 629 bp, Glycine max
  Peptide Sequence Number=SeqID_6809
  Probeset Number=SeqID_10106
caaaacaaaaggaccaaacacactagttaagtaatgataatacactctccatctcctatccatcgcacgagtttctcgaacagtcgaagtagatctcagtgtcagagccgcttggtgactagatcggcggcggttcgtatatccacgggggctattggggtcgtagcagcggcggtggttatgatgacttctgtgtctacagcttacgcagagcttcctcctccgccgcaagacggtgaaacgctatcaaacgtaccgcagacgctatcaggtgaagactgcaagaaacagaggatacaacgacccaaatccaagaacgcagagaaatgcactgttaaatgcgtcaacacttgcattcgcggtggagacggagaaggaccgctcaatatcagaaggccattagtggtgttcaaacaagggtttcgtagccgtaattactgcttagtggaatgttcggatatatgcaacttgatcggagatggtgactatggaccttgaaacgttatcaaaaagaagaaactatggataaaggacctcatgtaccttcatattatttttttgtagagtgttgttaagtataatattaattgatgttaaacgcgatttaaaatgatataaatgtctataac

SEQ ID NO: 328 - DNA, 1396 bp, Glycine max
  misc_feature (105)..(105): n is a, c, g, or t
  misc_feature (229)..(229): n is a, c, g, or t
  misc_feature (336)..(336): n is a, c, g, or t
  misc_feature (743)..(743): n is a, c, g, or t
  misc_feature (1084)..(1084): n is a, c, g, or t
  misc_feature (1156)..(1156): n is a, c, g, or t
  misc_feature (1186)..(1186): n is a, c, g, or t
  misc_feature (1221)..(1221): n is a, c, g, or t
  misc_feature (1250)..(1250): n is a, c, g, or t
  misc_feature (1363)..(1363): n is a, c, g, or t
  misc_feature (1366)..(1366): n is a, c, g, or t
  misc_feature (1368)..(1368): n is a, c, g, or t
  misc_feature (1372)..(1372): n is a, c, g, or t
  misc_feature (1375)..(1375): n is a, c, g, or t
  misc_feature (1382)..(1382): n is a, c, g, or t
  misc_feature (1389)..(1389): n is a, c, g, or t
  misc_feature (1396)..(1396): n is a, c, g, or t
  Peptide Sequence Number=SeqID_6810
  Probeset Number=SeqID_10107
cagctagagactcatggatgtgagagtggaacagtatcctatattatactattgtagacacgtgcactagtgagtgtagctgtatcgcatgcctatggtggtgangaatacagtgactaccaattatctatgagtctgtaaactaaatagatctgtgctctgtgagcgagcgcgatatgtgcaggcacattgccagagactgtaccaaccgtcgtaagtatagtatcanatcatatttctactgtgcatcattaattacttttcatctatcgcatctctgatctcaggtggtcacgttggttcggtgggtgtgcatcgcgttcaacatttacattnatctctcggtagttcgtctgggtgtaggttgtgatccactaagatcatgtgcgtgcatggcaaccagatataccatcggagacagccgccgcacagcacaaacaactattcatcaatcttatcctacacttctaacgcattcggcttctcctaaaccacacatatagttatctcataccaatagcttacagtactgcattatactcacacatcttggacacacaccatagtgcattggccattgtctccatcagccaacttctcagtttcatgtctcctcaatatatcgtggggtgggtgtgtagatacaagaagcgcattgcttctggtcaatactgcaccactatctatctcatctcagtcagcgccgcgcgcacatgacagagcagacacgaggcggataaacncacgcagcggggcagggcgctgtataatatcatactcggtagtacttcactatgcgatgtccgacgcagactgctggttgctccatctatcagacagatcaggtagcatcaccggtcgatatcatggctcttaacttgccacctttcatactattctcataggttcaacttgtctttcactcttacatctctgttcgttatagtggagttgtctttcttcactgagcacgagcgtgctgggtctagacgtgtatctattctatatctttcttcttctatatcacatatgatacagagtacagcagtcgcgacgcaggccaccatcagtgacgaccatacantctcttatcctcattcttcctattattctcatcagggcgttgtcctgcattcttttatatattattatcttntattctctctatcatatgccctctaccacntcatacagacatcacacagcagcgctcgaggagancgggcgaccaatttgtggtgtttgcgccntctgtgtgttgatgtgatagggggaggggaggagccgactcatgggggtgtctattctttgtgaaactattaatagattatatgtgttttgttgatattttactgttataaanagnanaaanaantacatantcaccanaatcttn

SEQ ID NO: 329 - DNA, 694 bp, Glycine max
  misc_feature (1)..(10): n is a, c, g, or t
  misc_feature (611)..(694): n is a, c, g, or t
  Probeset Number=SeqID_10108
nnnnnnnnnngtttatattggttgtttttccccaagaaaatagtggttctcagggcgtgctcccttttagacgcatttttacggcgccgctggagggcctatgggtgtacacagtcacgagcaggaaagcctgcaggttttttttatagcccaggttctccagggggtggtcaagcaccacccccgttgccttcatttactcagcttgttccccagggattgatctttgtccccctagggcacccatttggggggggcatgtttgaaatggaaaaggtaaaaggtggctccccctatggtgcaggaacttatgctggagatggctcaagcccccctagtgagttggaattggctcaagctttccccccgggtaagtcctttgccggcattgcaaagaggctcaagggatctcaatgatttttatcctccatatatctcccacaccatattctgtgtcaaataaaatgagatgttagaagcaaaaataaaataaaagtgtgagagaataaagtaatacttcatatatcttcgatacaattgttgtcaccacttgtcatcgtcgtatcctgtaatgcagtttttattgtcaataacaagaatttggtaattannnnnnnnnnnnnnnnnnnnnnnnnnnnnnnnnnnnnnnnnnnnnnnnnnnnnnnnnnnnnnnnnnnnnnnnnnnnnnnnnnnn

SEQ ID NO: 330 - DNA, 717 bp, Glycine max
  misc_feature (717)..(717): n is a, c, g, or t
  Peptide Sequence Number=SeqID_6811
  Probeset Number=SeqID_10109
cctctccctctccggaggcggtggcttttccgtcgcgcgggaaaacaccggcgcgccggcaccggcgcaaaaccactcgcggtaacgctatcgaactaggatgatctctaactgctggagaagatgcaggagagcacggactatggttgggtggaagatgcgaaagcgcgacgatgaaatggttatggagttctgcaacgagattggcgtcgaaagaggggttctcaaagtgtggatgcacaacaacaagaacactctcgcgacaaaagacaaccttaacggcaacggtatcggtagcgctcccagtgtcagcgccaacggggttgctcccattggcgccgttggcagcgctaccgttagaagcagcgttcatgtccacgaacatgaacacggaggaattaacggtaacggtagcggcgacaacaaccacaaccccctcggttcccgggatgtgaacgagtacgagaatgatagtgggactaacggcggcggcggtactaatgggtcttcttcttcttcttgaaaaaaaaaatatgagagagaataatgatgtgtttagatgatagagtaattaagaggtggtacccgttaattacttaattagtcgttttcttcttctttcttttttattttgatttaattgtttagtttttgttaattaatgagatgagatgagatgacgatgatgtgatcaccttcttaacatggagagagatn

SEQ ID NO: 331 - DNA, 650 bp, Glycine max
  Peptide Sequence Number=SeqID_6812
  Probeset Number=SeqID_10110
ttagggatatttgtcaaagttcaaccaagttttacaattatggtggtctctaaggaaattttggagcccataattgatcaatggccacggggtttgtttgggaatggttatttgtggatttcggttggggtgaacccgcgtttggtttttttttgacaaaacacaatgtattctttttcccgattgtttctggaaattgggccttcagaggtcagagaatgtttttttggatttttgtacctcctcagtccccccagaggggtgccaaattgctgatgataatgaggggatgatgatttttatggggtaccggaggtttttaaggttttgtggagccctatgtgggtttaatttggttcggggggaccccccagaaaaatttgttttccttagatcttttggcacgggccccatgaaaggttttttattaaaaaaagctcctcaggttttttgtatggttcccccttgggattatgaaccgaaaagaccctgagttttgattttcaatccccaaaggcgcaaatatgaagtttgtaatttttgattggggatgaaaaaaccaattttgttttttagttggggaaaaaaaaaaaaaaaaaaaaaaaaaaaaaaaaaaaaaaaaaaaaaaaaaagaaaaaaaaaaaaaaaaa

SEQ ID NO: 332 - DNA, 1773 bp, Glycine max
  misc_feature (1)..(3): n is a, c, g, or t
  misc_feature (8)..(9): n is a, c, g, or t
  misc_feature (16)..(20): n is a, c, g, or t
  misc_feature (23)..(23): n is a, c, g, or t
  misc_feature (26)..(26): n is a, c, g, or t
  misc_feature (28)..(28): n is a, c, g, or t
  misc_feature (32)..(32): n is a, c, g, or t
  misc_feature (38)..(38): n is a, c, g, or t
  misc_feature (104)..(106): n is a, c, g, or t
  misc_feature (116)..(116): n is a, c, g, or t
  misc_feature (164)..(164): n is a, c, g, or t
  misc_feature (168)..(168): n is a, c, g, or t
  misc_feature (262)..(262): n is a, c, g, or t
  misc_feature (353)..(353): n is a, c, g, or t
  misc_feature (395)..(397): n is a, c, g, or t
  misc_feature (401)..(401): n is a, c, g, or t
  misc_feature (441)..(441): n is a, c, g, or t
  misc_feature (489)..(489): n is a, c, g, or t
  misc_feature (491)..(492): n is a, c, g, or t
  misc_feature (496)..(496): n is a, c, g, or t
  misc_feature (650)..(650): n is a, c, g, or t
  misc_feature (760)..(760): n is a, c, g, or t
  misc_feature (904)..(904): n is a, c, g, or t
  misc_feature (917)..(917): n is a, c, g, or t
  misc_feature (997)..(998): n is a, c, g, or t
  misc_feature (1008)..(1008): n is a, c, g, or t
  misc_feature (1019)..(1019): n is a, c, g, or t
  misc_feature (1193)..(1193): n is a, c, g, or t
  misc_feature (1195)..(1195): n is a, c, g, or t
  misc_feature (1207)..(1207): n is a, c, g, or t
  misc_feature (1296)..(1296): n is a, c, g, or t
  misc_feature (1414)..(1414): n is a, c, g, or t
  misc_feature (1486)..(1486): n is a, c, g, or t
  misc_feature (1507)..(1507): n is a, c, g, or t
  misc_feature (1573)..(1573): n is a, c, g, or t
  misc_feature (1617)..(1617): n is a, c, g, or t
  misc_feature (1640)..(1640): n is a, c, g, or t
  misc_feature (1655)..(1655): n is a, c, g, or t
  misc_feature (1712)..(1712): n is a, c, g, or t
  misc_feature (1731)..(1731): n is a, c, g, or t
  misc_feature (1751)..(1751): n is a, c, g, or t
  misc_feature (1773)..(1773): n is a, c, g, or t
  Probeset Number=SeqID_10111
nnnaaaannatgcccnnnnnccngcntncctncttttngtttgtgtctcgctggcgtttgtgggggtgttgcccccccccccccgcccaccccacacacaaaannnaaaccacagntatccccctgtgtttgttgtggtaggaggagtattggtgggggaaagnaaancaccacctaaatcatataggagtatgagtgttcggtagtgcacaccaactacttctctatactcttcaaaacacacaacaaatataatattatntatacaatttataacaggacaaagaaacacaaaacggcgataaggagaatggagagttataagattgtatgtactgatgttagtgtgtctngtgtgtgtgagggatgttgtatgtgttacttttgtgttattnnnacgntgtgctacacacctacacacacaacaacaagcttaccccncatcgccatctcttgctgtccttatcttttattttgtttgagtttatncnngagntgagaaaaaagaaacaaaagagtagaaatgatgtatgaataatatagattgatttaatcacagctataccgcccccacctccctctatggtggtctgtgtgggattggatgtttgtggagccaaccactgcaagcagtacaggcggtctgatangagagttattgattgacatctcctggctggctgtatcatatcatcccctaaccctcatatttcaatctatcttataatgttgaatttatgctttgcttagatgtggaggntaatccccactgctctccgcagttacagtcaccagcagacatcgtcctatgacttgatgtattatgtcttatgctgtgcctttgtgattcacctcgtgatctcacaccctcgccgtccgagtgataggtcagtggacaggctgncgccgatcttcgnctggatacgttacgtgtgtgtgtgtgttgattatagaaagacataaccataatggagatgatagttgagtggtggagtgnnggagagtgtnagtttgctcgntgcttcttgtatgtcttatgtgaggccctgtggctatgcatagacgttagtaagagacagcgcctaggagtcgtagactgtacacactgctgagtgatgagaggggataaatgcactctactctcgttgcatgaaaattgattgcgacctcctcatccccatccctactcaccncnacaacagaaaanggctaagcagatggattgtgattgtcgttgtgttgtgtcatatgactagagtataatgctatatacgtgtgcaggatgacagttgcaantagccgtgtgtagaattcgcgcatcacgtatattaatgacgtacgtgatatgctccactatcgtaagcacgttggtcgtggatcagtattcagtgtgacgtgtgcgttgagtgatatngtacctatgtctcagtgtcatactcatgtaagacagataacaactgaaagagtaccacactgaacacatacnacatcaagtctatgcaccttnctgacatacagctacattagcatagtgcgcatgtagatcagtattaccatatgcagcgatgtgtcntgatgtctgctatgctctcgctgctcattttgcacgctagtcancgctgtcatagcgacatcggtgnagatggacccactcnagcccaggcattcacagtagctgagatgagagacgcgccaccgataccacacggtgnctcagagtcatctgatacnactcatgaccgctcggcccngacatgccaatgtgacattcan

SEQ ID NO: 333 - DNA, 1951 bp, Glycine max
  misc_feature (1)..(1): n is a, c, g, or t
  misc_feature (5)..(5): n is a, c, g, or t
  misc_feature (7)..(7): n is a, c, g, or t
  misc_feature (15)..(15): n is a, c, g, or t
  misc_feature (46)..(46): n is a, c, g, or t
  misc_feature (54)..(54): n is a, c, g, or t
  misc_feature (69)..(69): n is a, c, g, or t
  misc_feature (106)..(106): n is a, c, g, or t
  misc_feature (119)..(119): n is a, c, g, or t
  misc_feature (132)..(132): n is a, c, g, or t
  misc_feature (135)..(135): n is a, c, g, or t
  misc_feature (138)..(138): n is a, c, g, or t
  misc_feature (140)..(140): n is a, c, g, or t
  misc_feature (145)..(145): n is a, c, g, or t
  misc_feature (147)..(147): n is a, c, g, or t
  misc_feature (157)..(157): n is a, c, g, or t
  misc_feature (159)..(159): n is a, c, g, or t
  misc_feature (186)..(186): n is a, c, g, or t
  misc_feature (199)..(199): n is a, c, g, or t
  misc_feature (208)..(208): n is a, c, g, or t
  misc_feature (223)..(223): n is a, c, g, or t
  misc_feature (227)..(227): n is a, c, g, or t
  misc_feature (273)..(273): n is a, c, g, or t
  misc_feature (281)..(281): n is a, c, g, or t
  misc_feature (297)..(297): n is a, c, g, or t
  misc_feature (311)..(311): n is a, c, g, or t
  misc_feature (320)..(320): n is a, c, g, or t
  misc_feature (335)..(335): n is a, c, g, or t
  misc_feature (392)..(392): n is a, c, g, or t
  misc_feature (395)..(395): n is a, c, g, or t
  misc_feature (452)..(452): n is a, c, g, or t
  misc_feature (497)..(497): n is a, c, g, or t
  misc_feature (555)..(555): n is a, c, g, or t
  misc_feature (558)..(558): n is a, c, g, or t
  misc_feature (569)..(569): n is a, c, g, or t
  misc_feature (595)..(595): n is a, c, g, or t
  misc_feature (608)..(608): n is a, c, g, or t
  misc_feature (619)..(619): n is a, c, g, or t
  misc_feature (714)..(714): n is a, c, g, or t
  misc_feature (723)..(723): n is a, c, g, or t
  misc_feature (725)..(725): n is a, c, g, or t
  misc_feature (750)..(750): n is a, c, g, or t
  misc_feature (752)..(752): n is a, c, g, or t
  misc_feature (776)..(776): n is a, c, g, or t
  misc_feature (778)..(778): n is a, c, g, or t
  misc_feature (800)..(800): n is a, c, g, or t
  misc_feature (817)..(817): n is a, c, g, or t
  misc_feature (866)..(866): n is a, c, g, or t
  misc_feature (868)..(868): n is a, c, g, or t
  misc_feature (894)..(894): n is a, c, g, or t
  misc_feature (896)..(896): n is a, c, g, or t
  misc_feature (916)..(916): n is a, c, g, or t
  misc_feature (930)..(930): n is a, c, g, or t
  misc_feature (942)..(942): n is a, c, g, or t
  misc_feature (947)..(947): n is a, c, g, or t
  misc_feature (969)..(969): n is a, c, g, or t
  misc_feature (982)..(983): n is a, c, g, or t
  misc_feature (995)..(995): n is a, c, g, or t
  misc_feature (999)..(999): n is a, c, g, or t
  misc_feature (1003)..(1003): n is a, c, g, or t
  misc_feature (1006)..(1006): n is a, c, g, or t
  misc_feature (1014)..(1014): n is a, c, g, or t
  misc_feature (1018)..(1023): n is a, c, g, or t
  misc_feature (1027)..(1028): n is a, c, g, or t
  misc_feature (1047)..(1047): n is a, c, g, or t
  misc_feature (1059)..(1059): n is a, c, g, or t
  misc_feature (1067)..(1067): n is a, c, g, or t
  misc_feature (1071)..(1071): n is a, c, g, or t
  misc_feature (1126)..(1126): n is a, c, g, or t
  misc_feature (1136)..(1136): n is a, c, g, or t
  misc_feature (1157)..(1157): n is a, c, g, or t
  misc_feature (1196)..(1196): n is a, c, g, or t
  misc_feature (1259)..(1259): n is a, c, g, or t
  misc_feature (1283)..(1283): n is a, c, g, or t
  misc_feature (1294)..(1294): n is a, c, g, or t
  misc_feature (1296)..(1296): n is a, c, g, or t
  misc_feature (1301)..(1301): n is a, c, g, or t
  misc_feature (1308)..(1308): n is a, c, g, or t
  misc_feature (1324)..(1324): n is a, c, g, or t
  misc_feature (1341)..(1342): n is a, c, g, or t
  misc_feature (1344)..(1344): n is a, c, g, or t
  misc_feature (1366)..(1366): n is a, c, g, or t
  misc_feature (1376)..(1376): n is a, c, g, or t
  misc_feature (1383)..(1383): n is a, c, g, or t
  misc_feature (1385)..(1385): n is a, c, g, or t
  misc_feature (1391)..(1391): n is a, c, g, or t
  misc_feature (1402)..(1402): n is a, c, g, or t
  misc_feature (1410)..(1410): n is a, c, g, or t
  misc_feature (1412)..(1412): n is a, c, g, or t
  misc_feature (1439)..(1439): n is a, c, g, or t
  misc_feature (1452)..(1452): n is a, c, g, or t
  misc_feature (1506)..(1506): n is a, c, g, or t
  misc_feature (1508)..(1512): n is a, c, g, or t
  misc_feature (1514)..(1515): n is a, c, g, or t
  misc_feature (1519)..(1519): n is a, c, g, or t
  misc_feature (1524)..(1524): n is a, c, g, or t
  misc_feature (1527)..(1527): n is a, c, g, or t
  misc_feature (1534)..(1534): n is a, c, g, or t
  misc_feature (1537)..(1537): n is a, c, g, or t
  misc_feature (1541)..(1541): n is a, c, g, or t
  misc_feature (1553)..(1553): n is a, c, g, or t
  misc_feature (1562)..(1562): n is a, c, g, or t
  misc_feature (1589)..(1589): n is a, c, g, or t
  misc_feature (1593)..(1593): n is a, c, g, or t
  misc_feature (1609)..(1609): n is a, c, g, or t
  misc_feature (1624)..(1624): n is a, c, g, or t
  misc_feature (1658)..(1658): n is a, c, g, or t
  misc_feature (1685)..(1685): n is a, c, g, or t
  misc_feature (1693)..(1693): n is a, c, g, or t
  misc_feature (1698)..(1699): n is a, c, g, or t
  misc_feature (1705)..(1705): n is a, c, g, or t
  misc_feature (1715)..(1715): n is a, c, g, or t
  misc_feature (1727)..(1727): n is a, c, g, or t
  misc_feature (1765)..(1765): n is a, c, g, or t
  misc_feature (1778)..(1778): n is a, c, g, or t
  misc_feature (1787)..(1787): n is a, c, g, or t
  misc_feature (1812)..(1813): n is a, c, g, or t
  misc_feature (1820)..(1820): n is a, c, g, or t
  misc_feature (1842)..(1842): n is a, c, g, or t
  misc_feature (1845)..(1845): n is a, c, g, or t
  misc_feature (1847)..(1847): n is a, c, g, or t
  misc_feature (1849)..(1849): n is a, c, g, or t
  misc_feature (1853)..(1855): n is a, c, g, or t
  misc_feature (1860)..(1860): n is a, c, g, or t
  misc_feature (1863)..(1863): n is a, c, g, or t
  misc_feature (1865)..(1865): n is a, c, g, or t
  misc_feature (1877)..(1877): n is a, c, g, or t
  misc_feature (1882)..(1882): n is a, c, g, or t
  misc_feature (1885)..(1885): n is a, c, g, or t
  misc_feature (1890)..(1890): n is a, c, g, or t
  misc_feature (1900)..(1900): n is a, c, g, or t
  misc_feature (1904)..(1904): n is a, c, g, or t
  misc_feature (1906)..(1907): n is a, c, g, or t
  misc_feature (1909)..(1909): n is a, c, g, or t
  misc_feature (1911)..(1911): n is a, c, g, or t
  misc_feature (1913)..(1914): n is a, c, g, or t
  misc_feature (1920)..(1921): n is a, c, g, or t
  misc_feature (1927)..(1927): n is a, c, g, or t
  misc_feature (1940)..(1944): n is a, c, g, or t
  Peptide Sequence Number=SeqID_6813
  Probeset Number=SeqID_10112
nctgnanctgagacnagtcatgtgtagcagtcatcaaaggcagtgnatcgagtnatatcatcggtttanctagtcgtgagcatgctagtgtacggcatgttttagntcgttaaaactangtctgtcagtgantancgnanctacntngtactgatgncntgctacgtcgctagctgatggtcgtanttcgtcatgtcgnttacagtgncactcgatctcatangtantctgtagctaccgccgactgtcgcatcgatcgcgagagtagagcantgctggantctgtcaccacagcangccgctttcgacantagcgtctnctcacgtgtagtatnctacacgtcatctctactgcacatctcatatcgacacatcgtcattagtatagtcgntcntgtaggtatttgtcttgtagctatcgtcgcgaaatgcagctgcgccacgtcgtactngggttctgtctggctgcgtagtcgagacgcacgagcatatgtagntactatacgttgtagtgaggatgagtgagtgggagctgggtggagtcatactatcatntgntatctcgttantgatgacgcgctgtatgccgcgtctnatgtctcactcgnattgtggttcngctatcgtgacagatcgaagtgtcgtgtcggctctgtctagtcagtcatgcagcatatatgtgcaacgtgacgtgtgagcagagtgtagcatgantcagagtgngnagtgtgtgatgtatggtgtgagtancnactatagtcatccatctagtcctngngggtggtagtgagtatacatancactatcacctacatantcagatatatgtgatgtcagcatcatcacatcttatcgatgtcatcgangnagtcgcatctagggattgggtctgangncgtacatatgtcatacactnttgcataatatctnctcgtagatatnggagnggataggatatgtgtgtatgantctcgtgtgtctnngtttgcccgttncgtntgantantactaatntgannnnnnatannatttgtagtatgtatcatnatatgatattanatacaaancacnatactacaatacatcatatagcagcacatacaagcagcactcacgcaccgacacncattacactncgcacgcactcgctcaccacntcacccagtatgcgagtactcgcacggtagtactagagnctgagctgagcagagagatgattcagctacattattatctcttatcgtcctcgtctatcactnccacgcgcagactcacagctgtcnttcgatcgctncncgttntaataanactacacatcaaacanagagctgacgccgaccnntnttctatactttctgttccctcngccggctgcnggtgtcngngagggntgatcgcatcntattcgtnancatctatcatacatccgatgcgcgcangtcgtcactcgtnatcatcgcatcatcagccggtagcgacgctcagtgctcatcgtgtacttctatncnnnnnannctantagtnatngatgtgntcncgtncgcgctgatganacaaatagncaaggtaatctagacaccacagtacanattnatgaaagaatgagtanatgatgtgtaagtanaggagtgatgctatctactgcgcatcgtcgactnctgtgtctactacgctctgcatccctnctctgttnttttnntttgtngaaagaacanataaatatatcnaatactctacactcaatataacagatcatacagtgtgntgccgttgctgcntgcgctctntctgctgctcttttttctgtgtgannggtagantagagaagaaaagccagccccnagncnancacnnncgcgnacngngctagacgcagngacgngcngcggnccgccagagncgcngnngngngnngggggnnggggancgcgggggggggnnnnnggggcca

SEQ ID NO: 334 - DNA, 1740 bp, Glycine max
  misc_feature (1)..(1): n is a, c, g, or t
  misc_feature (10)..(10): n is a, c, g, or t
  misc_feature (36)..(36): n is a, c, g, or t
  misc_feature (76)..(76): n is a, c, g, or t
  misc_feature (92)..(92): n is a, c, g, or t
  misc_feature (132)..(133): n is a, c, g, or t
  misc_feature (137)..(137): n is a, c, g, or t
  misc_feature (193)..(193): n is a, c, g, or t
  misc_feature (224)..(224): n is a, c, g, or t
  misc_feature (383)..(383): n is a, c, g, or t
  misc_feature (406)..(406): n is a, c, g, or t
  misc_feature (470)..(470): n is a, c, g, or t
  misc_feature (489)..(489): n is a, c, g, or t
  misc_feature (512)..(512): n is a, c, g, or t
  misc_feature (562)..(562): n is a, c, g, or t
  misc_feature (715)..(715): n is a, c, g, or t
  misc_feature (1019)..(1019): n is a, c, g, or t
  misc_feature (1078)..(1078): n is a, c, g, or t
  misc_feature (1257)..(1257): n is a, c, g, or t
  misc_feature (1362)..(1362): n is a, c, g, or t
  misc_feature (1472)..(1472): n is a, c, g, or t
  misc_feature (1522)..(1522): n is a, c, g, or t
  misc_feature (1578)..(1578): n is a, c, g, or t
  misc_feature (1670)..(1670): n is a, c, g, or t
  Probeset Number=SeqID_10113
ngatcaggtngagacggcatagtcaatctcacagtncgctgcatcgtataatacgtcgcacgggattagacatgcnggtcgtctgtcgtccncaacagcacgttcctctgcagctagtgtgtagttcagctnnctanactcatcaatctgatgatgctgtggctcgcgtgagctcagtaccatcggcagcagngcgcagtgtgatatctcgactcagacagtgnacgcagcgtgaagtgtgtgtgagtagtgctgagcaacaggctacgcagcgctactgtctggtatatgtagagtagcgtacgcgcagagcagacagagtcgacgcgcgcgttcagcgagccagcgtgcttcatgtcacgtgcgtgtatcgctaaccagcnatgtgctctagcgtagcatatcngtagagtggcacaggagtgagctagtctacgcatagcagtgtgtatcgcaatgtgagatagagngagatagtagtcgacactngtaaagtgtcacaggtgcgagcngagtggtatcatagatctagacgatgacatctagctatgtgctgcttgangtatgatcgcgagagtcgataggcaggtctccatcatgcgggcagagagtataataagaaaggtagggtgctccctcatgtcgctgtgtctgtgagcccagtctgtcgaagtgctgcaggcggaggtgctgagacgctcgcgagacgcttgtngttacggtagacaggcgtgatcgcctcgcagctggtacgagtagtgagatgtacgcatcgtcgagtcgatccatgccgcaggacgagtacggcgctgcgccagagtacgagaggcaggtcgcagtacgagcgtggagccaatcagcgacgacgcagggcagacgctgagttgcggtcgcgatgactcgtgaaggcgagtctcgcgcagtcgcctcgtgcgcggcagtagcctggtatgatcgacagatgtctcgcgacacagttattcatcacggcggaagatctgttagcactctcgacgctngcagcgacacgatctcacctatgtgatagagagaaggctatgtgaacggggtatctggnagtgaggatgtcagacggggaagtaacagcttaatcactcggtcagctgtgcgagtgcggataggcgactcgggcgacgtcccttctcgtttgttgcggtccttgttatgcatgtgaaatgaactatggcacacatgagtcatgcaacggaccagagagctcgcgtttactctacatgncaacacctagataccgctggtcgtatggcgtggtcgtagagccacgagatgtccctgtcatatagtacgcgtgctcgcgtggagtccgtcagtatgctcgctggnccgccgcatcctgcatagacaaaggactatctcaccaatgggtaaccaccagagagcttgcaatgaccatacgtccagacacggacaggaaggatgataagacttgaacnatctatgctcacatagacaagcgacagtgaacagcataggctcatatatngccttagctacaaccctgcgcaggagggcatatcactcgtcttagcttgccttatngtgtggcctgccgtcgtcctcttcttacatacgtgatgcagagatcactcactagtatctctgtctggagtgtcgctggcgagggtatacantagtgtacgtgacagcataacgtgactgaggacggagtaggagagagcatacagacaggctacaccccac

SEQ ID NO: 335 - DNA, 1591 bp, Glycine max
  misc_feature (1)..(1): n is a, c, g, or t
  misc_feature (48)..(48): n is a, c, g, or t
  misc_feature (102)..(102): n is a, c, g, or t
  misc_feature (223)..(225): n is a, c, g, or t
  misc_feature (318)..(318): n is a, c, g, or t
  misc_feature (335)..(335): n is a, c, g, or t
  misc_feature (406)..(406): n is a, c, g, or t
  misc_feature (658)..(658): n is a, c, g, or t
  misc_feature (841)..(841): n is a, c, g, or t
  misc_feature (941)..(941): n is a, c, g, or t
  misc_feature (982)..(982): n is a, c, g, or t
  misc_feature (1092)..(1092): n is a, c, g, or t
  misc_feature (1096)..(1096): n is a, c, g, or t
  misc_feature (1113)..(1114): n is a, c, g, or t
  misc_feature (1127)..(1127): n is a, c, g, or t
  misc_feature (1268)..(1269): n is a, c, g, or t
  misc_feature (1273)..(1273): n is a, c, g, or t
  misc_feature (1295)..(1295): n is a, c, g, or t
  misc_feature (1321)..(1321): n is a, c, g, or t
  misc_feature (1350)..(1350): n is a, c, g, or t
  misc_feature (1376)..(1376): n is a, c, g, or t
  misc_feature (1378)..(1378): n is a, c, g, or t
  misc_feature (1381)..(1381): n is a, c, g, or t
  misc_feature (1391)..(1391): n is a, c, g, or t
  misc_feature (1403)..(1403): n is a, c, g, or t
  misc_feature (1433)..(1433): n is a, c, g, or t
  misc_feature (1445)..(1445): n is a, c, g, or t
  misc_feature (1454)..(1459): n is a, c, g, or t
  misc_feature (1467)..(1468): n is a, c, g, or t
  misc_feature (1475)..(1475): n is a, c, g, or t
  misc_feature (1511)..(1514): n is a, c, g, or t
  misc_feature (1516)..(1516): n is a, c, g, or t
  misc_feature (1518)..(1520): n is a, c, g, or t
  misc_feature (1522)..(1522): n is a, c, g, or t
  misc_feature (1527)..(1527): n is a, c, g, or t
  misc_feature (1537)..(1540): n is a, c, g, or t
  misc_feature (1548)..(1548): n is a, c, g, or t
  misc_feature (1550)..(1550): n is a, c, g, or t
  misc_feature (1553)..(1553): n is a, c, g, or t
  misc_feature (1556)..(1564): n is a, c, g, or t
  misc_feature (1567)..(1571): n is a, c, g, or t
  misc_feature (1577)..(1577): n is a, c, g, or t
  Peptide Sequence Number=SeqID_6814
  Probeset Number=SeqID_10114
ncatcgcagatataatataagtcggccgcgacggcaacagtacgctancctctcccgctccacacatacacacgacaatagagcatggcgcatcagaagagnacacgtacgtccggacggacatcacgcgcgactgtggtgtgaacattgtcatctgtgtctgttgtctctgtgttcatatacctctgtggttgggttgtgtgttgtgcgatgtacagtggannnagaaagcgcccgccgcgcgacgcggctacacggcgcacgtcacgttcagcaccgctccgccgttcgtcgatcttctctgtcgctgacgagaanacacacacgcatgaacnatagtacgcaatgaggcgagtggtggacaagcgcgtgaatcacgctcggtgtgcgtgtgtgttgcgtgcgntgtgtgtgtggtgcgctgcgtgtatgatggttgtgtgtagttctagtatcgctgcagtcggttctgtgtcgttgtgcgtcgctctacagtgatatcttgtcgacacgtgcgcagaatagtgcgaatctcagagccataataccatcactccatggcgtcataccgcatactctacggcggagggacagacatgtcgtatggtctcgatagctatgagtggtttgtgactatatcatctttagttgtacatgntggtctcatgtcgtaccgttgagtcagagagatgagcactgcgggcgcgtcaacaggcgtcgaccgcatcgcgagagatatattaagccagtgcaatggctacatggcacacagagcaacacactactatgcgtctcgtgatcgcgcacctcatgtctcccttaccgtcgctctctcggtgtnttttgtttttcggatcgcgttatcagtataaggtccgagatagaagagagagatttagtaggctgtacgtatgtcaggcggtgagatacgagacgatagntaacagtcaatatatccaataccgatcatcgctggctccgngtcgtgcgtctgtgtgtttctaatatttgtgatgacgtatcgcagtcctacttgatagcgagcgagtatcgagtgacgccttcccatattagtcctgctcgttacattcngcanaccgcgcgaatccattnnaatagagcgtcantcatcgaagcgcgccacgcgtatacagtgtaactagatctgacccgataacgagaatagtaaagccagtcgtagcactacatgcgacgagacgcggcgtacgctattacttctgccgcctcacggcagagtcgcatcgtanntacngcgcggcgacgtgctctcgtgntgtatacgtcatagctcccgtccctncaccctccatctaggcactgtgcaccaanacagaacgagataagatatttatatnantantaatcgcagntcggtaaaccantcgagcaagacttgctatttctatctcttnggttgtgacgcncgcgccccnnnnnncccccaannagcaccnccgtcgcatcgccgatctagccctcagcactactcnnnncnannnancgagncgagaggaannnntttttctntnttnttnnnnnnnnnttnnnnncgcacncccgcacggaacac

SEQ ID NO: 336 - DNA, 298 bp, Glycine max
  misc_feature (88)..(92): n is a, c, g, or t
  Probeset Number=SeqID_10115
gtgcagtgtctccggatttgtggaatgtgctcgatgatgtgcactcctgtcaggtcattccactggatggtgcattgaccaatgaagnnnnncagataaactggccaaccaaaatgatggtgaggtcagaaaggttctgattcgtttatatggggaaggtgttgaagttttctttgacagggaagaagaaattcgaacctttgagtgcatttcaaagcatggtcagggtccacgccttcttggccgattcacctctggcagagttgaggagtttattcatgccagagtatgtgcttat

SEQ ID NO: 337 - DNA, 1928 bp, Glycine max
  misc_feature (99)..(99): n is a, c, g, or t
  misc_feature (164)..(164): n is a, c, g, or t
  misc_feature (223)..(223): n is a, c, g, or t
  misc_feature (272)..(272): n is a, c, g, or t
  misc_feature (300)..(300): n is a, c, g, or t
  misc_feature (303)..(303): n is a, c, g, or t
  misc_feature (308)..(308): n is a, c, g, or t
  misc_feature (314)..(314): n is a, c, g, or t
  misc_feature (340)..(340): n is a, c, g, or t
  misc_feature (355)..(355): n is a, c, g, or t
  misc_feature (373)..(373): n is a, c, g, or t
  misc_feature (376)..(376): n is a, c, g, or t
  misc_feature (378)..(378): n is a, c, g, or t
  misc_feature (386)..(386): n is a, c, g, or t
  misc_feature (446)..(446): n is a, c, g, or t
  misc_feature (653)..(653): n is a, c, g, or t
  misc_feature (664)..(664): n is a, c, g, or t
  misc_feature (698)..(698): n is a, c, g, or t
  misc_feature (745)..(745): n is a, c, g, or t
  misc_feature (760)..(760): n is a, c, g, or t
  misc_feature (763)..(763): n is a, c, g, or t
  misc_feature (789)..(789): n is a, c, g, or t
  misc_feature (841)..(841): n is a, c, g, or t
  misc_feature (875)..(875): n is a, c, g, or t
  misc_feature (877)..(877): n is a, c, g, or t
  misc_feature (880)..(880): n is a, c, g, or t
  misc_feature (883)..(883): n is a, c, g, or t
  misc_feature (904)..(905): n is a, c, g, or t
  misc_feature (907)..(907): n is a, c, g, or t
  misc_feature (919)..(919): n is a, c, g, or t
  misc_feature (923)..(923): n is a, c, g, or t
  misc_feature (929)..(929): n is a, c, g, or t
  misc_feature (946)..(946): n is a, c, g, or t
  misc_feature (967)..(967): n is a, c, g, or t
  misc_feature (1040)..(1040): n is a, c, g, or t
  misc_feature (1048)..(1048): n is a, c, g, or t
  misc_feature (1059)..(1059): n is a, c, g, or t
  misc_feature (1096)..(1096): n is a, c, g, or t
  misc_feature (1179)..(1179): n is a, c, g, or t
  misc_feature (1212)..(1212): n is a, c, g, or t
  misc_feature (1241)..(1241): n is a, c, g, or t
  misc_feature (1437)..(1437): n is a, c, g, or t
  misc_feature (1485)..(1486): n is a, c, g, or t
  misc_feature (1512)..(1512): n is a, c, g, or t
  misc_feature (1544)..(1544): n is a, c, g, or t
  misc_feature (1551)..(1551): n is a, c, g, or t
  misc_feature (1666)..(1666): n is a, c, g, or t
  misc_feature (1696)..(1698): n is a, c, g, or t
  misc_feature (1740)..(1740): n is a, c, g, or t
  misc_feature (1785)..(1785): n is a, c, g, or t
  misc_feature (1842)..(1844): n is a, c, g, or t
  misc_feature (1879)..(1886): n is a, c, g, or t
  misc_feature (1895)..(1902): n is a, c, g, or t
  misc_feature (1904)..(1906): n is a, c, g, or t
  misc_feature (1908)..(1908): n is a, c, g, or t
  misc_feature (1911)..(1912): n is a, c, g, or t
  misc_feature (1917)..(1917): n is a, c, g, or t
  Peptide Sequence Number=SeqID_6904
  Probeset Number=SeqID_10116
ctcagtgatgtatactatgtattatatcgatgtgtttatcatagtataatctgattgcagtgacgttcgttgatgagaaatgtccagtagacagagtanagccacgctctgtcgtctgctcgcaacgacctatcgtctagtcgtgtaatatcagatgtagactngatcagtggcgcagtaggctttatccttatcggttgcatcccggcgtagactatgcacntacgattctctcacaatgtcatacttttgtagacgtatatatgtatatnaattaattgagatgagagatcgagtagntantacanagaganatcgagtctgatcagatgatagatantgtagagagttcatntgtgaacgatcgcgacgngangnatgcagtntgctgtagtcggtgtgcgcgcgcacgatagcacgtacgacgtatgagagagatgagcgtncactgtcgcgtgcgtgaacgacatgtcatgagagttgatacggtatgtcaaagagtgtatcgtcgctgtggcactatgctcgtacttattcatatcatactacactatagtcgctgagtcatggatgtccgtgagtggtcgcagcacatagcagatgttatctcgtgtaggccacggtgtcaccctgcattctacttcgctgcatgnttccattctcntcttccaggatctcgatatcatatctctctgtcnctaatacatcatcacatgagtacgtagtgggtgtgtagttgattctntcacacagaactcanacncacgcactacaatcacacctagatantataccgcgcagcagtcaggcgggcgcgcgggcggtggtggtgatttatgtntcagtgtcttagatgttggttattcagtcatgtntntgnccnttgtatcgatattatatactnnantctattgtattnatcnttattnttttccttctccctctnttcctataccactcactctcnagcgtagagatagcgtagaatatcgcgctatgccacagtagccgcgtctctctatctctctcctacctgcatnagctcgtnaatcattacangacacgcacatagatcgtgttgtcgttgtgagacgcnagagacgtggtggagactgacagaacccatcaggcagagtacacaattagcatgaagacgtggggcggagtagcgtagtgtgncgcacgtgaatgtgaggcggaagagatgcagangagtcatcaagtaggagagccgcgccttngctatgtaggatacgtgtggtggagcggggaggacgatcgagcctctctctcatatgatatgtgctgagcactgtggctagtgcttaatggttatcgtgtgagcgcgcacctgctagataaagacgttgatactatgtgattatggtgttgtatgtttgctctatgtctatgtattatgtgtatctgatagtatanggtgatgagttatcagtcattatgtctggacatgagatagatatcatnntgtcgtacatctctcacagagagacngtaaggagatcgattgagtgggtagtagatantagggangtgcgtcgggtggtgacatctagaattagaacaagcatatgatcggcttgcaagatgttggtgaggtgaagagaagagccgcgcgaggcgacgcgagcattgctgtgcatagcanagctctcatagggtatatgtctggcgtggnnnggaaacctcatatcatatcactgctctttgatggtcttatanagactctgtgtctgttattttcctgcgcacttcttctatataccnttatttgttatattgtgatagctcgttcggactcttcggtgttgtttcgtgggggtnnntggtgtggttatgttgtgttcgtacctccgtctgnnnnnnnngtattgtannnnnnnntnnntnacnnccccnctccctccccc

SEQ ID NO: 338 - DNA, 2030 bp, Glycine max
  misc_feature (1)..(1): n is a, c, g, or t
  misc_feature (2030)..(2030): n is a, c, g, or t
  Probeset Number=SeqID_10117
ngtaggcagagccctaagaagcaattccaacaccgccgtgtacggtgttggtgccacccttcatcgagatcgaatggctccccatggctgcttaaccccatcaaatccgaatccttctgtttctgttactgggtttagatacctttctgcttctgctgctgccacgtctcttgcccaagacgctcagaccaaggccttcaaacccaaggaacttgtcctctttcagtaccaggcctgtccattctgcaacaaggttgcagtggttgaggtgaatcccataaacaagaaggagatcaaatggtccgactacaagaaggcacgcgtccggcactctgcaactccctattcggcagtttgagccatatgttggtaattttttttgaaaaagaacctagaagttagattcggcaaagttgatttcatattcaattcgatttccccctttttcttctccacgtttgtgcttgcaacctcaaataacgattagttttcatgctacacttaacttggtttcggtgagccaagttagttagaggaattgttgcatgcatagctctctgatctgaaaatgagcgtgtcgagtttctttaagtgcctcaccgtcggcgacgcggctgccgccaaaccttgctttttgatttcctacaccagcaacacttttcccacggactatgtgcccacagggtttttgacaatttcagctgctaatgttgtggtggatggaagcaccgtaaactgggattgtgggatactgctggttcaggaggattataataggcttagacccttggctatcgaggaactgattgtatttatacttgccttttctctcataagcaaggctagctatgaaaatattgcaaagaagtggatccctgaactaaggcattatgcccctggggtgttccaataatttctcgttggaacaaagttagatcttcgagaagataagcaattttttataaaccaaccctggtgcagtaccaataactacaacacagagagagaagaattaagaaaactgattggtgctcctggctaacatcgagtgtagttccaaaacacagcagaatgttaaagctgtctttgacgcggccatcaaaggtggttcttcaaccaccaaagcaaaagaaaaagaaaaaaaaagcacagaaagcttgctcaatatttcagaaattaacagtaggcagtgactgtttgaccaatcttcactgctgcctctccatcaatttgtattattttgttgcccttgtcctctctctgtagtttgcagggttgtgtacagttttttgaactagcattgtaggatcatgcctcatttcatactttgtaactacaatgaacttaattatataactgtcgatttcctttctaacataaataaagaacataaaaaagaacaataaactagagtgtgtgtgcagagctcgcgaaaactatggttgcttttgacttaggtcatggttaggtgatgctatttgggtgaaaggaattgacttatatcctactaagtttggtgagtcttagtaagctttaaatgctttgcacttgtaatttatcttgtggctatagtggtgatttgtgatcacatactgttctggtaaatccgggtatgtattcaataaaagagtttagcccaaaaaaaaaaaaaaaaaactacgtgcaccagagcagcaaactgtgtatagtttggactgacttcttaggccggataatcaatcacatgatttctgccttgtctgtctcattttcaaactctgtaattaaaactagctcaattacatacctggtgcctaccaatttccttctactattattatgttagtagcccaaactgcatgctttgtgaatgtggtcatattcatttggcctttttgatgtcttctatgaatttctttaatggttttggtcagatgttgcatattttaaattttaacactcaagggatgttattgaaaaaaaaaaaaaaaaaaaaaaaaaaaaaaaaaaaaaaaaaaaaagaaaaaaattttaaaaaaaaaaaaatttan

SEQ ID NO: 339 - DNA, 1430 bp, Glycine max
  misc_feature (42)..(43): n is a, c, g, or t
  misc_feature (54)..(54): n is a, c, g, or t
  misc_feature (123)..(123): n is a, c, g, or t
  misc_feature (147)..(147): n is a, c, g, or t
  misc_feature (212)..(212): n is a, c, g, or t
  misc_feature (272)..(272): n is a, c, g, or t
  misc_feature (440)..(440): n is a, c, g, or t
  misc_feature (560)..(560): n is a, c, g, or t
  misc_feature (739)..(739): n is a, c, g, or t
  misc_feature (1142)..(1142): n is a, c, g, or t
  misc_feature (1222)..(1222): n is a, c, g, or t
  misc_feature (1296)..(1296): n is a, c, g, or t
  misc_feature (1308)..(1308): n is a, c, g, or t
  misc_feature (1376)..(1376): n is a, c, g, or t
  misc_feature (1400)..(1400): n is a, c, g, or t
  misc_feature (1430)..(1430): n is a, c, g, or t
  Peptide Sequence Number=SeqID_6905
  Probeset Number=SeqID_10118
tggggagtggtttgggccccccttcccccgccgcaggccacnncccctccctcnacacccggctgggcgactggcaagtgtgagacgggataaccctactctagtatgcggttgtgcttttanaaattacacgcacaccacatacgntgaggggcgccgcctccttttttctatgtggttatgaaggagccgagatgtgtgagttagtgccncctcccatctatattctcagacgcgcacacctccaaggagattacaactcacctgcatcntcatctgtattgagacgttagaacctacaatacagcccatagaggattatgcatgcccagtggtggtctgtgcgtgactatgtgtgtctatccattctatacgtgcgggtgtgacgcaggcgttatccccgccccgtccactttgcgcgtgtctactcctcgccagtngcgatgccgttcctgcagtggagatggattcctatgccactatatatatatttatatgaaaaatcaataacacatatcggacatccgccgacgtgtcacaccggcggtgtcgttctcttnccgtgacgagatatctctctgttcggatggtgaagggttttgttggtgaagagagatatcggatattagagttaataacgaatatacacacgaagatcatgtcggtaggttctgacagaacccacggcgaaacacctcatactgttcctatgcgacaactccagtagtgtgagatgtangagttgtgtggtgtgtggctgcacaaccattaataggctatgacgcgcgacgcgttgcaggtgttgttattatcgtgtgtgtttggtgcccaccatccttgtgtgttacactcctctgctacgctttgtgtggtgcttgtatcgtcctctattgtccattataatactatgaacttattattaattgagctaagttccatctccacatatcaataatatataccacttctattaatgagctttggcatgtcatggtcttgtgatggtctgtgtttgtgcccctccttcctccttgctgtaaccgttgttgtgaatatgtgttaggctggatgatatctctgtgcaacggacagtcctcactctcatctcatgtgcctctattcgttcctcgttctgtgtcttngtagttagtacactatcctgcatatgtatacatcgtgatatgtaccatctatatctggatcagctcatcgatacgagccngagcgatccgttgcaatatcctatgtgcaccaaccatcatgatatggatgtactgtgcagtctgcgctagacangatagatactgngtagattatgtgacgtgatacgggacgtcacgtgctgatggggtctacgtcgcttactacctgtgtancactgtgcatttggctgcacgggncatcactctgcgagtctgctgtgatggcgn

SEQ ID NO: 340 - DNA, 1425 bp, Glycine max
  misc_feature (1)..(1): n is a, c, g, or t
  misc_feature (106)..(106): n is a, c, g, or t
  misc_feature (303)..(303): n is a, c, g, or t
  misc_feature (536)..(536): n is a, c, g, or t
  misc_feature (586)..(586): n is a, c, g, or t
  misc_feature (596)..(596): n is a, c, g, or t
  misc_feature (654)..(654): n is a, c, g, or t
  misc_feature (718)..(718): n is a, c, g, or t
  misc_feature (769)..(769): n is a, c, g, or t
  misc_feature (818)..(818): n is a, c, g, or t
  misc_feature (1067)..(1067): n is a, c, g, or t
  misc_feature (1108)..(1108): n is a, c, g, or t
  misc_feature (1221)..(1221): n is a, c, g, or t
  misc_feature (1343)..(1343): n is a, c, g, or t
  misc_feature (1347)..(1347): n is a, c, g, or t
  misc_feature (1371)..(1374): n is a, c, g, or t
  misc_feature (1377)..(1378): n is a, c, g, or t
  misc_feature (1380)..(1380): n is a, c, g, or t
  misc_feature (1383)..(1384): n is a, c, g, or t
  misc_feature (1387)..(1389): n is a, c, g, or t
  misc_feature (1391)..(1398): n is a, c, g, or t
  misc_feature (1400)..(1400): n is a, c, g, or t
  misc_feature (1402)..(1403): n is a, c, g, or t
  misc_feature (1405)..(1407): n is a, c, g, or t
  misc_feature (1421)..(1425): n is a, c, g, or t
  Probeset Number=SeqID_10119
ngcgtgaggtgtcagcgcgctgtgcgcgcgcaggtgtagtggcgacgcagcgtccgttgtgtcgtgtggtgagacatgtcattacactcacgctatagtgtcatgnatgtagtgcgtcctgcgcatgacgtagctggttgggtgtgtcgtattgcgtggtggtatgatcagtgcacacagctcgacgcagcatgcacagcgtcacgcacacgacgtatacacaaggctcgaactccgtcgtcgagccgccgatgctgcgacggctccctgcgcgacgactagcgactcatcagcgtgtgatgntggtggtggtacacacagcgctcgtgggtgtactgctacgccatctagcgcggcccgtcgtcatgcgtctgcgctgctgcgcacggtacgcccgcggacgtatgtcgcggcgcgcgagcggactctatcctctcacacggcgtgtgcgtagagcgagtggtagggtggtgtcatgtcgattatatgactaacagaggagtaagcagagagtaggaaggacgtgacaagcaagnagctgtgatagtcgtgagagagggggggggtgtggggggtgggtatgagntagtgtgttnatatttctgcctcagtggctcgctttctatccttatacattataccaccaccactcgnctggtctctggcatagacacagaccgatgatctgatgtggtgcgccgccgggccgcggcgtggngttgtgttgtgggttgtggtcgttcacgtgaagtgtttttttttgtatttnttttctatttttgattgctctctccttcgctctaatcacttccacctcntctcacctctaccatactccatgcattgttgatagtcagagcactactcacgaggatgacatattagtggtgtcacgatggtgggtcgagaggtgtggaattgttgtgagcgatgtcgcaggtgcacggcaggagggcgctgttcggcgcactccgtagtccgagagacggcgggagctggctcggtgtgcgttccgcgctagtgggactcttatcgcacggtaggaggcagacacaacgacccacaancatcgcagatctactagtcctcgcctcgtttctctctctcngctaacgagtgtcatgagcgagatcaagcggtggtgtaggcgcatgtgggctgctgtatgcgcgttagatcaatatcatgtgctgcgctatggctttatcctatcggaatatntagttgtagctctgacacacgcaaacaagcatactatctctatacgattgtgctgatgcgcgatgcggtagtattccgccctgtgaacgcctatcagaatccacactccaccgctgtgcgcngggnttggaaggagagtgggcaccccannnnccnncnggnnggnnngnnnnnnnngngnngnnnccacaccccccaannnnn

SEQ ID NO: 341 - DNA, 308 bp, Glycine max
  Peptide Sequence Number=SeqID_6906
  Probeset Number=SeqID_10120
caatatcctgactaccgaggcttgaggagctggatgtttcatctaatgttgaataatccctacctgactctattggattgctgggcaaactcaaaatctttaatgtggcagccaacaatctaactgctcttcctgaatccattgatcctatcatgctatcttgtagcatcatctaaaacaacatcgtcttcctggtaagagaaaatccctttcgtaaccatgtctaagagcaaacttagtggggggaaacatacacatatatccatggtaggaacgacttctataaaacactctttttaacatactcc

SEQ ID NO: 342 - DNA, 1427 bp, Glycine max
  misc_feature (20)..(20): n is a, c, g, or t
  misc_feature (61)..(62): n is a, c, g, or t
  misc_feature (65)..(65): n is a, c, g, or t
  misc_feature (67)..(67): n is a, c, g, or t
  misc_feature (71)..(71): n is a, c, g, or t
  misc_feature (80)..(81): n is a, c, g, or t
  misc_feature (98)..(98): n is a, c, g, or t
  misc_feature (100)..(104): n is a, c, g, or t
  misc_feature (106)..(110): n is a, c, g, or t
  misc_feature (112)..(118): n is a, c, g, or t
  misc_feature (131)..(131): n is a, c, g, or t
  misc_feature (133)..(133): n is a, c, g, or t
  misc_feature (170)..(170): n is a, c, g, or t
  misc_feature (173)..(178): n is a, c, g, or t
  misc_feature (180)..(180): n is a, c, g, or t
  misc_feature (187)..(196): n is a, c, g, or t
  misc_feature (209)..(209): n is a, c, g, or t
  misc_feature (242)..(242): n is a, c, g, or t
  misc_feature (259)..(267): n is a, c, g, or t
  misc_feature (287)..(289): n is a, c, g, or t
  misc_feature (291)..(292): n is a, c, g, or t
  misc_feature (312)..(315): n is a, c, g, or t
  misc_feature (319)..(319): n is a, c, g, or t
  misc_feature (328)..(330): n is a, c, g, or t
  misc_feature (332)..(332): n is a, c, g, or t
  misc_feature (340)..(341): n is a, c, g, or t
  misc_feature (353)..(357): n is a, c, g, or t
  misc_feature (359)..(363): n is a, c, g, or t
  misc_feature (365)..(368): n is a, c, g, or t
  misc_feature (377)..(380): n is a, c, g, or t
  misc_feature (388)..(391): n is a, c, g, or t
  misc_feature (394)..(395): n is a, c, g, or t
  misc_feature (398)..(398): n is a, c, g, or t
  misc_feature (400)..(403): n is a, c, g, or t
  misc_feature (405)..(406): n is a, c, g, or t
  misc_feature (419)..(419): n is a, c, g, or t
  misc_feature (422)..(422): n is a, c, g, or t
  misc_feature (432)..(432): n is a, c, g, or t
  misc_feature (435)..(439): n is a, c, g, or t
  misc_feature (441)..(445): n is a, c, g, or t
  misc_feature (458)..(458): n is a, c, g, or t
  misc_feature (469)..(470): n is a, c, g, or t
  misc_feature (477)..(484): n is a, c, g, or t
  misc_feature (486)..(488): n is a, c, g, or t
  misc_feature (491)..(491): n is a, c, g, or t
  misc_feature (495)..(496): n is a, c, g, or t
  misc_feature (503)..(511): n is a, c, g, or t
  misc_feature (523)..(523): n is a, c, g, or t
  misc_feature (535)..(536): n is a, c, g, or t
  misc_feature (538)..(539): n is a, c, g, or t
  misc_feature (543)..(543): n is a, c, g, or t
  misc_feature (546)..(547): n is a, c, g, or t
  misc_feature (549)..(552): n is a, c, g, or t
  misc_feature (554)..(555): n is a, c, g, or t
  misc_feature (557)..(564): n is a, c, g, or t
  misc_feature (568)..(568): n is a, c, g, or t
  misc_feature (570)..(570): n is a, c, g, or t
  misc_feature (577)..(577): n is a, c, g, or t
  misc_feature (588)..(589): n is a, c, g, or t
  misc_feature (593)..(593): n is a, c, g, or t
  misc_feature (595)..(596): n is a, c, g, or t
  misc_feature (598)..(598): n is a, c, g, or t
  misc_feature (600)..(602): n is a, c, g, or t
  misc_feature (624)..(624): n is a, c, g, or t
  misc_feature (687)..(687): n is a, c, g, or t
  misc_feature (691)..(691): n is a, c, g, or t
  misc_feature (721)..(721): n is a, c, g, or t
  misc_feature (726)..(726): n is a, c, g, or t
  misc_feature (729)..(729): n is a, c, g, or t
  misc_feature (768)..(768): n is a, c, g, or t
  misc_feature (772)..(772): n is a, c, g, or t
  misc_feature (783)..(784): n is a, c, g, or t
  misc_feature (796)..(796): n is a, c, g, or t
  misc_feature (836)..(836): n is a, c, g, or t
  misc_feature (856)..(856): n is a, c, g, or t
  Peptide Sequence Number=SeqID_6907
  Probeset Number=SeqID_10121
gtcagtcaagagagtcatancagctgtctgataatgtagaatctttttgccgcgggcgcgnnggngngcangcacggcgnngcacgcgcgggggggangnnnnngnnnnngnnnnnnnaaaagttgagagncncctactgatgactactatagtcatgcatcatcaatantannnnnncntaaaaannnnnnnnnngctgctaccggcngcatcgcggggagagtgataaattcggaagctntaacagtgttaataggnnnnnnnnnggtgtacaatatatacatcnnntnncttcgccggtatcaatcatnnnncacncccgcctgnnngncccgttgnncactatataacnnnnncnnnnncnnnncttaaattnnnnttcctatnnnncgnntantnnnntnngaaaaagcgggtnagnactggctggnacnnnnntnnnnntggggacgggggngttccgtgccnnttctcgnnnnnnnncnnncantgcnncgggctnnnnnnnnngcgttcgggccncggcacttttgnncnngganagnnannnnannannnnnnnnggtngnggggcgngaccgcggggnncgcntnnancnnntggtgcggggcctcacagaatnaacaagtgctgcgcgggccgaggggggccggctctgcccttctattaaaggcaccccgcgcgncacntcagaggggcgcagcggcggcgaggcgacnggcgncgncggggcgcccgggcgagcgaatgtaccagaggtcagtcnagcnctctcctgccnncattaactatangcgtgattggcaggcggtagaacaggagataagaaagagnatgcgcggcgggtgacgcancatgccacgagatcgcgacgaaattataaatgatatagtgcgttaagcggcgatttcaggagggcatatcacatcaagtcccttcacatgagcatgtcgaataataaatataaaagaaggggtgagggctgttccggtgcaactagcttacgaaacataatatatggtggcgtaagaaacgtgacatatctctgccgctgaggcggcaagctagcgaattagacatatatggtgttctaccttctgttatgtcgacttattctattatatattagtatgtcacggtatgtatcggatagatagcgagaatattttatattatggtgggtagatgtaaacatcgttataatcaacggtgatgcactcttacattactactctgccgcgataaccccacgcgcgtgagggagagcggctcgccaactatagggatggaccttcataagggggtgggatcgccccgcgcgcctcccccctcggccgcggggttaatatggttgtaataatttaatgggattaacggtaggcgcggttgaatagaggagaaatggggacgagcgccacacaccac

SEQ ID NO: 343 - DNA, 1633 bp, Glycine max
  misc_feature (28)..(28): n is a, c, g, or t
  misc_feature (30)..(31): n is a, c, g, or t
  misc_feature (38)..(38): n is a, c, g, or t
  misc_feature (45)..(45): n is a, c, g, or t
  misc_feature (52)..(52): n is a, c, g, or t
  misc_feature (69)..(69): n is a, c, g, or t
  misc_feature (75)..(75): n is a, c, g, or t
  misc_feature (87)..(87): n is a, c, g, or t
  misc_feature (95)..(95): n is a, c, g, or t
  misc_feature (100)..(102): n is a, c, g, or t
  misc_feature (107)..(108): n is a, c, g, or t
  misc_feature (110)..(110): n is a, c, g, or t
  misc_feature (113)..(115): n is a, c, g, or t
  misc_feature (118)..(124): n is a, c, g, or t
  misc_feature (129)..(129): n is a, c, g, or t
  misc_feature (221)..(221): n is a, c, g, or t
  misc_feature (232)..(232): n is a, c, g, or t
  misc_feature (263)..(270): n is a, c, g, or t
  misc_feature (353)..(353): n is a, c, g, or t
  misc_feature (404)..(404): n is a, c, g, or t
  misc_feature (550)..(550): n is a, c, g, or t
  misc_feature (741)..(741): n is a, c, g, or t
  misc_feature (880)..(880): n is a, c, g, or t
  misc_feature (1028)..(1028): n is a, c, g, or t
  misc_feature (1035)..(1036): n is a, c, g, or t
  misc_feature (1039)..(1039): n is a, c, g, or t
  misc_feature (1043)..(1043): n is a, c, g, or t
  misc_feature (1164)..(1164): n is a, c, g, or t
  misc_feature (1175)..(1175): n is a, c, g, or t
  misc_feature (1219)..(1219): n is a, c, g, or t
  misc_feature (1284)..(1285): n is a, c, g, or t
  misc_feature (1410)..(1410): n is a, c, g, or t
  misc_feature (1413)..(1413): n is a, c, g, or t
  misc_feature (1417)..(1417): n is a, c, g, or t
  misc_feature (1421)..(1421): n is a, c, g, or t
  misc_feature (1434)..(1434): n is a, c, g, or t
  misc_feature (1448)..(1448): n is a, c, g, or t
  misc_feature (1548)..(1548): n is a, c, g, or t
  misc_feature (1559)..(1559): n is a, c, g, or t
  misc_feature (1633)..(1633): n is a, c, g, or t
  Probeset Number=SeqID_10122
aggcgtgttaaagacggagtgggggggngnngctgcgngggtgcncacccanatgcgtacgcgctgtgnctgcgnctctggtcaggngtgcggcncagtnnntaatnntnaannnaannnnnnntaaantatcatacactacatgagaacagtatttataaataataatactgcatagacagtaggtcataataccataaccatgatagctgatgacgtcnacgcgaactcncattaaaacaatatcacacacacgctactgnnnnnnnntgtgcgctgcgcgtctgcgccgtggacccgtgagcggctcgtgtcgtgcgcggcgtagcggcggcggaggagaggggcgcggngtagagttgtgtgtggtctgatgcgcgcggagttctagtgcctgtggtgtntgtccatcggtatgtgtgcgcgacggatattgtgtcgcgttgctgctcacacaatacgctcgctcgcgcgcccgcgcggcccagacatatacatgcactgaattatattcttgtgcatggtgagaactataagatagactgcacgnggtaatgagtactatactattagttaagactgtatatgtagtggtgatgtatattgatagtgagtgtaatctatagcatcaccatcgtcgtcgtcttctgacgtcgccgcttgctgctgtgtggtgcgtctggtcttgttgttggtgcggttggcttgtctggatgtcggcttgtgttgtgcatatctttntgtgtggttcgattttatttgtttactatcaccatgagatgtggatatgtctgaggaggcacgctatcgatgtgtacgcgcactgtgcgagacaccgcacggaagccgcagcgaagtgagacgacgggatgacgcggcntagacggacgatgaaggagagaggtcagtcggctgatatctctgaatatacacgttgacgagtgattacatagtagtctagtataaatcaattgtacgcgcactacgccgtcgaggtatacgcgcgctacgtgaagttattgtcgatngtactgnngtngtgntcgcgcgcttgtgattatgtctgctctgtctgcagtctatatgactgctgtgttatcgcgaatgagaatactgtggtgtagatcgcgctaactgcgtcgatatgtatatgaatcatcaagncagtattactnctcatagtacgtcacggtataggacaacttagacacggacagcngacgacctgcgacatggagactagacgcgtcgctcggattactgtgtaatagtgtcatgttgtgnngatagatctcctagtatgtactgatcaccgctgacgcgccgcacgacacgcgcggtgacagatcacacgtacgcgagcagtaccacgagatatcgatagaggatgatataccacgcacgacatanganaganatantcgtgggagatgnagtgcacaggcatntgagtactgtagctctatacctacacatcacatcgcgcacactgctcatatagacacctacaagccactacataatcacatatcatacgtgatactatgngcgctcagcantcggactatacctattatgcccagacctccttccgcgcagctaccacaccatgactcagaaacacccctacacn

SEQ ID NO: 344 - DNA, 2205 bp, Glycine max
  misc_feature (1)..(1): n is a, c, g, or t
  misc_feature (5)..(5): n is a, c, g, or t
  misc_feature (10)..(10): n is a, c, g, or t
  misc_feature (18)..(18): n is a, c, g, or t
  misc_feature (24)..(24): n is a, c, g, or t
  misc_feature (30)..(30): n is a, c, g, or t
  misc_feature (36)..(36): n is a, c, g, or t
  misc_feature (40)..(40): n is a, c, g, or t
  misc_feature (198)..(198): n is a, c, g, or t
  misc_feature (215)..(215): n is a, c, g, or t
  misc_feature (319)..(319): n is a, c, g, or t
  misc_feature (327)..(327): n is a, c, g, or t
  misc_feature (331)..(331): n is a, c, g, or t
  misc_feature (338)..(338): n is a, c, g, or t
  misc_feature (371)..(371): n is a, c, g, or t
  misc_feature (400)..(400): n is a, c, g, or t
  misc_feature (412)..(412): n is a, c, g, or t
  misc_feature (432)..(432): n is a, c, g, or t
  misc_feature (464)..(464): n is a, c, g, or t
  misc_feature (467)..(467): n is a, c, g, or t
  misc_feature (547)..(547): n is a, c, g, or t
  misc_feature (603)..(603): n is a, c, g, or t
  misc_feature (650)..(650): n is a, c, g, or t
  misc_feature (678)..(678): n is a, c, g, or t
  misc_feature (681)..(681): n is a, c, g, or t
  misc_feature (699)..(699): n is a, c, g, or t
  misc_feature (710)..(710): n is a, c, g, or t
  misc_feature (810)..(810): n is a, c, g, or t
  misc_feature (836)..(836): n is a, c, g, or t
  misc_feature (857)..(857): n is a, c, g, or t
  misc_feature (864)..(864): n is a, c, g, or t
  misc_feature (886)..(886): n is a, c, g, or t
  misc_feature (902)..(902): n is a, c, g, or t
  misc_feature (908)..(908): n is a, c, g, or t
  misc_feature (954)..(954): n is a, c, g, or t
  misc_feature (966)..(966): n is a, c, g, or t
  misc_feature (968)..(968): n is a, c, g, or t
  misc_feature (1029)..(1029): n is a, c, g, or t
  misc_feature (1031)..(1031): n is a, c, g, or t
  misc_feature (1068)..(1068): n is a, c, g, or t
  misc_feature (1091)..(1091): n is a, c, g, or t
  misc_feature (1113)..(1113): n is a, c, g, or t
  misc_feature (1198)..(1198): n is a, c, g, or t
  misc_feature (1225)..(1225): n is a, c, g, or t
  misc_feature (1412)..(1412): n is a, c, g, or t
  misc_feature (1495)..(1495): n is a, c, g, or t
  misc_feature (1537)..(1537): n is a, c, g, or t
  misc_feature (1822)..(1822): n is a, c, g, or t
  misc_feature (1840)..(1840): n is a, c, g, or t
  misc_feature (1861)..(1861): n is a, c, g, or t
  misc_feature (1872)..(1872): n is a, c, g, or t
  misc_feature (1957)..(1957): n is a, c, g, or t
  misc_feature (1962)..(1962): n is a, c, g, or t
  misc_feature (1965)..(1965): n is a, c, g, or t
  misc_feature (1991)..(1991): n is a, c, g, or t
  misc_feature (2012)..(2012): n is a, c, g, or t
  misc_feature (2100)..(2100): n is a, c, g, or t
  misc_feature (2106)..(2108): n is a, c, g, or t
  misc_feature (2110)..(2110): n is a, c, g, or t
  misc_feature (2112)..(2112): n is a, c, g, or t
  misc_feature (2114)..(2116): n is a, c, g, or t
  misc_feature (2118)..(2118): n is a, c, g, or t
  misc_feature (2120)..(2123): n is a, c, g, or t
  misc_feature (2136)..(2137): n is a, c, g, or t
  misc_feature (2144)..(2144): n is a, c, g, or t
  misc_feature (2146)..(2146): n is a, c, g, or t
  misc_feature (2156)..(2156): n is a, c, g, or t
  misc_feature (2166)..(2166): n is a, c, g, or t
  misc_feature (2171)..(2172): n is a, c, g, or t
  misc_feature (2174)..(2174): n is a, c, g, or t
  misc_feature (2178)..(2178): n is a, c, g, or t
  misc_feature (2185)..(2185): n is a, c, g, or t
  misc_feature (2188)..(2188): n is a, c, g, or t
  Peptide Sequence Number=SeqID_6908
  Probeset Number=SeqID_10123
nccgncttgntgacatcnagctgnctgctnctagtnacgnatcgtcacaatcatttatctgcagtgtcgtcgccaaataatttatatattcatatactggttgttgcatcctatgatgatacatactgctcagctactcgcgtgagtgatgacattatgcgcgtgattcgtattatgtagcgtgagtcattatgcgtntcatagtcatgtttgtncgctctagagatccgatgatcagaaggatcgatgagcacagttataacagacacttagacgatagacagtgtacagactaatacgcatcgattcacacagaggngcgaggtncttncgtgctntcactagatgtgtctgtatagctggtcaaagtncatcatgtgctaagtgctgtgctgacatngtgatctgagtnatagacgatgagacgaatantataaatacgagagtgacagagagtatgtagnatncgatcatagacgactcagattcatcatgacgacgagagcagacaagcgcaacagtagtacagcataggatcaacatggancaatacgtggtagtagacgcgagacagaagtcgcaagcacacatcgtgtccgacanagcacgtagcatgcgcgtatacccatgagagtcgatgtagtcacatnttattcgctgcagcatagtacttcgtcngcngtcccaacacatgcgtcnacgccgagtcncgcatcgagcacagtcgaagccataggacatatacgcatcatgctacgtagctgcgcatagttagcatgtcggcaactacgtggtcatcagcgacacaanctcgtagcgagtacgtgacgtcagtntacatcctagcgtagttgctnctagcgntagacgagctgacgtacatgtntcgtacgtgtagtagncgtacntcgagatattatcctgcatagtacacatacatatcacaagtagtantgctgtcaatancncacgcagcatcgatgctatatattcgatgcgagaccattactctgttagtcgtcagtgctnantatagattgaatatagtcgtgcaatacatcgtcagtntatatacttgacatgatatagangctatcaacctacatctatgcncatatatacatgagattacatgcatgtcacagtatacgtatgtcacttcgatcatgcgagccactatatagtacagcacgcctcntcgcgtcatgcaggcacctcagactancggccgatctgcgagttaaatacgcgcagcatccgctcgacagacataccgcacagcaccactcgccgaacgagacagcgtagagacagaacgataccggtcgtcgagacaggtcatagcactatagtgctacaaacgtgagcgcatgtgagtcaagcctcgcgagcgtgccgcagccgtctcgagnacgtcgagagcgagccgactcgacactccagcaccatcggtactaacagtacacagacttgacacttcatccctacacctcgnatcaacatttagactgcgatgcactcacatacatctcaactnatactactagtattatattcatcataccatgaataaagacatagtggaagtgtcaagtacaaaggagagaggatgtgtaagcgcgagagaaggtgcattaggtaaagatataagagaatgaagtggagagtaagaaagaagtagttgagtacagagaggattgggaaacgacgcatagcactcagacaactaacacagagattacgcacatcaacatatatagcaacatcgcacagcacaagcacaccactcaggcgagatatcgctgcattctgtcccacatangtttccacgtgcacgccncatgcgcattcgacctcagantaactcatacntctctccagtcgcgctcactcgatgcgacttatattatatactcctctcatctcacgacgttagatcagggtgccgctgaggcgncgcgnggngtcccgtgccgccagagcagacgagnagcgagcaacatagtacagcnacgtacagcgcgcactcgcgcccctaactaccctctcctacgagaaggggggagagctctctccggtgactcgcatatctctcctttntgctcnnntncntnnncngnnnnaaaaaacacaacnnaaagacntngattcactanatcaaaaatnaaaannanaaanaaaaaanaanaaaaaaaaaaaaaaaaa

SEQ ID NO: 345 - DNA, 1501 bp, Glycine max
  misc_feature (19)..(19): n is a, c, g, or t
  misc_feature (21)..(21): n is a, c, g, or t
  misc_feature (35)..(35): n is a, c, g, or t
  misc_feature (39)..(39): n is a, c, g, or t
  misc_feature (41)..(41): n is a, c, g, or t
  misc_feature (44)..(44): n is a, c, g, or t
  misc_feature (53)..(53): n is a, c, g, or t
  misc_feature (61)..(61): n is a, c, g, or t
  misc_feature (106)..(106): n is a, c, g, or t
  misc_feature (108)..(108): n is a, c, g, or t
  misc_feature (110)..(110): n is a, c, g, or t
  misc_feature (132)..(132): n is a, c, g, or t
  misc_feature (193)..(193): n is a, c, g, or t
  misc_feature (270)..(270): n is a, c, g, or t
  misc_feature (278)..(279): n is a, c, g, or t
  misc_feature (289)..(289): n is a, c, g, or t
  misc_feature (359)..(359): n is a, c, g, or t
  misc_feature (370)..(370): n is a, c, g, or t
  misc_feature (418)..(418): n is a, c, g, or t
  misc_feature (567)..(567): n is a, c, g, or t
  misc_feature (589)..(589): n is a, c, g, or t
  misc_feature (628)..(628): n is a, c, g, or t
  misc_feature (693)..(693): n is a, c, g, or t
  misc_feature (740)..(740): n is a, c, g, or t
  misc_feature (852)..(852): n is a, c, g, or t
  misc_feature (868)..(868): n is a, c, g, or t
  misc_feature (874)..(874): n is a, c, g, or t
  misc_feature (897)..(897): n is a, c, g, or t
  misc_feature (909)..(909): n is a, c, g, or t
  misc_feature (931)..(931): n is a, c, g, or t
  misc_feature (982)..(982): n is a, c, g, or t
  misc_feature (1027)..(1027): n is a, c, g, or t
  misc_feature (1031)..(1031): n is a, c, g, or t
  misc_feature (1047)..(1047): n is a, c, g, or t
  misc_feature (1073)..(1073): n is a, c, g, or t
  misc_feature (1115)..(1115): n is a, c, g, or t
  misc_feature (1126)..(1126): n is a, c, g, or t
  misc_feature (1160)..(1160): n is a, c, g, or t
  misc_feature (1165)..(1165): n is a, c, g, or t
  misc_feature (1171)..(1171): n is a, c, g, or t
  misc_feature (1207)..(1207): n is a, c, g, or t
  misc_feature (1246)..(1246): n is a, c, g, or t
  misc_feature (1252)..(1252): n is a, c, g, or t
  misc_feature (1264)..(1264): n is a, c, g, or t
  misc_feature (1299)..(1299): n is a, c, g, or t
  misc_feature (1310)..(1310): n is a, c, g, or t
  misc_feature (1313)..(1313): n is a, c, g, or t
  misc_feature (1327)..(1327): n is a, c, g, or t
  misc_feature (1345)..(1345): n is a, c, g, or t
  misc_feature (1355)..(1355): n is a, c, g, or t
  misc_feature (1429)..(1429): n is a, c, g, or t
  misc_feature (1478)..(1478): n is a, c, g, or t
  misc_feature (1493)..(1493): n is a, c, g, or t
  misc_feature (1499)..(1499): n is a, c, g, or t
  misc_feature (1501)..(1501): n is a, c, g, or t
  Probeset Number=SeqID_10124
ggttggttgttgtttttcngntgttgttgtgtggnttgngngtngttatgctntctcttcntgactactacgctaacgctatcgtaatatcgtgtctacagtatgnantncacaactacacacgacacaacncatgaacacacccgtctgcagccactagtagagaatagaatgatgatagtagagatgtgtngtatatactactacactcactataccgctgtgctctgcgctccacagcaggccacgtagagtgcgttgatcgtgcgnttattaannacaagtatgnattatctcacttacacgacactcgtatgatacgatatgtacgcagatcatcaaagcgactatatgtcgtnccgcggcagcntcgcgctgtgtcgatcgctcactgcacatgcttcgcaagtacggagcntgtctgcagtacgtgaaagcgcagagcgagacaccagtcatagtagacaaggaagcaggcgagtacagtgtcgtcgcgtgcgctaacgatgtgatactgatgtagactatacacgtgtcgtgagcagatatactcataagtatatgtanacatacgtgtcatagaaggtcncgctactctatccgagtcggtcgctcgatgcatatgctntcgtgctcgtcatgcctctcagcgtcgctgcaggagagtgagtagtcgtctgtgatgagctgtcnctgcattgacactcgctactgctgtttagactgatcgtatcgtcgcntatcacgccgaagatgacagatgcatgattcgatgaggtcagtgtaggttactagtagtatgactattgtagtgtcgacaagtatgctgtagcagtagtgcgactgaagtgncgcaagacgtatagantgtgantgagagaagatgacacagaagantgcgtgagttgntctcgtgatctgcacgcgcgtnctgcccgtgctgcgtcactgtcgcgacagtgtagaaggtagcgagagtganatgatgatggacagactgagctgatagataccgtaagcattcacncccnatcatctcatgctagnatagctaagtgtgtgtggagatcatnctatgccgcagcgtgagcatgagagtaagtgagcttcgtctnacgcgcaacgncacgtactgagcgtgcgcgtctcaagtgtgatantgatnagatanagctcatcatcgaagcgatgcgtctatgtgagtgtntgctagttacgcgactgagtcatcgcagacagcgagcgnagaganctatgcatacanagcagtcgactgtcgcctcgctctggtgctgtgcncgatgtgaganagngagtgcgtgtgtgnagcatcactgtgagcagntgtgtagtancactagtcgagctctgtcgatagtgtagagtgcgatgagaggacatgatgatgtagtgtagaggaacgtcgagncagatgtgactgatattagtgagtactgtggcgtgagactagtgaatgncgctgctgtcgcgcncagatncn

SEQ ID NO: 346 - DNA, 442 bp, Glycine max
  misc_feature (11)..(11): n is a, c, g, or t
  misc_feature (57)..(57): n is a, c, g, or t
  misc_feature (91)..(91): n is a, c, g, or t
  misc_feature (174)..(174): n is a, c, g, or t
  misc_feature (193)..(193): n is a, c, g, or t
  misc_feature (246)..(247): n is a, c, g, or t
  Peptide Sequence Number=SeqID_6909
  Probeset Number=SeqID_10125
aaaaagagggnctctccaaggaacgacagcagcagacacaggaggaacccgaggaanagggcaagacaacggagaagagaaaggggagagnggagaaaaaggacaaacacgagcacgcaaacaagaagaaacagacaagcggcgagaacagaggaaaaggaagggactcaaggngaccgcgccagaacgcganagacaaaggagagaacaacgaaaaagaaaaggggaaaccgtttttttcactanngacggaaaggtaaatattctaatgaagaatgctgctacaaatataagaaagaagataacagataacacagaagaggatatatcgagaataatgggcacgaaatttgagtcaagttaccatttgggtgaagttgaaaacgcatttctaaaagaatgtgggaatgagagcataagtattatttcgtccggaaaagga

SEQ ID NO: 347 - DNA, 497 bp, Glycine max
  misc_feature (99)..(99): n is a, c, g, or t
  misc_feature (270)..(270): n is a, c, g, or t
  Peptide Sequence Number=SeqID_6910
  Probeset Number=SeqID_10126
aaaaagaaattgttcaagaattggacttggattctgccatcagaagagtccttaaggctgcctctttcagagacaacctcgctaaaggtcttcacgaanttctgcaaggccctcgataacagaaagaagcctgctctctgcttgttggctgacaactgtgacgaaccccaatacaagaagttggttgaagccctctgcaaggaaaacggcgtccccctcatcagagtccccgatggcaagcaaatcggtgaatggatcggtctttgcaantttcgatgctgccatgaaccccagaaaggtcagaaagtgctccagttgcgtccttaaggccttcgctatcgatgatgaagctgccaacctcgtcagagaagctattgccaagaacagcgaaatccaactctcctaaataattacaacatctcgttttgatttttaggttcatcctcaaagattcattgtatgggactatgctttctttttcataaatttggtgtagt

SEQ ID NO: 348 - DNA, 1969 bp, Glycine max
  misc_feature (1)..(1): n is a, c, g, or t
  misc_feature (1969)..(1969): n is a, c, g, or t
  Peptide Sequence Number=SeqID_6911
  Probeset Number=SeqID_10127
ntgtctctgggtctgctaggttggttaggggtaggtcaatgagtgatagattgggaatagggcgggggggagagggggggggtggggcggggagagggggtggggtatggtagctctttgaggtaggggcggggggggtggggtattggggaggtgtgggggccgcttggcgcctgcttgtgggaaaagccttccgcgggggggcagtaggactgcagactggcgttggggactcgagggtgagagtgatgttgaattgagattttgggggcccatgatcagtgggctagggagtggtgcgggtggcgggtacaacaggggggtttgtggtggggcaattggttaatgggggtggatttagggtggtggtacggagaatgacgcctttccgtcgtgggggaagaggggggcggaggtgcaggaaaagtagtgacgcaaggctgggaacttggtggggagatgtgggggcttgctgggggcaagttaagaagtggtgatgttgtagatctactcagtttctgctccagggttggcggatgttggaacggtggtgaaaagacgggccagatggtgggtgagggtgaccgataggggggggaaggggttaccgggcccccccctggagtcagttgggtagggcccccccccccaaccagaattaagatttaaagtgtgcacactaaattaaattttcgttttgtttcgatatttctcatgagtttaagtggcctctttagaacccaatttcttcaatgtgtcagcagcactcctttgagaaaaaaaatccccaaggtctctgctaaaactctcagaaaaagaaaggaaaaaaagagactctcttacatcaacgtctattctagtgaatataccggagaagctcctcttcatgcttggatggaccctaaaagagtcaaagccttaatgaccgcataccaagactctagaaatactcacagattcaatagaattgttgatcctaaagataaagagattattgaagaaaagaataaggaatttggtgacttctattatcacaaatggagagcagaactcctcagagaaaaccaacttttagccaaggctcgtgaagctttagatgaaataaacaaccttccttattatctcagagatgaaatgaatgtgaatagaggccccaagcttgatactgtcatccctgaaaaccatcactttataaatatgtataatgagcaaattctgagaacacatcctgaagaaatcgcaatcagaatgcaactcggtgaaagaattgagaaaattgttaatgatgaacttgagcaaggtgaataaaaattattgtaaggatccagagaatgtattggtagtattttgtaatgttattgttgctgcttactgtctttaacatcaaaaaaattatcatctcttgaaaaaaaaaaaaaaaaaaaaaaaaaaaaaaaaaaaaccgctgggctccatacgacaaccccaaagggggaactcgccgaaaactccgggggaaggggcttacttacatcacgggggacccgctacccagagattgaccccaacccttctggaggcatcggacttaaaggcagcaaagggggggcgcgatatcctgaggcaaaatcgccgggtccccaagcgggggagaacctagtacgtctgctatcctctaaggatgacaccacgcactctcagtcgcccgcctcatatacttagttagaccccccgggggggccgaaacgctcgacggccgcctcaccaaatcagtagcagctgggcgagcgtgcccacatcttggatcgagccacaccgcttccgctgtacagcgccccgcatgcggcctcacgacgtgactcaaacactatcacagtcgcgctgaagaacatagatctctgtggcatgcactgctcatacggagcgaatcgctccccacacaccctgtgcgcagagcatccagttacttctacacctactgtacactccn

SEQ ID NO: 349 - DNA, 459 bp, Glycine max
  Peptide Sequence Number=SeqID_7005
  Probeset Number=SeqID_10128
ggacgacttgaccaaaatgcgtcaagctactgcacaagttagttgcaatttttttttatctcttttgtttttggatttttttttataataaataaaaaaattatcgtatgttggtttgttttgttctttcgttcattatttattgttataattgttttgcttgtttgagtttttatgattgtacacgaactatttagctatataaactgactccaaagaagattcgtagtttcctctattaatgctatctcttgttcaattttatttttattgaacttttttgtttctttcttgaggtattggcatctcaaaagcgattggaaaataaatacaaagctgcacaacaagcttctgaagagtggtaccggaaagcacaacttgctcttcagaaaggtgaagaagatcttgctcgtgaagcacttaagaggcgtaaatcttatgcggataatgccagttctt

SEQ ID NO: 350 - DNA, 533 bp, Glycine max
  misc_feature (25)..(25): n is a, c, g, or t
  misc_feature (155)..(155): n is a, c, g, or t
  misc_feature (363)..(363): n is a, c, g, or t
  misc_feature (531)..(531): n is a, c, g, or t
  Peptide Sequence Number=SeqID_7006
  Probeset Number=SeqID_10129
ctcgcctttacaagctgtggcaaanctggaggagaagctcactctgctcttactgagtttgatgaggagcgagaaagacattaccccaatagggggggtccctcactatggggtggtgaagggggagtatatcatgggcaaggggtgctgcgttnggcccaaaaaaagggggattacattgcgccaatccctccttaagcagacttctcgtgtggctctgggggggagcaagctcaagtgtatcgacacctcttcaaaggttgggcatggggcggttccaaaccacacaggagaagcagaaggtctttgggcgcctcaaagcataattttgtgaattggggtgggatgcgtggtttctattcngttaccatatcttataaacatattggaggtgttctgtgttgagattatggggccccgagtggtgaggtttttccccccttaagtgtggcaaacttttgtggagactgagcttttaaaaaattccaaattgggtgagtttatatatattttcagtgtggagggagtttncg

SEQ ID NO: 351 - DNA, 1342 bp, Glycine max
  misc_feature (440)..(440): n is a, c, g, or t
  Peptide Sequence Number=SeqID_7007
  Probeset Number=SeqID_10130
accagcaaccaaaactcccttaaattttttcctgataaaaatcaaactcaccttaaccctcacaaccaaaaaaaatcctccaaaaattcaatgatataatactcacaaatatcaacaaggtctttcatacttgttgcataagaattacacaagctacaagacgaacatgtcatctctactacacatctgccttcgtactaaaaacatcaaacgaatgtatctctctcgtctgcgtttatttattattgaccccccatccttgtattctctgcccaccatcggtaataactgtcaaccacattgatatatttcccctccctcacttgttatgttggccggttgccatccccctcaggccccttaccccggcaaaaacaatcgcactctgactctcactaatttttctgtctccttccacaccccgcacaatccattctatntatatctctccccccacccccccccgccctaataatttactcccacaaaaattcatatatcaaacccccctatatcgtctcaccgaccgcgccacagagttattattaatatttgctatctcgcccccgcctccacgtcccctatatcccccctccccccctccccccctccatatacatccaattattaccccctgcacatgtccacctaccccgcacaatatatctcacttacaaaaaacgtgctcactaacgccaactctacattcccacgcacctttctcctgcctccacctatatgtaatattttccaccaccccccgtggtcacgctccacgtcgttcgtttaacgtctcaacgccacaccgacaccccgcgaccctctcttagtactattcacatcacgttcgcgatagggacacgccgcacaacttctactgatgactaccatatttattttaatactagccgtctcacgacgccgcgtcgtatgcccgaccgttaacatcctcatttacatattgtgaccatccgattttgccccaccgagccagcgtcaagtcaacccatacagacaaattgtgtgatcgccgctcgcggctcacatgataattactccataacaaccctgcattcaccgtataattccaccagttgccttatttccacctgtccacgtgttctccgccttctctcgggtagattctcggcactgatgaactcgtacactgctacacgtcgcgtatagtgatagacctcccacattacacatcgcaagttgatattaatcatatactctcgtccaatgttagctgccaccgccggacgagcacttatactcgcacacccgctcaactagtatgctcagcccacgaaagtagcgtctacttagcaaactactg

SEQ ID NO: 352 - DNA, 1335 bp, Glycine max
  misc_feature (8)..(8): n is a, c, g, or t
  misc_feature (54)..(54): n is a, c, g, or t
  misc_feature (56)..(56): n is a, c, g, or t
  misc_feature (134)..(134): n is a, c, g, or t
  misc_feature (151)..(151): n is a, c, g, or t
  misc_feature (160)..(160): n is a, c, g, or t
  misc_feature (167)..(169): n is a, c, g, or t
  misc_feature (174)..(174): n is a, c, g, or t
  misc_feature (188)..(188): n is a, c, g, or t
  misc_feature (192)..(193): n is a, c, g, or t
  misc_feature (201)..(201): n is a, c, g, or t
  misc_feature (215)..(216): n is a, c, g, or t
  misc_feature (223)..(223): n is a, c, g, or t
  misc_feature (225)..(225): n is a, c, g, or t
  misc_feature (237)..(238): n is a, c, g, or t
  misc_feature (248)..(248): n is a, c, g, or t
  misc_feature (250)..(250): n is a, c, g, or t
  misc_feature (253)..(254): n is a, c, g, or t
  misc_feature (257)..(257): n is a, c, g, or t
  misc_feature (260)..(261): n is a, c, g, or t
  misc_feature (264)..(264): n is a, c, g, or t
  misc_feature (267)..(267): n is a, c, g, or t
  misc_feature (275)..(277): n is a, c, g, or t
  misc_feature (283)..(283): n is a, c, g, or t
  misc_feature (285)..(286): n is a, c, g, or t
  misc_feature (299)..(299): n is a, c, g, or t
  misc_feature (304)..(304): n is a, c, g, or t
  misc_feature (306)..(306): n is a, c, g, or t
  misc_feature (309)..(311): n is a, c, g, or t
  misc_feature (321)..(322): n is a, c, g, or t
  misc_feature (344)..(345): n is a, c, g, or t
  misc_feature (348)..(348): n is a, c, g, or t
  misc_feature (354)..(354): n is a, c, g, or t
  misc_feature (357)..(357): n is a, c, g, or t
  misc_feature (368)..(368): n is a, c, g, or t
  misc_feature (379)..(379): n is a, c, g, or t
  misc_feature (381)..(382): n is a, c, g, or t
  misc_feature (384)..(384): n is a, c, g, or t
  misc_feature (391)..(393): n is a, c, g, or t
  misc_feature (396)..(397): n is a, c, g, or t
  misc_feature (404)..(408): n is a, c, g, or t
  misc_feature (414)..(414): n is a, c, g, or t
  misc_feature (416)..(419): n is a, c, g, or t
  misc_feature (422)..(423): n is a, c, g, or t
  misc_feature (426)..(426): n is a, c, g, or t
  misc_feature (429)..(430): n is a, c, g, or t
  misc_feature (432)..(432): n is a, c, g, or t
  misc_feature (444)..(444): n is a, c, g, or t
  misc_feature (452)..(453): n is a, c, g, or t
  misc_feature (455)..(456): n is a, c, g, or t
  misc_feature (463)..(464): n is a, c, g, or t
  misc_feature (466)..(466): n is a, c, g, or t
  misc_feature (468)..(470): n is a, c, g, or t
  misc_feature (472)..(475): n is a, c, g, or t
  misc_feature (480)..(481): n is a, c, g, or t
  misc_feature (483)..(483): n is a, c, g, or t
  misc_feature (485)..(485): n is a, c, g, or t
  misc_feature (492)..(494): n is a, c, g, or t
  misc_feature (551)..(551): n is a, c, g, or t
  misc_feature (555)..(555): n is a, c, g, or t
  misc_feature (574)..(575): n is a, c, g, or t
  misc_feature (579)..(580): n is a, c, g, or t
  misc_feature (582)..(582): n is a, c, g, or t
  misc_feature (588)..(588): n is a, c, g, or t
  misc_feature (598)..(600): n is a, c, g, or t
  misc_feature (619)..(619): n is a, c, g, or t
  misc_feature (622)..(622): n is a, c, g, or t
  misc_feature (658)..(658): n is a, c, g, or t
  misc_feature (680)..(686): n is a, c, g, or t
  misc_feature (697)..(697): n is a, c, g, or t
  misc_feature (707)..(707): n is a, c, g, or t
  misc_feature (710)..(712): n is a, c, g, or t
  misc_feature (718)..(718): n is a, c, g, or t
  misc_feature (720)..(720): n is a, c, g, or t
  misc_feature (722)..(725): n is a, c, g, or t
  misc_feature (746)..(746): n is a, c, g, or t
  misc_feature (748)..(748): n is a, c, g, or t
  misc_feature (751)..(755): n is a, c, g, or t
  misc_feature (759)..(759): n is a, c, g, or t
  misc_feature (761)..(761): n is a, c, g, or t
  misc_feature (788)..(788): n is a, c, g, or t
  misc_feature (804)..(804): n is a, c, g, or t
  misc_feature (867)..(867): n is a, c, g, or t
  misc_feature (872)..(872): n is a, c, g, or t
  misc_feature (963)..(963): n is a, c, g, or t
  misc_feature (982)..(982): n is a, c, g, or t
  misc_feature (1278)..(1278): n is a, c, g, or t
  misc_feature (1309)..(1309): n is a, c, g, or t
  Probeset Number=SeqID_10131
ctttctcnatatactatgtacatgtagcgcgagtcatagttttgtcgcagatangnagacagtacacccatctcgcgacacttatctctgtgtatatcgataactatttagggaatctctacgacaattgtcgngtagaacctcctgggcncacacgatnacaccgnnnccgancgaccccagaaacnagannccaattgntaatatgccccacnnatgcctntncaccgtccgttnntttcccactncncannccnacnncangcngtcctttnnnttagtngnntttagaaaatccncatananatnnnacgaccctcnncctgtctctccttgtttccacnncanttgccnggnccagctctcgntctcccgttgntnntngagttgnnngtnnatttttnnnnncataantnnnngcnntcnacnngncttcccctcctntccacccnncnnatgttcnntngnnngnnnncgggnngngnggggggnnnttggccaacagcaatacatatacaaacaaataaacaatacatcactccacccccacnccanacccggggcggcggggggnnggcnncnctcccnccccacttannnaaacatttacacccccaancanaacatccctacacactcacaccacaccatccctacnccctctaacatctctacctcannnnnnncccaatttccncccgcgcacngannnttccanangnnnntcccaaaaccccatagcgtangnctnnnnnatcntnttcacactgtgggcgcccgagaacgcngcagttctcactgttnctggttattattccacagataatcttcttcaccctcgagacaatttgtagtgttgttgtcctnctgantactatacactaaggcaccactcctctaccgcgccgcgtgatgatatcttaatctataataatatctacatatctacacgcgcgccagcgnacacgtcatctcatctaanctctcaacatctatccttatccagagacgctatcattctccgctgataacatattcttaaatagatatctattatataccctgatagattagcgagtagcctcagcttgataatctcgtctctctcatcaacatgtaggtataacacatacacatcccgacagaacaacatacaagataatataatatacgctttcatgaataagcacctactgccgcctcctgaggaggcgggggctcccctccacttctcttctattcttgtacttcttctctgtttctactaatagagacggngtatctctatatattatatttatagattagngcccgcccatcacgaactacaatcac

SEQ ID NO: 353 - DNA, 420 bp, Glycine max
  Peptide Sequence Number=SeqID_7008
  Probeset Number=SeqID_10132
atgaccatgcatatgtaaatgtagcacaaacttacttacaaagcaagtgcttgattgtttattctttgttttcagtatgaacaattaatctaatattttagggcaagaactattgtgaatttgtacgtacatcatcaactattgtgaatttgtaccatttttaagtgaaagattaggaaagaaagcaaataaagcatcaaacgacctatgttttttatttagggtttagatatatggtatttaaaagagtttatttatatttataaaagtgatttataatatccttataaatttttactaagcccatttatctacatattgtaaagaaaaattgtcaagttttaatttattataatgattttataatttaacttattatttatttgataaaaatttattaaataaatagttactatttaa

SEQ ID NO: 354 - DNA, 1726 bp, Glycine max
  misc_feature (11)..(11): n is a, c, g, or t
  misc_feature (23)..(25): n is a, c, g, or t
  misc_feature (27)..(27): n is a, c, g, or t
  misc_feature (31)..(31): n is a, c, g, or t
  misc_feature (33)..(35): n is a, c, g, or t
  misc_feature (37)..(41): n is a, c, g, or t
  misc_feature (46)..(46): n is a, c, g, or t
  misc_feature (49)..(49): n is a, c, g, or t
  misc_feature (58)..(58): n is a, c, g, or t
  misc_feature (61)..(62): n is a, c, g, or t
  misc_feature (70)..(70): n is a, c, g, or t
  misc_feature (77)..(77): n is a, c, g, or t
  misc_feature (92)..(92): n is a, c, g, or t
  misc_feature (144)..(144): n is a, c, g, or t
  misc_feature (189)..(189): n is a, c, g, or t
  misc_feature (191)..(191): n is a, c, g, or t
  misc_feature (339)..(339): n is a, c, g, or t
  misc_feature (625)..(625): n is a, c, g, or t
  misc_feature (816)..(816): n is a, c, g, or t
  misc_feature (867)..(867): n is a, c, g, or t
  misc_feature (869)..(869): n is a, c, g, or t
  misc_feature (871)..(871): n is a, c, g, or t
  misc_feature (949)..(949): n is a, c, g, or t
  misc_feature (978)..(978): n is a, c, g, or t
  misc_feature (985)..(985): n is a, c, g, or t
  misc_feature (1018)..(1018): n is a, c, g, or t
  misc_feature (1078)..(1078): n is a, c, g, or t
  misc_feature (1083)..(1083): n is a, c, g, or t
  misc_feature (1137)..(1137): n is a, c, g, or t
  misc_feature (1263)..(1263): n is a, c, g, or t
  misc_feature (1313)..(1313): n is a, c, g, or t
  misc_feature (1412)..(1412): n is a, c, g, or t
  misc_feature (1441)..(1441): n is a, c, g, or t
  misc_feature (1590)..(1590): n is a, c, g, or t
  misc_feature (1628)..(1628): n is a, c, g, or t
  misc_feature (1643)..(1643): n is a, c, g, or t
  misc_feature (1699)..(1699): n is a, c, g, or t
  Probeset Number=SeqID_10133
tttttttcccnccctcctctccnnnancccncnnnannnnnaaaanaanaaataaagnaannaaaacagncagaaanagacaccactaaganataattacagtcgtcatcttgcggagttatatggaagagatgagaaagagtnttgtatgagagagagggaaggtaatagtagaatattaagacagcnanactagtgtcgtcactcggtagatagtgagctatcgatccaggtagtgagatcacaaaataaagataatatgagagaatatatactgcgctgctctggttattatggccggtcgaggtgataatgtaatctctggtgtggatagctatngcgtgtatatactgctagcgtggcgtgtatattgtgtgtcgtttgtggtgtttatcttcgaggttgctgtgcgtccttaggtgcgctcgcctgcgtttcacgacatccgcctaattgtgtcctctcgttgtagttattattaacactcatcacttttatctccatatgttctcgtgagatgtattatatctgttattctcgtaatgtgttgtgttgttgtcgtgtgtgttcatgtgtccgcgcgcgcgtgtggtgcttcgtcgctttgcgctcatactgtgtgttntatgttctcctccgcgatctcttggtcggcgcgtgtcagcgtcatctgtgtgtagcaacatgtgaagatgacgtcgcactgcagatcgaggtgatgtgtaaagatgtgtactgcggactctgctagattactccgctgtggcatacgaaccagcagagatcctacgtacggggcaacgattaagatggtgnacgctacactagtgtgagagtgacgcgttgcggctcagatgtcttagtagncngntgcgtatctcttcatcagcacggccgtgcacgcgtagacgatgtacgatcctcgtagcgctatcccgcactcgtaagngacgctcgccccgacgtaccgctcagtcncgctctncatctctcccatattctacacacatccccactncacactcgcaaccgccacctcgcaaaactactccacattatgatctactctatcaaatangtgtntagagatgggtatctctgtgtgatcatatgtgttacaatatatgtgatgtgctntcactatcacgtcactatatatctgatctacattcacttacatatgatgacagtttagcatcatatcaagtgctcacttgtactaatagatatcattgatatcatatcaacctttacaacatgtcnatgatagttagacatcgtttattatgcgcaatatagtacgagtcgagtcnagttatagatatgaagcagcggctcgcccgtgtgtgccatgttcgtacatgcactcatgcatacacgggatctagcgagtaaagacgtgagaatatagncgtcagtatgttacacgaatagatagatngtgacactcatattgagacgatggtcatgcgtagatatcctctctatctcacgttctattgcttacgaacatcttcgattgcacaacagctcgtggatcgtacatatacatatataccgagcacacacattgtacataccacgacagantagtcatgtgatcagactgttgatgaatccagataacnagcatcaatagaatnatatagatatatatgttataactataaacacacccaacacacgacagatagtgtanaacatcagacgtatacgcagcagagag

SEQ ID NO: 355 - DNA, 198 bp, Glycine max
  Peptide Sequence Number=SeqID_7009
  Probeset Number=SeqID_10134
ccttcaacaggcgtgatgataattgtctaggtaaccacttagaaatcatcatgcagatcttcgtcagaggtcaggagaccatctcccttgatgtccaaccttttgactcggttgagactgtgaagacccagattcaagagagagaaggcattcccgtcgaccagcagaggttgatcttcgccggaaagcagttggagg

SEQ ID NO: 356 - DNA, 1499 bp, Glycine max
  misc_feature (77)..(79): n is a, c, g, or t
  misc_feature (174)..(174): n is a, c, g, or t
  misc_feature (228)..(228): n is a, c, g, or t
  misc_feature (264)..(264): n is a, c, g, or t
  misc_feature (279)..(279): n is a, c, g, or t
  misc_feature (428)..(428): n is a, c, g, or t
  misc_feature (480)..(480): n is a, c, g, or t
  misc_feature (554)..(554): n is a, c, g, or t
  misc_feature (745)..(745): n is a, c, g, or t
  misc_feature (957)..(957): n is a, c, g, or t
  misc_feature (1052)..(1052): n is a, c, g, or t
  misc_feature (1211)..(1211): n is a, c, g, or t
  Peptide Sequence Number=SeqID_7010
  Probeset Number=SeqID_10135
taatgtggtagcgtaggggaatgtgtttgtggtattagacgaggcgagaagaagaggattctacactaaacatatannntagaataaatataggatgaatactctgataaagtataacccgagtggtggaggggggccctccccccctcccgatgaaacaggaataaataaaantggaacagaagaccgaaggaaacagatatgcggagcagccgaataacgccagangatatatactatactctatatattataacaagacgngttccgtgtgagtgngctctatctagtcacacttctgtaatattatcgatcgctcacacacccagcatatatgtctaacgatgattgatgaataatgcaacattcatcatcacgcctccgtagccctctccaggagacatgctgaaattaaacataagataatngcgtataataaataagagaacacatgaaatcgcccgctgtgtcgtcgccgcncacgccaacgtacatcgcaatctgccgcggtcggtccgcggtaggacgtgaagtgagggaacgaaggtagcacnacaccacacaccacaaaccgcccaaatatattcgttatatagacaattgctacgtattcacttctctctcccctgcttctctgtctgatcattcttgtcactcccttgttagtcgcctcgactttgttgttgctcccatctctaccttcttattatactcataccctcatgcaccactcttcccattctcnctcatctaattacacacacactaccaaccgaacagccaccacaccaatataataacgatctcactcccaacagatagatcatgatatacatcgagcagagtgtcgccgacttgtgtaatgatccacaacattatgaggatagaaggtagtatgagaaactctggtcacgcagccatttagtgcttcagtctttgttgatataacgctcctgnaactgctctcatctatactctcatgatgagatgattcattacctatactgagaatcataatatcttagagatacacaacaaacatgcccgcgacngaacacgtcatgaaaggacatgatgtcgcacttacgtcgctcgtgatgcacgcaagatattgttgtagaccaccacacctcgcaccatcatcacacacacgtgagtaaagtagagattgtattatgcgcgagccgcacgctctgaataaatcacatcancgataatgctcgtggtcgtccacggctcaacgggagcagacgtctcgaactagaccgacgaacaacacaagacgggaaagtcgaaaccgacacgacgagacaacaaataccgcatacagcgcctcagacagagtggtagtagatgaacatccacattcaccactaggtctgagtaatctccctcaaattacatatcaacaagacatcgcgcttacgaactccgcttgcttgtaccactacccattactataatgtataactcacgatctctgctccattaacggtagt

SEQ ID NO: 357 - DNA, 232 bp, Glycine max
  Probeset Number=SeqID_10136
aaccgttatcatatccaccgggggaaaggctgctaagaagcaactcgacaccaaggctgcaaggaaatctgcgccgacaactggtggagacaagaagcctcatcgctatcgtcctgtaactgttgctcttcatgagatccgaaaataccaaaagagcacagatcttctgatccggaagctaccctttcagcgtcttgttcgagagattgcgcaagacttcgagaccgatttg

SEQ ID NO: 358 - DNA, 1830 bp, Glycine max
  misc_feature (799)..(799): n is a, c, g, or t
  misc_feature (830)..(830): n is a, c, g, or t
  misc_feature (904)..(904): n is a, c, g, or t
  misc_feature (953)..(953): n is a, c, g, or t
  misc_feature (1226)..(1226): n is a, c, g, or t
  misc_feature (1377)..(1377): n is a, c, g, or t
  misc_feature (1442)..(1442): n is a, c, g, or t
  misc_feature (1477)..(1477): n is a, c, g, or t
  misc_feature (1496)..(1496): n is a, c, g, or t
  misc_feature (1548)..(1548): n is a, c, g, or t
  misc_feature (1637)..(1637): n is a, c, g, or t
  misc_feature (1699)..(1699): n is a, c, g, or t
  misc_feature (1704)..(1704): n is a, c, g, or t
  misc_feature (1719)..(1719): n is a, c, g, or t
  misc_feature (1721)..(1721): n is a, c, g, or t
  misc_feature (1730)..(1730): n is a, c, g, or t
  misc_feature (1806)..(1806): n is a, c, g, or t
  misc_feature (1813)..(1813): n is a, c, g, or t
  misc_feature (1819)..(1819): n is a, c, g, or t
  Peptide Sequence Number=SeqID_7011
  Probeset Number=SeqID_10137
attatttttgcttcttctctctctctcctccacactgttggcgtagtagaacgctcatccctccatacgcgacgcgcgagtcgtttgcacatatattcgatgtggtggaatgtgaagtgtcgaaggtgcaacagagcaggatcttgtgctaggcgctatagttcatgtggtattcagtgctgtcgcgtaagaatagtgtaccttcattgtgtctgatatattgtatatatgtcttttattgtgtatgagaactaagacatatcacaacacgtcgtatgtagtttgatacgaggatcacgtggtgaggaagtacaggagtgcgcggtgtagcgttgtacagctatggaaggtatcgccaggtgtgtactcatgtagttatcgctgtcatgtgcgacgttatgtcgcgctcttgcatagacagctagtcatcgcgcggagtcgcctcgtgtgcgtacattcgtataatcgctggaggcggcgtgcgagaggcgagcatcagtacgatagcgatactattgacgcgatatgcctccagtgtatgtatcgtatacacatatgtagacgactactaacgctatgaaatagcagacgatgaatattgatacacacgctatgatacatactgctatttcagtcatcagagtgcaccgtcacaactcgacttatcgtgctagatgtaatttcacgcgttagattgtatcacggtactagtctatagcttgtggttacgctcgtcacgtgtacgttcacgtacggctcagtatattattgtctcgatcgtgtactgagcgatggtcgntgtcattgtgacgtgatgatcttatgatcgntatgatgtgctcatgtctggtcgaccgccgctgcgagttgctgctgtctactactatgtgttgtgctacgaggnatgtttcgcctcgtgtctatgcgttgatcgcgatctatccgtacctacncatctagaagtatccgtcgcaatgtcgtatgagactgctatctgcgcgttacttatcggtcggccgctactattgtattatattctatgaacatcgcgacctgatgcttatggatcttttcgtgtgatgtcagcgcgcccagtgctgtctgtaggtataaatcgccgtgcagaactgcagcgggtaagtcgatgtcgtgtcagaaatactgacgtgtgtgcgtgtgagcgcatatagctcatgacgagatacgttatcgcgatgcgatcactncgcgtctagctgtatatgcgaggtcgtcatattcgaggctgtagtgctagtctacgaatagtagttaatcaagcttgtgaatcacttgtatgtgcagctatctgctgagtgtgtgttctcgaccgcatgtccgtctcgtctctgacatctncttcgcagatgcaaccgcgttatgatctcctatagaagccacaagcatgcgttgcgcgacacatncgcgtgcgcgctcgctgtcttcgatttacatagtngatgtgcgtagtacatatntgatatcagaatgcctaacgtgacgcgtgtcagatcagcgtatactatcgcngcgacactgttattgactatacgcggctgctctcagtcatctgacagattcgctactgtttttgcgacgtactcacgcatggtggatcntgtgatataccgagtcatgaccagttacgcccgctgtactgtatcgtatctggtgtacactntccgnttcgtgcgtcatganangaatacgtnatacattcacggtgcactatgtctactatcgtgagtgacgtttatgatgcacgagcgagagtcggtcgtgcacagnatcgtgnatacgncatcgctagtg

SEQ ID NO: 359 - DNA, 2435 bp, Glycine max
  misc_feature (1)..(1): n is a, c, g, or t
  misc_feature (58)..(58): n is a, c, g, or t
  misc_feature (61)..(62): n is a, c, g, or t
  misc_feature (115)..(115): n is a, c, g, or t
  misc_feature (118)..(118): n is a, c, g, or t
  misc_feature (186)..(186): n is a, c, g, or t
  misc_feature (303)..(303): n is a, c, g, or t
  misc_feature (309)..(309): n is a, c, g, or t
  misc_feature (314)..(314): n is a, c, g, or t
  misc_feature (397)..(397): n is a, c, g, or t
  misc_feature (400)..(400): n is a, c, g, or t
  misc_feature (425)..(425): n is a, c, g, or t
  misc_feature (460)..(460): n is a, c, g, or t
  misc_feature (467)..(467): n is a, c, g, or t
  misc_feature (470)..(470): n is a, c, g, or t
  misc_feature (478)..(478): n is a, c, g, or t
  misc_feature (547)..(547): n is a, c, g, or t
  misc_feature (550)..(550): n is a, c, g, or t
  misc_feature (572)..(572): n is a, c, g, or t
  misc_feature (585)..(585): n is a, c, g, or t
  misc_feature (611)..(611): n is a, c, g, or t
  misc_feature (631)..(631): n is a, c, g, or t
  misc_feature (641)..(641): n is a, c, g, or t
  misc_feature (683)..(683): n is a, c, g, or t
  misc_feature (688)..(690): n is a, c, g, or t
  misc_feature (694)..(694): n is a, c, g, or t
  misc_feature (729)..(729): n is a, c, g, or t
  misc_feature (769)..(769): n is a, c, g, or t
  misc_feature (775)..(775): n is a, c, g, or t
  misc_feature (802)..(802): n is a, c, g, or t
  misc_feature (831)..(831): n is a, c, g, or t
  misc_feature (838)..(838): n is a, c, g, or t
  misc_feature (855)..(855): n is a, c, g, or t
  misc_feature (869)..(869): n is a, c, g, or t
  misc_feature (883)..(883): n is a, c, g, or t
  misc_feature (934)..(934): n is a, c, g, or t
  misc_feature (1012)..(1012): n is a, c, g, or t
  misc_feature (1024)..(1024): n is a, c, g, or t
  misc_feature (1026)..(1026): n is a, c, g, or t
  misc_feature (1031)..(1032): n is a, c, g, or t
  misc_feature (1059)..(1059): n is a, c, g, or t
  misc_feature (1099)..(1099): n is a, c, g, or t
  misc_feature (1126)..(1126): n is a, c, g, or t
  misc_feature (1151)..(1151): n is a, c, g, or t
  misc_feature (1189)..(1190): n is a, c, g, or t
  misc_feature (1264)..(1264): n is a, c, g, or t
  misc_feature (1275)..(1275): n is a, c, g, or t
  misc_feature (1293)..(1293): n is a, c, g, or t
  misc_feature (1304)..(1304): n is a, c, g, or t
  misc_feature (1314)..(1314): n is a, c, g, or t
  misc_feature (1325)..(1325): n is a, c, g, or t
  misc_feature (1366)..(1366): n is a, c, g, or t
  misc_feature (1385)..(1385): n is a, c, g, or t
  misc_feature (1399)..(1399): n is a, c, g, or t
  misc_feature (1426)..(1426): n is a, c, g, or t
  misc_feature (1452)..(1452): n is a, c, g, or t
  misc_feature (1460)..(1460): n is a, c, g, or t
  misc_feature (1468)..(1468): n is a, c, g, or t
  misc_feature (1475)..(1475): n is a, c, g, or t
  misc_feature (1504)..(1504): n is a, c, g, or t
  misc_feature (1572)..(1572): n is a, c, g, or t
  misc_feature (1656)..(1656): n is a, c, g, or t
  misc_feature (1669)..(1669): n is a, c, g, or t
  misc_feature (1675)..(1676): n is a, c, g, or t
  misc_feature (1679)..(1679): n is a, c, g, or t
  misc_feature (1681)..(1681): n is a, c, g, or t
  misc_feature (1751)..(1751): n is a, c, g, or t
  misc_feature (1768)..(1770): n is a, c, g, or t
  misc_feature (1819)..(1819): n is a, c, g, or t
  misc_feature (1825)..(1825): n is a, c, g, or t
  misc_feature (1827)..(1827): n is a, c, g, or t
  misc_feature (1913)..(1913): n is a, c, g, or t
  misc_feature (2018)..(2018): n is a, c, g, or t
  misc_feature (2020)..(2020): n is a, c, g, or t
  misc_feature (2069)..(2069): n is a, c, g, or t
  misc_feature (2090)..(2090): n is a, c, g, or t
  misc_feature (2097)..(2097): n is a, c, g, or t
  misc_feature (2162)..(2162): n is a, c, g, or t
  misc_feature (2218)..(2218): n is a, c, g, or t
  misc_feature (2242)..(2242): n is a, c, g, or t
  misc_feature (2286)..(2286): n is a, c, g, or t
  misc_feature (2300)..(2300): n is a, c, g, or t
  misc_feature (2302)..(2302): n is a, c, g, or t
  misc_feature (2368)..(2368): n is a, c, g, or t
  misc_feature (2375)..(2375): n is a, c, g, or t
  misc_feature (2399)..(2399): n is a, c, g, or t
  misc_feature (2401)..(2404): n is a, c, g, or t
  misc_feature (2409)..(2409): n is a, c, g, or t
  misc_feature (2412)..(2412): n is a, c, g, or t
  misc_feature (2416)..(2416): n is a, c, g, or t
  misc_feature (2418)..(2418): n is a, c, g, or t
  misc_feature (2420)..(2420): n is a, c, g, or t
  misc_feature (2422)..(2422): n is a, c, g, or t
  Probeset Number=SeqID_10138
ncgactctctgcggtcagctgtactgccgagcctaagttacctagctatcattcatcncannatgtcatggtcctggtcgcatcggtcgccgagcgcgcgtctgcttagtgatgnagntgtaactgctggtgtctaatagagtatgtcatccgtgaacctaggatctatagtggtggtaaatgagngtgcgctgcctgcctacgatgcatatcgacgagaacgaatgactcggtatacgcgtgcgcagtgactagtcgatatacattcgactgcggcgtgtaggagatgatgtgagtcatcgnagagcncatantcatgaagtgataatagtgagcatacacgccgtgtcatttatcaatagctttgtgactcgggttgagtacgtgggcgtgagtngancatacagttgatgcgcttggtatgnggtttgcgtgtatgttgatgtcgtgtcctactttnatatatngtngcgctgcngattgttggctctctgtgcggtcgttgtgtcggtcactatagactatgtgctcatgattagtgcatgangcngacagatgctgtcatgtagagnagtatagtaacanatcgtgtgtatgagagcgcagcactnctgcgtcgctctcatgcatnaatggtcgancgcgtgtcgtagcgtctataccgaacgaagcatcacattacntgtcnnntcanctctctcgtgtcggctcgacacctgcacgcactantcgtgatcagagagccagtcatatctactatcaggagtanaactangacaggtagcgactgtctatagtcaanagaaacgaggcatcgcgtagtgtgagcangagagtngatcagcgcgctgtacnagcatccgttgcantcacacacgtgtgntgactcggttcgacgcgctgcacgagtagtattatgatcgcgtctgcacantcttcggtcatagcgatgtcctagcgctctgtacacgtcgtgcagtagcgatacagtcacgacagcgtcatatgtganagtcgtcacgcnancgtannacatcggcgatgtgcagtatactgtantcgatcatgtcgatacgtctgtatgcatactgaacatcgnagttgagtgaccgtattgatcgactangcatcagtccgtcaatcctgccctnagcacattcagtgacagcgtagtagctctgcatttagnnatgcgcacacaccgatcgctgcgatgcgctataccgcgcggacgatgcggccgactcgctatcatgtcgtgagnacatagtacancaactcacctcacgacgntcgctatcgtncctcacgtcnattctgatagngcgagcatctgtgagtgcagtggtgttagtcgctgttacangctgctcgagatacatgtntctatatatcgacntgtcgtcgactgcgtactatcgctcgngctactgcgcatgtgagatgggagantaacaagnagataganggatganagctgtactatactacgctcgatcagtcngctaatgaccgacgcatgagagagtagcatacgctctcgagtagagtgtatgcatacatagatagtangagtatgtagagtgagtatgagccgtatcgatagcgaggtgtgttagtcagatatatatggtatcagtataggtgatgaatgtngggacagtatgtntagcgnncgngngtgtcgcggcgatactactaatcgactgtcgtccatctgtgcgtcgtttgcgctgagcgtgtcgctgatnacaccagcgagtctgannncccaatcaccgcgcgtccatcaggatgtgagtgatgtgggtcgacaggnacatgnanagagtgacgagctgaggagactgcctgtctcatatcgacaacgctagtcacgcatgacgacgagcgtccatcgtgagaggagactncacgcacagagaacgcgcgactcgcaccacacccgcgagacgctatacagctcacaccacgcgagcaactagactcgcacacacacaaccgcaacatggagacananaaaactatacagacactacatatctcagatatcatctcacgtctacgcnccctgctcgcagctcagacangtgcacnctgtacggcatagcagaccgctcgctcgtcgtgtcgcatcgatgcagcgtgcgatccgacggacncggtcgatggcgcacaacacactgtgaaagcataaccatctatagatgtgtatctntccgttagctgtgatacgtagagngggataggtccttgttgttggtgcagcgcgcgtgagggcgcttnttcgctcgatactntntacacatccgtcccgcggggtgccggtgtaaataagcgaactgccacgcgataacggggccgcctngctctgnaccactcgtgatactcacgggtangnnnnacganaanggtngngnanccgagatattgag

SEQ ID NO: 360 - DNA, 732 bp, Glycine max
  Peptide Sequence Number=SeqID_7012
  Probeset Number=SeqID_10139
attttatctgaataaacataatggccgaatcactagcagcattccgtgaccgcaggtcgaaggatctccgccagcttgcagaagaacatctgcaacatgacctcaaccaacaagatcgcgacatacttcagaaagcgggcggcaaggtttcgacgcacactggtttcgcatcagcagtcgggctaggtctaggactctatacggcattccgactacgagctatgcgccttgcatacttcagagctttccgagccatggagaagccggtagaagtgcgcttcgcagatggtcgtactgagcctatcccagacatcacagcgaaaatatctgggccttcacgctggggcgatgctgcgacctacttcctcttttccgttggcggcctcttccttggtggtgaactgggtctgttgacgggtacagccagcgcagcgagaacggttaccaaggacccggcgagtagggagaggattgagaaggcgtttaagaattaccgaattgatgtgctacagagagagattgagcagctgaagggcaagagtaaattcgaggagttctttagtagtgggccgtytagtgcgtaggtcgtcaagcctacggcctgagctgtagtatctgggaagctgcatttcacgtacgtgtatatawagttttgttcaggcggcawacttgcccatcttwatgtctgacaagcccttagcagcatacaactgacatatgactgcagcaacc

SEQ ID NO: 361 - DNA, 611 bp, Glycine max
  misc_feature (601)..(611): n is a, c, g, or t
  Peptide Sequence Number=SeqID_7097
  Probeset Number=SeqID_10140
taaatgttctcagtgtatttgtatttatttacaatcaatgcttttatgatagatgaacaataaagtattgcactataactatatgaatcgctttacggaatccaatatgtcacctgagtttcgaattagatattgccgcaaatatctgttagacagcaatatcctagttgggactaattgtaacacttctttgtctcttcgttgatgtttaaaaattcgtcttacaactctcttccagaggataatagactctatcaaagtgatactacatgtaaggattgttgctacaatgacttcaactcttgctgaataaatgtcatcttgaaagctgctcaatgtcgtattgtagagaagcataagggttgttgtatatacagcaattaaattcgccaggttttcggccatgctgctgaggatcagtattaaagctgacattgattttgaactagcggagtacatatcataatattgagaaccatatgtatacatatcactggtcaatgtagaaagactcatcttattgcttcctgctgcaagggtttgacaggtgcctacaacatcgtcatcataagtaagtttcaggcctgatagttggtcacannnnnnnnnnn

SEQ ID NO: 362 - DNA, 216 bp, Glycine max
  Probeset Number=SeqID_10141
aattctggagacgagggagttatgctgggtctatgttcctccacatcatctttctattggtggcatatatcttgtcaacaccaaagaatgtcattaggccaggcttatctattcttgaagagattcagactgttgtttcgggaggtatgtcatatgccacagatccaatcaactatggagtcacgcatcagactatgggaaataagtagaatcaac

SEQ ID NO: 363 - DNA, 1537 bp, Glycine max
  misc_feature (91)..(91): n is a, c, g, or t
  misc_feature (295)..(295): n is a, c, g, or t
  misc_feature (425)..(425): n is a, c, g, or t
  misc_feature (497)..(497): n is a, c, g, or t
  misc_feature (500)..(500): n is a, c, g, or t
  misc_feature (502)..(503): n is a, c, g, or t
  misc_feature (507)..(508): n is a, c, g, or t
  misc_feature (593)..(593): n is a, c, g, or t
  misc_feature (634)..(634): n is a, c, g, or t
  misc_feature (654)..(654): n is a, c, g, or t
  misc_feature (922)..(922): n is a, c, g, or t
  misc_feature (965)..(965): n is a, c, g, or t
  misc_feature (1020)..(1020): n is a, c, g, or t
  misc_feature (1210)..(1210): n is a, c, g, or t
  misc_feature (1362)..(1362): n is a, c, g, or t
  misc_feature (1370)..(1370): n is a, c, g, or t
  misc_feature (1407)..(1407): n is a, c, g, or t
  misc_feature (1457)..(1457): n is a, c, g, or t
  misc_feature (1466)..(1466): n is a, c, g, or t
  misc_feature (1471)..(1471): n is a, c, g, or t
  misc_feature (1474)..(1474): n is a, c, g, or t
  misc_feature (1483)..(1483): n is a, c, g, or t
  misc_feature (1485)..(1485): n is a, c, g, or t
  misc_feature (1490)..(1496): n is a, c, g, or t
  misc_feature (1502)..(1502): n is a, c, g, or t
  misc_feature (1520)..(1520): n is a, c, g, or t
  misc_feature (1524)..(1524): n is a, c, g, or t
  Peptide Sequence Number=SeqID_7098
  Probeset Number=SeqID_10142
ctctatgatcgtcgcgcgacttgcatgttgtcgtttgttctgagtgtccgtctcgcctctctctcgcggtgtggctgagcgccgcggtcantgcatcgtgactgaaggatgtacgctcgagtcagaccatagcagagtcccgtagcatggcgtgtgccgaccgtacgaagtagtcatcgtgatgtctgagtatggggagagtggagcgcagtgcgcactacacgacgtgccgtgcagactacagagtctagagcggtagatgtcacgcatgtctgtcgcacgcctcatcagagtntatggtgagctctcgtatcagctactcggctcgcggtgagtctgcgcagtgtaccgtcgctcgtcacgctctccgtgccgtcgtgacagatgctgcatcgagcacactaccactatgatatctgtgtcgngtctggtagagtgcatatatccatagacggttgattgacacatcgctggtgttgcgttgatcgacgtatggnttntnntttnntcactactctatctgtacgtgtgtatagtgcgcatcgatgcgtcctcgcagcgtccgcgactggacgctgaccgcggttgaagcnagcgcggcggcgtcatacgctagagtcgtatatctgttganacgccagtcgcgcgtcgtcnggtcgcgacgcgtacacagtgcgagctcgcacgcgggcgcacgatagtgactacgacagtcagcattgtatcatatagctgggtatgaagcacagtgcggacgggtagggcggaacgcgataacaaggacgaagagtcggacgtgacatgtcgagtgaagtttagtatattgagtactcatgatatctccgatgcgcgtcgtccgccctgagtcgcgtgccgtgcatatggcgagcagcgcgtggcaacatatcaacagagagaatgnacagcatagtagaagtagattacaattacatcaccacagctangacatcgttcgccgatagtgtcattactgtctgctcacgagtcgtcgtactcttngatactggctcacgtacatacctctatgatattatccacaccacaccacacagcgcgactgtcgagtctactgtatactagtgttctatatctcgatgagtctagttatgactcacatgtcttatctatagcagggacgatggagagtgcatatatcaacaatacatgattgctcagttatggtgttgtntatttctctagcgtgtcagggcgtcacacgcgcctacactcagcagcaaccaccgacgctacctacgtacagacagagaggaggacaaataaccgtttaactcatggtgggagtgatgcggcgctcgcttatattcgtgagacaatacaccnctgcgttnttctgctctgtcatagcgtggtgcagcagcggcgagnggggggtgcgtgtgtcggttgtgtgtatgtggtgtggtaggtcgcttggnatctagttncgtgngtntgggggggngngtggnnnnnnngtatcnctccaacacaccacaacnacanaaccaaacaaaaa

SEQ ID NO: 364 - DNA, 1552 bp, Glycine max
  misc_feature (14)..(14): n is a, c, g, or t
  misc_feature (89)..(89): n is a, c, g, or t
  misc_feature (266)..(266): n is a, c, g, or t
  misc_feature (686)..(686): n is a, c, g, or t
  misc_feature (783)..(783): n is a, c, g, or t
  misc_feature (1039)..(1039): n is a, c, g, or t
  misc_feature (1079)..(1079): n is a, c, g, or t
  misc_feature (1144)..(1144): n is a, c, g, or t
  misc_feature (1363)..(1363): n is a, c, g, or t
  misc_feature (1387)..(1387): n is a, c, g, or t
  misc_feature (1393)..(1393): n is a, c, g, or t
  misc_feature (1431)..(1431): n is a, c, g, or t
  misc_feature (1449)..(1449): n is a, c, g, or t
  misc_feature (1487)..(1487): n is a, c, g, or t
  misc_feature (1493)..(1493): n is a, c, g, or t
  misc_feature (1506)..(1506): n is a, c, g, or t
  misc_feature (1552)..(1552): n is a, c, g, or t
  Probeset Number=SeqID_10143
ttccactctttctntcttatctcatccctacgaccggatacacagacacacagatccccacgacgaagtggatgttgacgacggcgccnttctacatatccgttctctctgttttactctcctcgtttcactccatcctgtattcctctcgtcctcgctccactggctcccactttcacctctgctgacgctatttctcgtattgatacgactggggcaggcacaagtggcgctcatacagcctgactcagacgaccaatattatntactatatatattgatctatcggcagcggacgacgtcgccgcgtcgtctgccttgtgacctcgacgactaccattctagcgcatctattgctcgccactctgattgtctctctcgctagttcggtccgtctctgcgcgcgtcgcgcatgagattggcttcatgaattgtaagtggatgactcgatatataacacggtatacgtgcactgctttctctatatatatttatgcttaccttacacgtcacagacgctatacactggctgtccctgcacggttcgcgcgatcggccatgccgcctctgacgccactagcgtgccgccgcacgctcgcagagcgacgcgaccgcacatatagaacgcatcgtgccacgcccggtgagaatacttagcggtagagcgcgacgctgcagatctgttncaattattctcaacgacgaccacgccgacatcgcacgcacgatccatataatcgtgatacgaggaccgccgcctacacactcatccggcacgcgttntgtcgatcttgtctacgcgtgtgcggacgtctctgtgctaatcgttatcttgctctgcggcggacagccgtaggactgcataagtgtatactctgctactacatcgtataggttgagctacatacgagcacagctcgtatgacggtgactgtcgatagaatatgtcgtgacgtcatcgtatactctcgtcgtgtacacgggcacagcgatactgcgtagtcggttctagcagctacctcttttgcaccgtgtctgncatgaccggacgtgctgctacgtactagtcatactcacancgagcgcgtcatcaagtatgcgacgaacatgctgatgagacggcttccttcgctgtagcctactnattcacatagatcaggtagacatcatctctatcgaaccgtacagtatgtgcagtctatagcgaagtcgatgtagaacggacgtcgtacgtatgctcgtatccgcatcctgacacgcgccgtactctcgacgtatcgacatgccactaatcgagacgatatgacgccattctcgacaactaagaacactctccacgtcacactgccgcacgtggataatntatatgaggaagacgacacaaccncgaccngacacgattagaatgatcgacgttcgtcacgtcatacntgtagctgcgcggcagantctacatatccatgcttgattctaccggtgatcgcggngtatangtgagtatctcangatgcggtctggactctagtgagatctcgtcgactatcttgttgcn

SEQ ID NO: 365 - DNA, 569 bp, Glycine max
  misc_feature (294)..(294): n is a, c, g, or t
  misc_feature (330)..(330): n is a, c, g, or t
  misc_feature (468)..(468): n is a, c, g, or t
  Peptide Sequence Number=SeqID_7099
  Probeset Number=SeqID_10144
ccagggggtattcctcccgccggattctactcaacaaagttggggggtttcccccccaattaaaaaacccctgtttgtaatccaccagattttttcgaccaagaaacttctaccagcggtcttccccacaaaaaagtcttaccggttcattaccccaatttttagcctacaaacaacatggaggagtaccctgccacatcccttccagagtgtgaagcctttttcccgtgcatggttccaacttttcccgcatccctttattttggtagggagcaaccttccccagttcagctngctttgaagctgaagcttcacttggccgtatccaanggattagtacaccctcagcgaaccatgcagagaaagcactgctgcaaaagattttccgaaggagaggtcggaattggacttagaatctgccaccatggtgagtgtggggaaaggaaccaaaggttgcgtgtgcaagtntgagtccttcccttcttcttccctttgatcccctcttgaaaatactcaagctaagctgagtagttcctctgtctggaaatcggaaatgtattgctattggt

SEQ ID NO: 366 - DNA, 300 bp, Glycine max
  Probeset Number=SeqID_10145
tttgtaatgtgcattttgggcctaattttgacaaccgtgctggaaatattattcaggttgacagagagttttattggatgtttggtccatcagaaaacgtagcgcatgtatgtggttctcatggcccaccatctgtagattctggtcagattggtactgatgttaatcagctctgttttgctcagttgacaccgtatatgtatcaggcgatgcttcagcaggtttttagtcttctcagccaatgcagataactgtacctgttttcataacaaagaaagcaagtgctgcaggcatgcaagt

SEQ ID NO: 367 - DNA, 433 bp, Glycine max
  Peptide Sequence Number=SeqID_7100
  Probeset Number=SeqID_10146
gatccacgttcttttcctctttgctcttgtctcgttcacttcccatgcttctgtcaatgatttctgtgtagcagacctaaaaggtccagatagcccttcaagctatcaatgcaagccacctaacacagtcacaggggatgactttgtggtctctggctttgtagctggaaacaccacaaacactttcaatgctgcattaacctccgcatttggtactgattttccaggggtgaatggtcttgggtgatctgtggcacggttagacattaccaaaggtggatcaaatcccaatgcacaccacacccttggtgccaatgaacttgttataatgggtggaagggtacaaacactgcttggtttaataacccgcgatggcactttataccaagaaccttggaaccctggaaaaatagagggtttgttccaccaggga

SEQ ID NO: 368 - DNA, 1650 bp, Glycine max
  misc_feature (1)..(1): n is a, c, g, or t
  misc_feature (10)..(10): n is a, c, g, or t
  misc_feature (17)..(19): n is a, c, g, or t
  misc_feature (846)..(846): n is a, c, g, or t
  misc_feature (951)..(951): n is a, c, g, or t
  misc_feature (1080)..(1080): n is a, c, g, or t
  misc_feature (1095)..(1095): n is a, c, g, or t
  misc_feature (1263)..(1263): n is a, c, g, or t
  misc_feature (1300)..(1300): n is a, c, g, or t
  misc_feature (1345)..(1345): n is a, c, g, or t
  misc_feature (1353)..(1353): n is a, c, g, or t
  misc_feature (1358)..(1358): n is a, c, g, or t
  misc_feature (1468)..(1468): n is a, c, g, or t
  misc_feature (1501)..(1501): n is a, c, g, or t
  misc_feature (1512)..(1512): n is a, c, g, or t
  misc_feature (1565)..(1565): n is a, c, g, or t
  misc_feature (1597)..(1597): n is a, c, g, or t
  misc_feature (1650)..(1650): n is a, c, g, or t
  Peptide Sequence Number=SeqID_7101
  Probeset Number=SeqID_10147
ncaataactntatctannnatcgcgagaaacaaacagcaaacgagcatgagaatgagctactagcggaagtgtggaagacgacggtctccttccagtggaggagcggatgtgctatacgaaagaaggctatacatatgttggcaacttctgaagcgcaaagtgagtgggagtccgcgtcactcaggtgtctgttgtttgcttgctctctgcgactccacgcgtatgctcataattagacatcccacctcactgacacagaacagataacgtcactacagtattcaaccgtaggtgatctcttcatgattagacgaatctacaataacaccaagtcgcatactaatcacgcactacataggacgcttagtagctagtatatggtatgatgagtaaagagtcagtccataatagtccatgtaataacattcctctgtgctctcatcgcaagctcttcacagtgtacagctcagtgtgccattgataaggttgagccgctctacggcccacaaatagtagctatcatcgcttattgaatcgtacaccagagtcacgggctcgtctgtatcgatcttgtgttagagccacccacgtgctgcgtcatgagacaacgcgagccgcgcgcgtgacgatgttcttctgtaattcggtgcagcgcgcactccgtccagagtcatgagactatatcgatatgacttgcacagtatactaaggagcgtctcaagtacttcgcgcatcttgagtacgatgagcctggagtaattactgcacccacaatcgaaagcagaccagtgatgccatctcttaggagagcgtcatcatatgaggcgcgagagttatcccgtatnatcactcaggttctatatggtaacgacggacgaatacgcttggtaattcgtctgacatgatatacgaatcaacatatccttatggctttctcagactgctcctgncattcttcgcgcttgatcatagaactgagtaatctagagtctacatcatattcgtggtagtatcatgacacacattgagctctctcgacgagtgacccgatatcattacgtctctcgccgggttagagntgtagagtcagatgnaccacgaacaataatagtaacacactacgagacatatatgacttcctctctcatgtaatatcgctatgatgtcataattcgaccactctgtccggtacactcacagcgactggattcgcgacgagtccatacactacacatcgtcacagtagagacgtcatgctatgncgaatgaaccaaggagtagcgtcacggcgcgtgcgangaggagtagtcataggcacgctggctcatatgagtgaagattctncgctgctntgcanccgcacgattgtgcttatcgcgcactgcgtactgccagcgaatcgctcatggtgagccactacagatcgtagacaggagcgacagcttcagtaatgtacgctctatgtgnctatgttagtcgctcatatagacgcgcgctttnctgctgtcgancgtctagcgtagacagacgcatacagtatacatgacacggatcgcatctaagntgctacatccagccgtcacgcatgtgcgctancatgaacatagtctagtgcgagtacgtacggtagatgtctgacgtcgttctgn

SEQ ID NO: 369 - DNA, 532 bp, Glycine max
  Probeset Number=SeqID_10148
gcgggatcacaatcgcctagtttaatcgctggcgttatatggaaatttagatgtaagtaatcaaagtgattgttaaggatgtctagcaaacacgtattgaaaggaggtggaaacaccaaaagctattggttctttagttattaactaggcccccttcgggggcagaacaggaaataacaacaatagcactcctatgggtaaacctaatatatcatacgcagtgaactgaaacatctaagtaactgtaggaaaggaaatcaaccgagactccagaagtagtggcgagcgaaactggactagcctatcgatgaattgttaatagaatactttggaaaaagtagtccatagaaggtgacagtcctgtacattaacaataattctgcgcgccttcggcgcgatagtaagtagagtggaggaaattccgctcgaataagccttcactttttttcttgaaaaaaaaagtagggcaatagggataccattctctaaggctaagtatacgtgtttagcgatagtgaaaagtaccgtgagg

SEQ ID NO: 370 - DNA, 492 bp, Glycine max
  Peptide Sequence Number=SeqID_7102
  Probeset Number=SeqID_10149
gccggtcaaaatactctccatgagacctttttttttttttggacatcactctccatgggacatactaccagattctctctgtcaaagaagatatgacgaaatccgcaacagctatcgatccgccatccttcactctcacccagacaagctaaacggttgtagctcagacgaaaagttcctcaagattcaaaaggcgtggcaagtcctaagcgatgcggagctacgcgtggtttacgacaacgacctccgatcttcgagactagacggagtaactgctgatgagttgattcagaattgtttggttcagctttggaaattctccggcaagctgtttgacttttgtactcatctttgttaattctttaagaaacttattataatgggaatcgaaagggcctattggatttcttacctctatagctaccaatcttgtgacactgtcttgttttcatcttcttgccaagatctgttacatactctttgtaagttcca

SEQ ID NO: 371 - DNA, 523 bp, Glycine max
  Peptide Sequence Number=SeqID_7103
  Probeset Number=SeqID_10150
ctgtgcggggcaacaaaatttaacagaaaagggagagaaaagaagcatgaagaagtttttgagcaaatcgctcagctctgttgtatttttcgctttagctatcattcttactttcacaacagtagctcctgggcaagcaagcgctgcaactttcaaaggaattccttttgaacagcagcaaatcattaaagaattattggagaaaaacgagcgtgtcatcaacattctcatcaattcatttgttgaggaagacaacaactacacatttgatgtgaaaaaagctgttgagctcggactaactgaagaagaagcggcgactgctgagaaattcttagatcgcgcagctgttcttacaatcgttttcagtgaaagcctcactaaaaacgaaaaagggaaattggtttttgatgcagaaaaagctgttgaacttggtcttacaaaagaagaagcggctaaattcgaaaagcttttcaaatcagtgatcagaattgctgatcttgctggtgatgctcttgttctagac

SEQ ID NO: 372 - DNA, 1360 bp, Glycine max
  misc_feature (92)..(92): n is a, c, g, or t
  misc_feature (369)..(369): n is a, c, g, or t
  misc_feature (375)..(375): n is a, c, g, or t
  misc_feature (510)..(510): n is a, c, g, or t
  misc_feature (626)..(626): n is a, c, g, or t
  misc_feature (842)..(842): n is a, c, g, or t
  misc_feature (924)..(924): n is a, c, g, or t
  misc_feature (1005)..(1005): n is a, c, g, or t
  misc_feature (1203)..(1203): n is a, c, g, or t
  misc_feature (1210)..(1210): n is a, c, g, or t
  misc_feature (1243)..(1243): n is a, c, g, or t
  misc_feature (1292)..(1292): n is a, c, g, or t
  misc_feature (1317)..(1318): n is a, c, g, or t
  misc_feature (1325)..(1327): n is a, c, g, or t
  misc_feature (1329)..(1329): n is a, c, g, or t
  misc_feature (1332)..(1335): n is a, c, g, or t
  misc_feature (1337)..(1345): n is a, c, g, or t
  Peptide Sequence Number=SeqID_7104
  Probeset Number=SeqID_10151
agcaagatacgagcgaagagagcggcagacggtgtgctggagagtggataatacctcggcacacgagacagtgtgagtgtttatataacttnttatagtcgtgtatcaagcgtcggcgccgagcttgcgctcttgcaatggagtagcgcgagcgaagaggtctcgcggatgggcgaggtcagtgacatagtagaacgtgttgtctcgtggagagaggagtgttgtggcgcggatggaacaagttgcttgcgcgtgtattcccggaggcacgccgatgtcgtgtacatgttatcacgcataggtcagacgagcagggctcaggcaatcgtacacgctctgcctcattgaccttcgccggtatactccacntacctncctgctgagctattgcgctgtcgcgtcatcgacgtgcggtccacaccgatctcccttccctagtccatgtacgcagagctctgcacgtgggggcgcgcgcgcgacgaaggcacagaagaggggagactactcctnccacaactaagagcggcggtgcacgatcaccatctcgcagaaaacgccacgacacaaccatcgcccaccacatacgagcgataacacaagatttgttgtgtcggctaatataatanatattcatctctcccataccactaacactaaaggaggggcgggccgcgcggtgtggtggttggttgtagtgagcgcactcaaatcacacctatctagtaggtcgcggagttcgctggtaggcggagacggcgagacagcacccacaacaagacggggtacgctatatatggaaatggctgggaggagtagaggagagatgatatagcctcggcctngcgctcgtcctctgtagttgagttgttgttttctttcctgtcccgtctaccgtggcgatttaatactataattaacatacancgtctctgccatttttcctccctccccctcccacaccacatccgcgcgagagagagcctaccgcaccaagcaccacaaaanatctgcgcgcgggtctattacttattattatctcttcctacacctgatacgatagattaccaacgaacattagcagagacgctgcgagtgtaccggaacttaggtggggtgtcgcttctcgcgggctcggcatagagcccaccgcatacctgaagcggacaccgcctggcatctcaacagaatacaccaccgagcgcntatatgngagacgacaggtgcgaggtctcacgatgcttcngtcgtcgtccgttctggcgcaccgggtccgctcctggctgagagagatnatttgggacacacacgggcggtggnngtcatcnnntnacnnnnannnnnnnnngggggcgcacacaca

SEQ ID NO: 373 - DNA, 799 bp, Glycine max
  misc_feature (1)..(195): n is a, c, g, or t
  misc_feature (796)..(799): n is a, c, g, or t
  Peptide Sequence Number=SeqID_7189
  Probeset Number=SeqID_10152
nnnnnnnnnnnnnnnnnnnnnnnnnnnnnnnnnnnnnnnnnnnnnnnnnnnnnnnnnnnnnnnnnnnnnnnnnnnnnnnnnnnnnnnnnnnnnnnnnnnnnnnnnnnnnnnnnnnnnnnnnnnnnnnnnnnnnnnnnnnnnnnnnnnnnnnnnnnnnnnnnnnnnnnnnnnnnnnnnnnnnnnnnnnnnnnnnnnaaagctgaaaagaactaccacccctgagccattctagttatgccgatacccccatgcctctgacaccgattcaaggccttggagtaacaaggttcccgcccaggaaaatgagaatcgccaaacggtaacttattgtatatggttcaaaccgttggtgccccagaggtagacgacttcttgcccgagctcgacgctggtggcaaacctgtcacggtattatctgcgtgacgccacacgtattgctgttgcagccccattttggaacgcagaagcagtttccggaaatgtcggatctcgcgagggaccagctcgggaatcaacacccgtgcgagcaggtaagtggagcagacgcacccgttgtcgcaatcgacccacaggaattgtccactcgatgtcaattactatgtttttttttttcttttaactaaatttttcagtttcaatttgacaaacaaatcccaagtttcatgtcatacataaaggaaagttaaatgagcaagatctgaattatctttcttattctatcccagtaaaaacaataataacttctactcaattgccttgttgcacatgctcttctaatcaattgtccctcgagccnnnn

SEQ ID NO: 374 - DNA, 2004 bp, Glycine max
  misc_feature (16)..(16): n is a, c, g, or t
  misc_feature (40)..(40): n is a, c, g, or t
  misc_feature (49)..(49): n is a, c, g, or t
  misc_feature (57)..(59): n is a, c, g, or t
  misc_feature (121)..(121): n is a, c, g, or t
  misc_feature (173)..(173): n is a, c, g, or t
  misc_feature (230)..(230): n is a, c, g, or t
  misc_feature (239)..(239): n is a, c, g, or t
  misc_feature (247)..(247): n is a, c, g, or t
  misc_feature (378)..(378): n is a, c, g, or t
  misc_feature (540)..(540): n is a, c, g, or t
  misc_feature (542)..(542): n is a, c, g, or t
  misc_feature (545)..(545): n is a, c, g, or t
  misc_feature (584)..(584): n is a, c, g, or t
  misc_feature (592)..(592): n is a, c, g, or t
  misc_feature (611)..(612): n is a, c, g, or t
  misc_feature (615)..(615): n is a, c, g, or t
  misc_feature (617)..(617): n is a, c, g, or t
  misc_feature (651)..(651): n is a, c, g, or t
  misc_feature (689)..(689): n is a, c, g, or t
  misc_feature (695)..(695): n is a, c, g, or t
  misc_feature (702)..(702): n is a, c, g, or t
  misc_feature (719)..(719): n is a, c, g, or t
  misc_feature (743)..(743): n is a, c, g, or t
  misc_feature (753)..(753): n is a, c, g, or t
  misc_feature (770)..(770): n is a, c, g, or t
  misc_feature (821)..(821): n is a, c, g, or t
  misc_feature (854)..(854): n is a, c, g, or t
  misc_feature (874)..(874): n is a, c, g, or t
  misc_feature (911)..(911): n is a, c, g, or t
  misc_feature (936)..(936): n is a, c, g, or t
  misc_feature (948)..(948): n is a, c, g, or t
  misc_feature (991)..(991): n is a, c, g, or t
  misc_feature (1028)..(1028): n is a, c, g, or t
  misc_feature (1064)..(1064): n is a, c, g, or t
  misc_feature (1131)..(1131): n is a, c, g, or t
  misc_feature (1133)..(1133): n is a, c, g, or t
  misc_feature (1156)..(1156): n is a, c, g, or t
  misc_feature (1197)..(1197): n is a, c, g, or t
  misc_feature (1199)..(1200): n is a, c, g, or t
  misc_feature (1206)..(1206): n is a, c, g, or t
  misc_feature (1259)..(1259): n is a, c, g, or t
  misc_feature (1296)..(1296): n is a, c, g, or t
  misc_feature (1306)..(1306): n is a, c, g, or t
  misc_feature (1337)..(1337): n is a, c, g, or t
  misc_feature (1501)..(1502): n is a, c, g, or t
  misc_feature (1528)..(1529): n is a, c, g, or t
  misc_feature (1549)..(1549): n is a, c, g, or t
  misc_feature (1551)..(1551): n is a, c, g, or t
  misc_feature (1554)..(1554): n is a, c, g, or t
  misc_feature (1566)..(1566): n is a, c, g, or t
  misc_feature (1572)..(1572): n is a, c, g, or t
  misc_feature (1592)..(1592): n is a, c, g, or t
  misc_feature (1626)..(1626): n is a, c, g, or t
  misc_feature (1630)..(1631): n is a, c, g, or t
  misc_feature (1639)..(1640): n is a, c, g, or t
  misc_feature (1648)..(1648): n is a, c, g, or t
  misc_feature (1665)..(1665): n is a, c, g, or t
  misc_feature (1678)..(1678): n is a, c, g, or t
  misc_feature (1770)..(1770): n is a, c, g, or t
  misc_feature (1794)..(1794): n is a, c, g, or t
  misc_feature (1807)..(1807): n is a, c, g, or t
  misc_feature (1833)..(1835): n is a, c, g, or t
  misc_feature (1868)..(1868): n is a, c, g, or t
  misc_feature (1888)..(1888): n is a, c, g, or t
  misc_feature (1945)..(1946): n is a, c, g, or t
  misc_feature (1961)..(1961): n is a, c, g, or t
  misc_feature (1980)..(1980): n is a, c, g, or t
  misc_feature (1985)..(1985): n is a, c, g, or t
  misc_feature (1995)..(1997): n is a, c, g, or t
  Peptide Sequence Number=SeqID_7190
  Probeset Number=SeqID_10153
ccgcgtggtggtcgtntgtcatgcgtcgtattcgtgtagntaggaggcnaatagagnnntgtgtcttgtggtggcacatagatatactgatgctgttgagatgtagggtagcgatcgtcanagtaggagtgtagtagtgtatgtggatggttgtgttgatcatgtgtccttanacgttatgctgcatgtctgtcatcgatgctcggtgctgttattttgtagtatggtgntatataganagtaatgnctatagatcagctgaggacgatagatcggcatgagagatctgtgtaggagagtaacagtgatctctgatgaaagagcatgaagtgagagtcacgtcgtgttgttcgtgtcgtagtgctgtagttagtagcntgagtgagctgagtgtgtcgtcagggagatgagtgagtgctggaggagtggtagagctgtagagtggagtgacgtcagtgagagtagtgatgagtgatgggatatcgtgtacgtagcatgctagttctctgcgtgagtgatgatttaatcgtatcgtagtgngnatngtcgttgtataatggattatagagatggagagagtgcangcgcgagnagtgagtagatgcatagtnnggntngtgggcattagtagatagagtagtatgtgtcgtncgatagaaggaagtatgttgatgagagatcatcgagtntgtcangagcagnacgcgcagcgatgtaantcgtctctatgtgatgcatatacnatcatctagnactacgagacgtacggnaagcaatgactatgttcgggcgagtgcttgtcgtacgcagtatctacagcngagtgagtgaagtatgtgttgttgagtcgttgnggtagatttgtgtcatctanatgtatagtgttgtggtatgtgagtgatgttcatgtntcgattgctcgtgcgtgatgaaacncagtgtatatanagatatcgtcagttgactagattccatgtgcatatgagattancatatatatattgaatagcgcgctggcgttgcgcgtnacctgcgtcaatctggagatgtagatgcggagatanttagagaatagcgtgatcatattatgtgctgtcgacatgtaggagtgctgttatactgtaggtcgangntagtcgaactgagtgagagtagntgtatatagagtagttgagtgtagattgtgtcgttgtcgtncnnctgctntttcgtctcttcctctcgcattgccctctcatattgctgtccttgcatttacntctatcttctctctcgctcttctcctctttcggtgcncggtgctgcnggagtgacatcacggatagacgacaaagcantggagagaacgacgacacatgcaagtacacaatcagaagaggaaataggaagcaaatagagaacaagaaacatagagtgtatgtgttgtgttgatgtgtgcacaccgtggcgttgttcgctgtgtgttggtctgtttcagcgcttatctatctgtgtggccgannttgtgattcatgatctattttgcttnnctctgtatgttctttaccgntnttngtacatatcacntgtctnatgattaggaaacagcacanaaacagtaagattcagattaggcttatttaagantaannacacacannagaatganggtgaagatgggaacangcaacggagacangagaggcgcccgcgcaggcgtagcattgagtcatagtcgactacgcacaccggcgaccgcgcgcatgactgtgtgtggtacctgtttgatangtagagccgtctgccgcgcaggtngggatgcagcagnatagagcgtgctcgcgcggctcgcgnnngtggggtgggtgcgtctgctgtcctccgcgcgncgcgggcggggaggggcgcngcgagggtgtatggtagaggtatgagataatgggcgggagctgcacgcacgggctanngacagcttgagcgtnatattgtatgtttatcttntacanaccccccaannnaaaaaac

SEQ ID NO: 375 - DNA, 1427 bp, Glycine max
  misc_feature (33)..(33): n is a, c, g, or t
  misc_feature (62)..(63): n is a, c, g, or t
  misc_feature (107)..(108): n is a, c, g, or t
  misc_feature (120)..(120): n is a, c, g, or t
  misc_feature (128)..(128): n is a, c, g, or t
  misc_feature (769)..(769): n is a, c, g, or t
  misc_feature (836)..(836): n is a, c, g, or t
  misc_feature (861)..(861): n is a, c, g, or t
  misc_feature (868)..(868): n is a, c, g, or t
  misc_feature (937)..(937): n is a, c, g, or t
  misc_feature (948)..(948): n is a, c, g, or t
  misc_feature (981)..(981): n is a, c, g, or t
  misc_feature (983)..(983): n is a, c, g, or t
  misc_feature (997)..(997): n is a, c, g, or t
  misc_feature (1001)..(1001): n is a, c, g, or t
  misc_feature (1008)..(1009): n is a, c, g, or t
  misc_feature (1012)..(1012): n is a, c, g, or t
  misc_feature (1033)..(1033): n is a, c, g, or t
  misc_feature (1059)..(1059): n is a, c, g, or t
  misc_feature (1072)..(1072): n is a, c, g, or t
  misc_feature (1080)..(1080): n is a, c, g, or t
  misc_feature (1118)..(1119): n is a, c, g, or t
  misc_feature (1126)..(1126): n is a, c, g, or t
  misc_feature (1129)..(1129): n is a, c, g, or t
  misc_feature (1135)..(1135): n is a, c, g, or t
  misc_feature (1143)..(1143): n is a, c, g, or t
  misc_feature (1152)..(1152): n is a, c, g, or t
  misc_feature (1154)..(1155): n is a, c, g, or t
  misc_feature (1166)..(1167): n is a, c, g, or t
  misc_feature (1213)..(1214): n is a, c, g, or t
  misc_feature (1217)..(1217): n is a, c, g, or t
  misc_feature (1225)..(1225): n is a, c, g, or t
  misc_feature (1259)..(1259): n is a, c, g, or t
  misc_feature (1261)..(1262): n is a, c, g, or t
  misc_feature (1267)..(1267): n is a, c, g, or t
  misc_feature (1269)..(1271): n is a, c, g, or t
  misc_feature (1280)..(1280): n is a, c, g, or t
  misc_feature (1300)..(1300): n is a, c, g, or t
  misc_feature (1316)..(1316): n is a, c, g, or t
  misc_feature (1329)..(1329): n is a, c, g, or t
  misc_feature (1344)..(1344): n is a, c, g, or t
  misc_feature (1364)..(1364): n is a, c, g, or t
  misc_feature (1366)..(1366): n is a, c, g, or t
  misc_feature (1379)..(1379): n is a, c, g, or t
  Probeset Number=SeqID_10154
gtgttgtttttgggctttttttccgtttcttcnatctctgtttctttttatcctttatcttnntttttatttatttaatgttgtgatatttatgtattgcgtggccnnccacccatcatnaaatgaantccccaaaattgagagataacgaggagccctctccccatcgaaggtagcgggaaggaggagaaggcgcgcccccccccccctctataaaggttgatactaagaagtctaaaggacaacacatataggatttatagcatagaaagagtatatggtcttgtggtgtgtaagtagcgtcgaatatatcacaccatataactaaaacctcgttataagagtagtgtttttcagtgcaagtaactatgtagtgtcagttaacagagaagaaaaagccctgatcatcgtgcagacgatcgcctctactatcattaacacagtaaagttataagtaattaggttctatataaatataccaagctcatagacggataggcttaactagttatagttatctgaaaagagacttaattcatctgtatagtggaaatttctaaatcccattacttataccacccggtctagcgtcctgagtgctgttatcttacccacattaattgaagaggacacctcctcatgatgagcgaattcgtcagaggggttcctacacagcgcagaaaatcgcgccggaggacacgttgcgaaggtagttaagtaagcttatatcgggagtccgatcttgatgcgcatgctgcttcttctattntcatgtattttcacggagtaacgatacagctgttgagacatgggagcggtgttctatttcggtgttntgctgatacgtcgcgcgcgcagggngaaaganccgagggtgtgcgcggtgagagagagcgaatattctgccagcctatgtgtcggccgcgcgctcttcttnctcttggaccnccgctactcttagtaccgttgagttataacacncncgcacaggtgtgtnttcntctttcnncgnctagcacacgcgcgacaggcntgtttgtgcgggatgcgcccgctctnttctccgcctgangcggcccnacgccagacgttctttcgctccgcgagcgagcagcccnnaataatnctncgctantagccgcncgcgggcgncnnaaatacattcnntccccgctcggcaacagcgtaatacacaccggcacccgacatgcgnnggncgaagagncgctcgacgcgggcctcatgcggcacgcgacacncnnactgntnnnctaacccantggtgcaatgtttttcgcanctctgcgcgcatcaanatatacaacgccnctcgctgtaatgtgntactgtgacgctattgctantnaatgatatctcgnggcctatgtgcgtcttctgtctatctcgattccatatattatatcaga

SEQ ID NO: 376 - DNA, 1354 bp, Glycine max
  misc_feature (403)..(403): n is a, c, g, or t
  Peptide Sequence Number=SeqID_7191
  Probeset Number=SeqID_10155
tcagcgcggcgaggatgtccgtcttagatcccgaacgtcgcgagcatcatctgtgcggaagcgcggcaactgctgatgtcgatctctcctacggtccgactggtagaggtgtatagtgaagagttgtgtagacgagtgcccactcctcatgtagatatctgtgtcatcgatgcgtagatagatcagctcatcgctctcacactgacggacgcgcgcgtatgtcgcacgtgtcgagctccggtcgaccgcgcggcgtctaccacagaggatgagagtgacgtctcgccagttcgattcactgaatgctgtgctccacgctacgcgtagtgttctgcgactgtcgccacgcgtcacgtacgcctcacgacgcatcgccgtgagtgtctcgtgcgcgcagatcggngccgtcttcctacgcattatgagtaagcaggtctcacgatcgatcacgcagcgactcggagccacgagagacgctatatctagtaacatgtagtatcacggcttgagctcgatacctccgacgcgcgtgcgatggtaacgactgcaccatgacgtgtcgcccggtcttccgcctcaactagcctcgcctggtcacgactgatctgcggggtgcattcgatatccacgcacgcatactataagaataacgcagacgtcgctgcgcggctacctcgcacaaccgatggtgtaagcagccttgagcgtcgcgatcactcgtcgcgacccacgagtactgagtcattcgtgtgactatacttcggaggcgtgattatgttctactatcatgcgtcgttcctcgcagtctctccctcatagatcgctatgaaatacgtctccccacgcagagacgcgcagcaacacaacatgaaggagcggcgaagcctcagaacggtcccatgagtctgcggaggccttctgttcctcgcgcccactcgtcgtgttacgtggtgctgaggacgacaacgctgccgcacgctccgactgctatagccgcgtgtgaagcagcccgccttcaagattgcatgccgcagaccgcccacagatccgggaggtaatgtgtttctctcaagtgtctatgataacagtagcgcgatcctcgtatatgaggaatgagttagagcgataatgaaagtggccctgctccctttcgtctcgttctgttgaatgcactccacacacctgcgctcgagatataccacctcgggacccctccccaccggcgggggcggctgtctcctttctcataagagacgacccgcgccggcgccggcggtgcgactacaccaaaaagataattaatgatgtgtagaagtaccgcggcggggcagcggggggggagggagacacacac

SEQ ID NO: 377 - DNA, 4910 bp, Glycine max
  misc_feature (4910)..(4910): n is a, c, g, or t
  Probeset Number=SeqID_10156
tctttgatccatcaaatggatgaacccccaaaaaagctttctgtggcaattaacactgaaccaataacccaagtgaggtgatgcttcatgcagttcatttgatgcaggtgaattcatcaggttaggtctgaccacctggtctagcattctgtctggacctggggctgcatgatatttgttacgtgaatgaagtgattccgggtggatattagttaacaaaatatcatgtaagttgtgttattgggtgctcctcagagatatccacaaacctgccgcgtaattgttataacatgatggaataatcttccgtacttaagggagaattgggttacgggcaattactcgatctattattgtagaagaagaggctgcttttttttttttttttttaccctcagcagaatcatagccacgcattaattcatgaaatacagctgttaaagtttgtccttgttgggaacactcaacagttattggttgactcaatcttaattaaagccatccttcataaaattgcctatcactgatttgatcagttcatgaaccctgcacttcacttcaaatcactcaatttcattcatccactcaactccctttcctaccatggcactagaattggttggtggtgctcttctttctgctttccttcaggttgcgtttgagaagcttgcttctcctcaagttcgggacttctttcgtggaagaaagcttgatgaaaagctgctcaacaacttggaaatcaagctgaactccatacaggctctggctgatgatgcagaactaaagcagttcagagatccacgtgtcaggaactggcttcttaaggtcaaagatgctgtgtttgacgcagaggatctcttggatgaaatacaacatgagatctccaaatgccaggtcgaagctgaagcagaagctgagtctcaaacctgcacttgcaaggtaccaaatttcttcaaatcttctcctgttggttccatttaacataggaaattaaatcaaggatggaacaaatccttgatagattagatcttctctcaagccaaaaggatgatctaggcttgaaaaatgctagtggtgttggggttggatcagaattgggttgtgcagtaccacagatatcacaatcaacatcttcagttgttgaaagtgatatttatggcagagatgaagacaaaaaaatgatttttgattggctgacatctgacaacggcaatcctaaccagccatcgatactttctattgtgggcatgggtgggatgggtaagaccacacttgctcaacatgtattcaatgaccctaggatcgaggaggctagatttgatgtcaaagcttgggtctgtgtttcagatgattttgatgctttcagggtaacaagaacaattcttgaggccatcactaaatcgactgatgatagtagagacctagagatggttcacggaagattgaaagaaaaattgacggggaagagatttcttcttgttttggatgacgtttggaacgaaaaccgacttaaatgggaagctgtgctaaaacatcttaattttggggctcaggggagtagaattattgccaccacacgtagtaaggaagttgcttctaccatgaggtcaaaagaacacctcctggagcaattacaagaagatcattgctggaagttgtttgctaaacatgcattccaagatgataatattcaaccaaatccagattgcaaggagattggtatgaagatagttgaaaaatgtaaaggacttcctctggccttgaaaacaatgggaagtctattacacaacaagtcatctgttacggaatggaaaagcatattgcagagcgagatatgggaattttcaacagagcgtagtgatattgtacctgctttagcactaagctatcaccatcttccttctcatctcaagagatgttttgcttattgtgccttattccccaaagattatgagtttgataaggagtgcttaatacaattgtggatggctgaaaaatttctacaatgttctcaacagggtaagagtccaggagaagttggtgaacaatacttcaatgatctattatcaaggtgcttctttcaacaatcaagcaacacagagagaacagattttgtcatgcatgaccttctcaacgatttggcaagatttatttgtggggacatttgtttcagattggatgggaatcaaacaaaaggtacaccaaaagcaacccgtcattttttaattgacgttaaatgttttgatgggtttggaactctatgtgacacaaaaaagttacgtacttatatgccaacaagttacaaatattgggattgcgagatgtcaatacacgaattgttctccaagtttaattacttacgtgtcttatctctgtttgattgtcatgacctaagagaggtgcctgactctgtgggtaatctcaaatatctccgttcgttagacctatccaatacaaacataaaaaaactacctgaatcaacatgttcactctacaacttgcaaatactgaagctgaatggttgttcacatatgaaggaatttcccacaaatttccataaactcaccaatttgcgtcgccttgaattaataaaaactgaagtgagaaaggtgcccgagcagttgggaaaactgaagtatcttcaggtattaatgagttcgtttaatgttggcaaaagtagggagttcagtatccagcagctaggagaactcaatcttcatggaagtctatcaattgggaacctgcagaatgttgagaatccctcggatgcattagcagtggatttgaaaaataaaacacaccttgtcgagctagagttagaatgggattcagactggaaccctgatgattcaacaaaagaaagggatgaaattgtaatcgagaatctacagccttccgaacacttggagaagttgaagatctggaactatgggggtaaacaatttccaaggtggttattcaacaattcatcatgtaatgtggtgtccttaagcttgaagaactgtcgatcttgccaacgtttgcctccccttggacttttgccatctctgaaggagctttcaattgaagggcttgatgggatcgtgagtattaatgctgattttttcgggagtagctcttgttcatttacatccttggaatctttggagttctacaatatgaaggaatgggaagaatgggaatgtaaaggtgtgacaggtgcttttccacgtcttcaacgtctttctatagagtgttgtcccaagctgaaagggcacttgccagagcaactatgtcatttaaattatctaaagatttctgggtgcgaacaacttgtaccttctgctctcagtgcccctgatattcatcaattatccctaggagactgtggagagctgcaaattgatcatccgacaactttgaaagagcttaccattacaggtcacaacgtggaggcagccttactcgaacagattggacgcaattactcttgttcaaataacaatattcccatgcacagttgctatgatttccttgtaagcttggacatcaatggtggctgcgactctctaacgacctttccgctagatatcttcccaatactcaggaagctttatatcaggaagtgtcctaatctaaagaggatttcacaggggcaggctcataatcatctccagagtctgggtatcagagagtgcccccaattagaatcattgcctgaaggaatgcatgtcctccttccatctcttgattatctgtgcatagaggattgtccaaaagttgaaatgtttcccgaaggaggtttgccatcaaatttaaaaggaatgggtctctttggtggtagttacaaacttatctccttattgaaaagtgccttgggaggcaatcactctctagaaagattagttattggaggagtggatgttgagtgtcttcctgaggaaggtgtactgccacactctcttgtttctctagagatcaggaactgtggagatctaaaaagactggactacaaaggtctctgccacctctcctctctcaaggaattgcgtcttgttgactgccccaggctccaatgcttaccagaggagggtctgcccaaatccatttcaactttgtggatttgggggactgtccgttgctcaaacaacgttgccgggaacccgaaggcgaagactggccaaagattgctcacattaaaccgttactcaatcaacgttgccgggaacccggaggcgaagactggccaaagattgctgacattgaaaacgtgtatataaggtagtgaggttgattataaagaataatggtgaaagatgtagatgcttctctattgcctgcaattaaacggtggttaatgagatgcagattagctacttgctatcctgggaaatgcatgcttattttacattgttttaaacattagtttatgtacagctaaatttgtaacaggattatgggcattgcttttatcgggaattcactgacatgtacatttctaaaactcaaatttgttttcttctaaaactaatgatagtgaattcatgatggtttatttatgtgggtagtcatttagtattgtagggttctcttgtgcttcttcgaggatctaggaaatcactgattaattattttccaaacttatttctttgtggttgtagcagccagagttattatatattatgtgcaacgtatttcaaagttgaattttattccaattttttgcaagaaaaaaaaaaaaaaaaaaaaaaaaaaaaaaaaaaaaaatgattcctgcacacccgacgggatccactagattctagagctgccgctcaccattgtggagaaatcctaagttttgttcccctttactggagcttaagttcagaaattggacggaacaggttccatagcgtgattccatgggccaaaaaggctctccggctcan

SEQ ID NO: 378 - DNA, 550 bp, Glycine max
  misc_feature (469)..(469): n is a, c, g, or t
  misc_feature (491)..(491): n is a, c, g, or t
  misc_feature (527)..(527): n is a, c, g, or t
  Peptide Sequence Number=SeqID_7192
  Probeset Number=SeqID_10157
ttttttttttttttttttagattttattttttcggatattatttgatttgttggtctatgtatcataaacctcaaccagctttggttattgaatgatatttgatgtttccatatgtagagtgtatctgaaattgggttcaagaagcactcagccctagaggagtactctaggtttagcaggagagcactcttggatttgttttccattctattccatatcagtcagagctagggatattggttcgagagtgaccgcggggctaactgtgaagagttatggtgcaactaattgttaaggctagatgattcaaagactactaagttattagatagtggaaaaacctcacattgggtggggactagatgtagcctccatgttagagatcaaacctgcataaaaatccttgtgcaagaactttcttccatttccctctcattttttgtttgattggttgctcttgtttgttgntagttgaaattttcatttttgntttctgacatctgatatctcatattgcgcagataanaagctacttgtcagccatctgtc

SEQ ID NO: 379 - DNA, 539 bp, Glycine max
  Probeset Number=SeqID_10158
tccggttcgctgtgatgtttggagactttgggcatggaatattgatgtctctttttgcactctggatggttttgtttgaaaagagtcctaaattggcacgtggtcaaggcgagatcatgaagaccttttttgaaggccgttacatcatcttgctgatggggcttttttctatttacactgggctcatttacaatgactgtttttccaagtcactgaacatctttggctctggttggaatgtttcagccatgttttcatcagaagtttggaggaaggaggatttatccaataagatgctaatgctggatcccaatgtaacaggagtgttcacaggagtttatccctttggcattgatccaatttggaatttagcaaccaatcgcctctccttcctaaactccttcaaaatgaagatgtcggttatccttggaattattcatatgacctttggagttgttctgagtgcctataactatatgcatttcaagaagaggttctgtatttttctggtcttcattcctgagcttctctttatgatt

SEQ ID NO: 380 - DNA, 1483 bp, Glycine max
  misc_feature (1)..(1): n is a, c, g, or t
  misc_feature (18)..(18): n is a, c, g, or t
  misc_feature (292)..(292): n is a, c, g, or t
  misc_feature (612)..(612): n is a, c, g, or t
  misc_feature (809)..(809): n is a, c, g, or t
  misc_feature (875)..(875): n is a, c, g, or t
  misc_feature (1078)..(1078): n is a, c, g, or t
  misc_feature (1118)..(1118): n is a, c, g, or t
  misc_feature (1218)..(1219): n is a, c, g, or t
  misc_feature (1255)..(1255): n is a, c, g, or t
  misc_feature (1405)..(1405): n is a, c, g, or t
  misc_feature (1412)..(1413): n is a, c, g, or t
  misc_feature (1465)..(1465): n is a, c, g, or t
  misc_feature (1475)..(1475): n is a, c, g, or t
  Peptide Sequence Number=SeqID_7193
  Probeset Number=SeqID_10159
ntgcgccgccgcccgagncgctatgcacatgtgtagtatgtgcgacagcctcccactcctcatctatgttttgccagacagacgtctgttgctcggtcacacactcaccctcgtgttgctcatcgttcctctgtatcatacaactttcattcttgcgcgccttgtgctactagagcacgaatagcacactattatttcacaccaccagcagtagaccacgaggcggcaacagaagagaagagcgcgcgtacgccacctggtgagagcgatcttcgaggagacgcgccccagnaccgacgtatgcgagccccggccgccgcgactggttgtttgtctatagtccgcacgcgcgggcgcggcgtggtatcctccggcccgcgtcttcggtgcgcgcgtcggcgccgtgctaaaccccacgtagggcgcgtgtgacactcgtacacaccatcgccgttcgttcacacaaacacccccgcgctgatttatatacacgccgcctcgtatggtgagaccacacgcagccaccacccatgtggctccgccgataccgccgcgagcggatagccaacccagaatcacacgtagtgatgaggagagcgtcatgtgttcacnaataaccacatcataatcaatatgggagtggatcaccagaggatggccccagcgcctgtatgccaggattaacgacgcagcgcgcgcgcgagagcatgtgcgcgcgatgtgtgttgcttcgcccgctattgtctctccaccttctactctcaactccttctcgcccacagtgtggtggcggtgtatattctatcacncggtgttcttggtgtgtgcttgcattgttcacatttgtccacaccatcatatatgcatcggtttanaacatatgtatcttcatcctccttgttgtgccattcgtgaggttgttcgccatatcggtctcgggtcgcctcaaagtcgacgcccgcgcggctagaggagagcaacggcacgtggacgcgcgcggcccaggagaagggaagagaaggagataaaagagaggacgagggagaggtacatcgccgaaccagccgtggtagcggcngcgcgtgtgggaccgccggtctcttgttgtgcgtggctgncggcgaattgcagactcatatatactgtgaagtatctccgcgcgcgtatattgtagtcacggttttagacgtgtgagtggatgtgttgtcgtagagtaannttgatggcgcttggtgctcttcaggtgcactgctcncgctccgcccccccgtcgtgttgcgcgtctgtagcgcgcccacacgcgccgacaagcgcggcaagttagagagaaggcgtgtgtgggatgcggggtgggggtaggggtggggcggtgggttggattgggggaggtctcccccagtccgcnggcgtgnngcgcacgtgtgtgtgtgtcaggtcttctgctgtggataaaagaacacaaaanacacaaaacnaacaccaa

SEQ ID NO: 381 - DNA, 1561 bp, Glycine max
  misc_feature (15)..(15): n is a, c, g, or t
  misc_feature (17)..(17): n is a, c, g, or t
  misc_feature (27)..(27): n is a, c, g, or t
  misc_feature (32)..(33): n is a, c, g, or t
  misc_feature (35)..(35): n is a, c, g, or t
  misc_feature (37)..(38): n is a, c, g, or t
  misc_feature (40)..(40): n is a, c, g, or t
  misc_feature (44)..(46): n is a, c, g, or t
  misc_feature (77)..(77): n is a, c, g, or t
  misc_feature (254)..(254): n is a, c, g, or t
  misc_feature (274)..(274): n is a, c, g, or t
  misc_feature (282)..(282): n is a, c, g, or t
  misc_feature (953)..(953): n is a, c, g, or t
  misc_feature (989)..(989): n is a, c, g, or t
  misc_feature (1052)..(1052): n is a, c, g, or t
  misc_feature (1131)..(1131): n is a, c, g, or t
  misc_feature (1153)..(1153): n is a, c, g, or t
  misc_feature (1241)..(1241): n is a, c, g, or t
  misc_feature (1289)..(1289): n is a, c, g, or t
  misc_feature (1529)..(1529): n is a, c, g, or t
  misc_feature (1554)..(1554): n is a, c, g, or t
  Probeset Number=SeqID_10160
attgtgggtggtggntncttcttcctnccccnncncnncncacnnntaacgccccctccgcgtctgaggtgggagcnaccccgcgccactctccacccacctttaaaatgtatatatgtgccacaccccctcctctcctacgcttccgcatatttatatatgtgatataaaccactccacacctcattctttctcttagtctgatgagggtcatatggcggcatcattctgtgttacctatgtcttgttcaccncgaggcatcaacacaactgnctgggtgngacgcaaggaccaacgcttacagatactcacatatgctccatccgtgctcgcatctcctcatcttcgttatccagaaattagtttaacttgatagtatcccgtcttgctactgccactcttactgtgttattcaggtactcaccaacgagcgacacgccgccgcacgaccgaccctacaaagaagcgagaaatgatttatgtaatagcgtacagactgcagggacctgcggtggagggaggagcgtatggtaactttactcatacttccggtctgcacggagccacgcacagccggccacccgcgcaccctgcggaatcgcactacccaacacagctcgacctgggatgaggtgtgagcactaccaaacgcacactttctctcacctgatatttatgagatattatatagtgtctattgcgatctagcgtcagtcaaagacgtaatggactcgagagggacgactactcctctacacgagtacgaattgtcaatacgtgatcacgtgacatagagaattatagtctggtcaccgctctaccatagatgtagacctgatgtgcgtaggatcgactcggacatagaaaagagccacttctctcggagatgctcaccatcacctagccacatgcctccgtcgaacatatgatatagactctacctcgcgcctcngcgccgcgcgacactctatcagataacaacctgatnatgtgatatcagtggctcgctgctagcggtgcggagagcagcactcatctcactgctcgcgcnagtggtgctgtgatctaagtatacggtagcatagcgtagtcgatattataccactcaccaccacacacatacaatgaantacctgccttgtagcgcgtgancacgtgtaccgtcgccatcgatggacgagtaatggtgcgtgcgagtactctcctcgcaagcctatacgtatctgagggcggacgcaantgcgagtcgcctgcgtatctctacgcccctctcatcgcgtcggtatgnttcacacgctgcctcgtgtactctactacgcatgatactcgctcagtacgtcttacactatctgtcacaactagtatatcatagagctacaccacacgtaatcgcacgcgacgcctcggtaccaccgacgcgatcgcaagagtaagccggtgagacggactatgcagacccgcatagcacacacaagtgtgcatacagactataatatcagagtgaacaaagagcataacagcgaccacncaacgacacgctccagcgcatctantccctac

SEQ ID NO: 382 - DNA, 2054 bp, Glycine max
  misc_feature (11)..(11): n is a, c, g, or t
  misc_feature (152)..(152): n is a, c, g, or t
  misc_feature (154)..(154): n is a, c, g, or t
  misc_feature (214)..(214): n is a, c, g, or t
  misc_feature (218)..(218): n is a, c, g, or t
  misc_feature (240)..(240): n is a, c, g, or t
  misc_feature (267)..(267): n is a, c, g, or t
  misc_feature (302)..(302): n is a, c, g, or t
  misc_feature (316)..(316): n is a, c, g, or t
  misc_feature (370)..(370): n is a, c, g, or t
  misc_feature (452)..(452): n is a, c, g, or t
  misc_feature (483)..(483): n is a, c, g, or t
  misc_feature (505)..(505): n is a, c, g, or t
  misc_feature (546)..(546): n is a, c, g, or t
  misc_feature (606)..(606): n is a, c, g, or t
  misc_feature (632)..(632): n is a, c, g, or t
  misc_feature (645)..(645): n is a, c, g, or t
  misc_feature (773)..(773): n is a, c, g, or t
  misc_feature (796)..(796): n is a, c, g, or t
  misc_feature (893)..(893): n is a, c, g, or t
  misc_feature (941)..(941): n is a, c, g, or t
  misc_feature (1079)..(1079): n is a, c, g, or t
  misc_feature (1528)..(1528): n is a, c, g, or t
  misc_feature (1875)..(1875): n is a, c, g, or t
  misc_feature (1909)..(1909): n is a, c, g, or t
  misc_feature (1920)..(1920): n is a, c, g, or t
  Peptide Sequence Number=SeqID_7194
  Probeset Number=SeqID_10161
cattatgctcncagattcccaacacgctgcatcgtcatatcttattacagtctagcctgttgtgactcgacatcgtcatcatatcgtctcatgctctccacgatgacgatacttcgtgatctaacgacgagtcgtactgtgctgactgattntnatgcttatcacgcgcatatatcgatcgtacatcaggcggcatcactcccacgtactgcgnttcntcactgccatcatcatctcatncgcagacgcaggctagtccgattgcanccgctggtctactcatcgacacacgtcgacgatangacactgcactctnccgacatagatacatatactctcgtcgcagatgtgaggaatcagtatacatcgntgtcacactcatcccactctcgtccttcgttacttctggtatatcatactgcgctgcacaatacagatcacctgctacgtgncaccgtcagctcctgactcacctactccgtnttgttacccaaacaagtcgatntgcatatagctcctcgtcgtacgacgatacttcatacatcngtcagtcagcgagactgagcgtgcgctcgttcgaaggtcatacgacgccgatgctcgagnatacacttagtcaccactaacatatnacatcgtctgtgnctgtgctagtagtgtgtcgtcttgatgacatatctactattagttatgtaaagtagtctgtatctgggcctcagcgtcgcaatctacatcatactagtgagctactcaggcatatcgatcaggagctncgcatcaactgtcgtagagtcgncactcgtgacgtactgtctgcgtgaggtatatatcatgccgacactcacatcagtcccatatcatcctgctctcgctctgtatctagtagtatgatnagaatcagatacaaagattggtcgatcatctgtatgctgtggtgcagncatgatcgcatctacagtcagcacgactatcatcatgcgcgctcctctcaatgctagtggtcgcacacacagcacccatactcgtcagagcatgtatatatactacatatagactactcccgctgcgcgtgctactcntcacgctgggcgctctgtccgatcgcactcatacgaacacgcatcgcatctcttactcaacgtatacatcgcgcctcatcttcatcggcgagggtaggcgccgggtgtggtccgtcacatcatagtcagcaatgaaatatacaaggcggtctacattaactatatcacgttctcggggatgcgactatcatccttaatttcacatgctctttgtatagtctttactcccactactacggcatgccgcgcctcgatctcgcatcatgctatagtggcagtcgtgaacaagcctatgtcgacaacctgcgtattcacaatccaaaccatctatactatcatatatacaacacctacactaaaaaacgtaatacaaagtctcccgctctcgcgttactgtatcacattcctgaattctctgtttatgatggccttttctactgatttagttntttcttgcccactcacgattctatgtctcgaggcgataccgctcatactccctacctcgtatcccactctcgctctccgtcaggccctcctctagcgctcgcgccttctatctgctcaccgccgcgcccacgatatacatactcagcacactactagcaagtctcggcacacgtgaacatatcaaaacagatagtatagtaactcgacgcgactcactatagactactgaatgaatctctacaactctctcgctactagtgccgcgcgtgtcgctgaccgcctcggtacgtcacgcataacatcttgcgcctctcttggtcctcttctctcacatattgacaatcgngtacacatcaatgtgagttctcttgccctctgtntatctcacacntgccactcctgaatgcgggcgggcgggcgccccaccttcatccccactattattgctcgatctgtctccgtccctttcgcctctgcgccgacaataaataatatagaagatggcgcgagaagtatgtgagagag

SEQ ID NO: 383 - DNA, 534 bp, Glycine max
  misc_feature (181)..(181): n is a, c, g, or t
  misc_feature (264)..(264): n is a, c, g, or t
  misc_feature (267)..(267): n is a, c, g, or t
  misc_feature (287)..(287): n is a, c, g, or t
  misc_feature (290)..(290): n is a, c, g, or t
  misc_feature (352)..(352): n is a, c, g, or t
  misc_feature (355)..(355): n is a, c, g, or t
  misc_feature (383)..(383): n is a, c, g, or t
  misc_feature (403)..(403): n is a, c, g, or t
  misc_feature (406)..(406): n is a, c, g, or t
  misc_feature (410)..(410): n is a, c, g, or t
  misc_feature (414)..(414): n is a, c, g, or t
  misc_feature (428)..(428): n is a, c, g, or t
  misc_feature (446)..(446): n is a, c, g, or t
  misc_feature (451)..(451): n is a, c, g, or t
  misc_feature (464)..(464): n is a, c, g, or t
  misc_feature (522)..(522): n is a, c, g, or t
  misc_feature (528)..(528): n is a, c, g, or t
  Probeset Number=SeqID_10162
tttacatctctcaacctgctgttgttgaacaagaagttttggtcaaccagaaacttgaaggagtcagaacctatgttgagcaaagacaaactgttgaaccccacactttcttgaaagaaggcgatgttgttgaaaccagacctgtccaacaaaccatcgaagtctttgaagcaagaaaagntatcaaggacgttcaatacactgaagctgtccctgtgagaaagactatcgaaaccatcgaaccccaagttatcaccaaggaantcnaagtcatggaaccaagactnggnaccaagaccattcaagtcggcgaaaccgtccctgtcaagaaacaagtcgaagttattgaatncgntcctatcatgagagaagttgaaaccttngaaccccaaactttcaccangcnaatngaantcaccgaacaagtncccgttaccagaactgtnactgncactgaacccgtncacctcaagaaggctgtcgaattcgttgaacccatcatcccactcaaactataccaangaaatngacctg

SEQ ID NO: 384 - DNA, 671 bp, Glycine max
  misc_feature (671)..(671): n is a, c, g, or t
  Peptide Sequence Number=SeqID_7195
  Probeset Number=SeqID_10163
tcagctacgtaggcccccccccccaaaacaaaaatctcgtctacaatccgaagtcgaagtgttgattattgatttggaaaaagcgaataatacagcacgcgaattgcaaaaacgcgttgagcatttagaacgcattaatatcgatattaagacgcgtctcgacgaaaccgtacaattgtacgaacaaacccaacgcgatttgagaaataaacaacaagaattgcaacgttgcgttcacgaattggacaagacacgcgaacaaaaagatgcattggcacgtgacaataagaaacttgccgatgatttacatgatgctaagaatacgattagcgaactcacccgtcgtatgcacgaaatggaattggaattgcgtcgattggaaaacgaacgcgacgaattgactgctgcttataaagaagctgaagctggacgacgagctgaagaacaacgctcgcaacgtttggcatccgaattcggacaattcagacacgaggccgaaaaacgtcttcaagaaaaggatgacgaaattgaagctatccgcaaagcgaccagcattgaaatcgaacagttgaacgcacgcgtagttgaagccgagactcgattgaaaactgaagtgacgcgtatcaagaagaaattgcaaattcaaattaccgaactcgaaatgtcattgn

SEQ ID NO: 385 - DNA, 2004 bp, Glycine max
  misc_feature (258)..(258): n is a, c, g, or t
  misc_feature (317)..(317): n is a, c, g, or t
  misc_feature (842)..(842): n is a, c, g, or t
  misc_feature (856)..(856): n is a, c, g, or t
  misc_feature (885)..(885): n is a, c, g, or t
  misc_feature (946)..(946): n is a, c, g, or t
  misc_feature (978)..(978): n is a, c, g, or t
  misc_feature (992)..(992): n is a, c, g, or t
  misc_feature (1013)..(1013): n is a, c, g, or t
  misc_feature (1099)..(1099): n is a, c, g, or t
  misc_feature (1130)..(1130): n is a, c, g, or t
  misc_feature (1155)..(1155): n is a, c, g, or t
  misc_feature (1279)..(1279): n is a, c, g, or t
  misc_feature (1315)..(1315): n is a, c, g, or t
  misc_feature (1364)..(1364): n is a, c, g, or t
  misc_feature (1404)..(1404): n is a, c, g, or t
  misc_feature (1417)..(1417): n is a, c, g, or t
  misc_feature (1460)..(1460): n is a, c, g, or t
  misc_feature (1462)..(1462): n is a, c, g, or t
  misc_feature (1471)..(1471): n is a, c, g, or t
  misc_feature (1479)..(1479): n is a, c, g, or t
  misc_feature (1513)..(1513): n is a, c, g, or t
  misc_feature (1527)..(1527): n is a, c, g, or t
  misc_feature (1559)..(1559): n is a, c, g, or t
  misc_feature (1565)..(1565): n is a, c, g, or t
  misc_feature (1591)..(1591): n is a, c, g, or t
  misc_feature (1596)..(1596): n is a, c, g, or t
  misc_feature (1603)..(1603): n is a, c, g, or t
  misc_feature (1642)..(1642): n is a, c, g, or t
  misc_feature (1644)..(1644): n is a, c, g, or t
  misc_feature (1647)..(1647): n is a, c, g, or t
  misc_feature (1666)..(1666): n is a, c, g, or t
  misc_feature (1719)..(1719): n is a, c, g, or t
  misc_feature (1734)..(1734): n is a, c, g, or t
  misc_feature (1749)..(1749): n is a, c, g, or t
  misc_feature (1799)..(1799): n is a, c, g, or t
  misc_feature (1822)..(1822): n is a, c, g, or t
  misc_feature (1851)..(1851): n is a, c, g, or t
  misc_feature (1887)..(1887): n is a, c, g, or t
  misc_feature (1942)..(1942): n is a, c, g, or t
  misc_feature (1944)..(1944): n is a, c, g, or t
  misc_feature (2004)..(2004): n is a, c, g, or t
  Peptide Sequence Number=SeqID_7278
  Probeset Number=SeqID_10164
caacccactatcctattaataattcatatattatatcttattactttatcctcattagtccacacccaagcgccactactacacacagatcatttcataacactctcgtgtgtggacaggcgagacacgcgctgcttatatcatatatattacatatatcctctcaccgcacccacatgtcgtctaattcttattatgcaccgcacgcacacgcacatccgcactcacgcgcgacctcacatcatggataacatatanacataatcactcgacaacctaaccgtctatcaccactatgcttctcataagacacctcnatgttattatattatttaaatttcactgccatgttctatgattagtggtatactcgcgagatgattgcgtatgatcgtgtcactacacaggcctgtgttttctctttatacatcactagcgacgctatacacgctggtaatatttattatgtcatatagttatctaatgatagtgatatggttggacccgaccaccactttgttaagtcgttggcaatgagatacatagagatgaaacgcgatgaatagtgagttcgtggtgatgatatgtgtgaatgtttggatgatagcgcatcaccctaatcgacgctaaggtggagtatggattaatcaccacgcgcacagatctgatatgcagagcatgatagcatgtaactaaatatcacgtgacgtcgtgttggtatgtgtgtacgtaacatgaaatcaacacgataatacttctataatatctacgccgtcatatgatctatacaattaagtatgcacacggcctacaccgtatatgcgtgtcacgatgacataccngacgagatagcgcntgcagcacatgtgtgtgatcgtagaatanagcaacaagtcatactatagtgatggtgtatatctgtgcatctgcgcacaccacacgatantatatgtgataatcatgactcggagtagctanatgacaatatatcnatgattactgatgttctgcancacactcacgacgtcgctactaagtaagtgtgaagaggacacggcgcccagtgcatacgcagcgtgaatgtctctcgctcacgagnagcgtcgttgtgtcacgatgtaatgactcgnctgctctagatatatacgtatagantgttatatctacgccatgtctgccgcgtcacacgcagcgtacacaatatccgcgtagtgcgctgtacatgattactcacgaagtatcatacgctacactaactacgcgactagatataatactnattgtgatgtacacatcgcagcgatatctcacgaangcgacgaatcgtgcagtaatgtgtcgtattgttcgtcatctgttctctntgcgtgcgctggcacgcgcgtctctactcgctggtatgtntatgtcttgcatnctctactcgtcagcagcgatcttgtgcagtgagcctcgtcggnantcagagaangcatcagnctatcgcgcgcgtgcatgcgtagtgatgtagatntggatacatctgcnatacctgcggtgcatattgacgcatcacgcangctcgntgacggtcagatcggtagtgttctgnagtgngattgtnttctgatactgcctctacacgtcaccccacactcgcgancngtngatctacgtagtgaatganctgttgtggatgacgtcattgacatgatatgggtgtcagtagaccagtctcgntgtacagagtgctgnatcatctactacagnatcatctacctcgcgacgcgcgatatagtgtataggctatattgacgtcnacacgacacacagtgtctgtganagtgaacgagacatatcatgatacgagtntgcagtctgatgagatgtctgatagcacgagcagcncgtcagcggacacaatgcgatagacgtaatgctacgacttgctgctgatcagtcnangcatctcctatcttgatagctcgttgtactcacattgtgtcactgtgttcttgtgatgtn

SEQ ID NO: 386 - DNA, 291 bp, Glycine max
  Probeset Number=SeqID_10165
tgattttcagtcagttgagcaccagtcactttcatgtcatgaattttggacgcttgttaatgaagaacttggtaatatagaaccatgcagtctgtttactctaccgtgccagcatgttaatgttagccagttaagtcgtctggtcagaagatagcatagaattggtagactcagtgcagagtatgatccatgcactgaaaagcactccattgtatacttcaatcgacctgatgtccaaacagttcttcatgttgatccagatcataagcctgctacatgggagacctgcag

SEQ ID NO: 387 - DNA, 1521 bp, Glycine max
  misc_feature (1493)..(1493): n is a, c, g, or t
  Peptide Sequence Number=SeqID_7279
  Probeset Number=SeqID_10166
gtgcccatatgttcatggtaaaatggaggtatctctatgaatgtctgaatataaaaagcaagaaaatgtatgaaaagaaataatatgtcaaaagagaaaatgaaaaaagttaaaggaactaaatgaaaatgatataaacttccacgcgaaatccacagtcaaagcaaaatgctatatatttaaaatatggtgaattgaaaagcatgcaaatgcaatggaagcatggaagttagtacaaataggcaaaaacagaacacacaagacaggaaacagggaaaaaacagaacgaagagaaatgacataatcaatcaaaaaccatgccaatggaatgtaagcaataaccaacagatgcaagggaaggaaaaaaagttttttgtattttaaactataacttggtcattgtggaaagctactctgaattgcatgattgcaggtggtctacacaattggacatctgatttgcatgaacaaaagatttgctaatgtcaaaagtttaaacgaaaaaataatgcattgcaaggtataaactttgtaagagtggctccttactctgattgaarcggtggaggatgaggtactcatgttgggtttttatgaagtaaaagtatggtgatttgatgttaggatgatgtttgcagaggaacgggtaatatgggttaatagttgagtgcacttggttaattgatttatcttttcgatggcataagtggcggtaggtttatgttggaaacggtgtaagtgaatggttgcttcttgaatgtgaaaggaagtgatgatatkaaragcctcaacatgaatagttgyggaagtwaccgaagggtttttttmtgaatggtttcaraaktgattggactwtagtgctgtttgtggtgtgcatataatagttgggccttaaattccttaattttttccatgaggttttcggcttgatagattaattaatagattaataatttaaaattcacctaatcattaaagtattttacacgttcccgtgcttgaagtaattgcagtatcaactctgtcgtcacccatatcttctcaayaaatggccctgtgaaactgttgtgtgtgcagtttctaaaaaatgcttaaaatggagggacgttagaaaatagagaagaataggcaagatagagtaaaaaaactgaaattcaaactgaaataaattaaaacaaaatgaaaaggattttctgtgaggactttaattctcccagacatatcaagttccaaagtattgtagttcactaattactactaccgctacttagtcacccttatttatccttagtttttttatttataatgtgatttaaaagataagatgtttaactgatctagcatattttgctattaataaaaccacgtgtatatatatatatatatatatatatatatatatatatatatatatatatatatatatatatatatatatatatatatgtatgtatgtatgtatttttctcgatgtgtgtctgtgtgaaagtggngatatgaatggaattgtcattgttattt

SEQ ID NO: 388 - DNA, 1355 bp, Glycine max
  misc_feature (1)..(1): n is a, c, g, or t
  misc_feature (13)..(13): n is a, c, g, or t
  misc_feature (70)..(70): n is a, c, g, or t
  misc_feature (94)..(94): n is a, c, g, or t
  misc_feature (97)..(97): n is a, c, g, or t
  misc_feature (212)..(212): n is a, c, g, or t
  misc_feature (335)..(335): n is a, c, g, or t
  misc_feature (376)..(376): n is a, c, g, or t
  misc_feature (392)..(392): n is a, c, g, or t
  misc_feature (505)..(507): n is a, c, g, or t
  misc_feature (909)..(909): n is a, c, g, or t
  misc_feature (946)..(946): n is a, c, g, or t
  misc_feature (949)..(949): n is a, c, g, or t
  misc_feature (1040)..(1040): n is a, c, g, or t
  misc_feature (1061)..(1061): n is a, c, g, or t
  misc_feature (1189)..(1189): n is a, c, g, or t
  misc_feature (1269)..(1269): n is a, c, g, or t
  misc_feature (1286)..(1287): n is a, c, g, or t
  misc_feature (1295)..(1295): n is a, c, g, or t
  misc_feature (1308)..(1308): n is a, c, g, or t
  misc_feature (1327)..(1328): n is a, c, g, or t
  misc_feature (1330)..(1330): n is a, c, g, or t
  misc_feature (1333)..(1333): n is a, c, g, or t
  misc_feature (1338)..(1339): n is a, c, g, or t
  Probeset Number=SeqID_10167
ngcagagagtggntagcgcgatgaacgcggagaggagagagacaggaccacggcaccgcggaaacgacgngcgaggcgccagaagagactctgntanacacgtgctgtcaagccacatcatacgtcaccagagcgaacacacacgacgaacacgagtttgcgagcacgcaaacgcgagtcggaacgccgagagagggagacgcgccgagcantcaggagatacgcgctaggggattggcgagcggagcgcatcggcgaccacgagcacgacgcgcgcgccgacgcagcgtgcagagccgcatacgcgcccgaggacgaggcaggagaggggtagntcgtagcgcgactcctcgcgacgacggcatgtgagaggctngcgacgaggggcgctncggtgggagggcgagggatgcgcaagtcgccaagcgtcagtacacggacaacagagttcatgagcagatagtatatggacgacaccacgtagcggagaggtggggagacacannntctcttcgtcgtggtgtaggacggaccgcagcggaaccactataccacgctccttcctccaccgactcctgtatgatggtcgggtggatccgtataaagtgtaggagatggcatgacgaatagacacaagatgagaatacgagatggagaggttaggatcgtaatgtcacatcatctataacataacatcatccacacaccacacacgacctcacacaccaccaacaccgcacaggcgggccaacacggcggaggagtcagcatacaactccacgcgcatcgaatagatgtaaacagatattgtataatgtgcctgtgttttaatactgtcatagcgcacacgacgcagctcactcggtacctaggtacaggacgccagggagtagtgaaataaaagagatnttccttatacagaggcatgacgagcagcggagctacngcngcagagcgctgtgagtccacgcgagacacgtccggagagacatagcgaggccacgacggcagaatggcatgatgttcgaccctcatgacgncgctccctccgccgcgcatgnagcgcgaccggcggcccgcccagcgtccggaataaagcacgtagaacagacagcacagcacatcagcggcgcaagctaatcattatattgcggctccgcgcggagcccctcgcgcagcgctgtgctcnggcgcgtgtgtggtggtgtgttaaggtgaggaggaagagcaccacaacgacatcaacgcacactcagtacacacaacagnagataaataaagaaatnncccaactntccccgcgcgccntcccccctcccccctcccnncnccnccccnnacacaacaaaacacaa

SEQ ID NO: 389 - DNA, 732 bp, Glycine max
  Peptide Sequence Number=SeqID_7280
  Probeset Number=SeqID_10168
aaaaacccttccccccccgcccctccgccccccgcaccaccaaccaccgccgccccgccgccgccggcggaggagggggaggagccgccgccagccatgggtcccgccccaacaaagaccggaagaaagccctcccgccagtccatcaggaatactttctctcgaatgacccccgcctccccaacaaaaaggaggttgctgagggaggcctcctccctccggtggaacccccccccaaacagggtggccgcctcacccacccattggatcgcccccatccaggccgcccccgtggccgccacctccctcaagctgcaggaggaggagcgtgagcgccgcatggacttcgtgccggagaagtcggcgctcgaggtcgacgagatccgcgtcgacaaggagaccatggacatgctggcgttcctcggcatggctgacctccccggcgtcgagcgcgcccccgaaaccacctcctccgccgcccccgcccgcccgccctccgaccccccccgcgctggcgcccccgccttcctcccccccctccgcccccgtcccccttcatcttgccttgtgtctttttgagctctgttacttgtggcaagtgatgttttgaactcagagcttaagttcgaggtattttgatctgcgtatggtgaacatgatctgtttatctcatcgtttatctgaagtgattcgatatattactgctgagctttgaagtttatgctcgttact

SEQ ID NO: 390 - DNA, 1443 bp, Glycine max
  misc_feature (1)..(1): n is a, c, g, or t
  misc_feature (4)..(4): n is a, c, g, or t
  misc_feature (88)..(88): n is a, c, g, or t
  misc_feature (220)..(220): n is a, c, g, or t
  misc_feature (290)..(290): n is a, c, g, or t
  misc_feature (668)..(668): n is a, c, g, or t
  misc_feature (928)..(928): n is a, c, g, or t
  misc_feature (951)..(951): n is a, c, g, or t
  misc_feature (980)..(980): n is a, c, g, or t
  misc_feature (983)..(983): n is a, c, g, or t
  misc_feature (1273)..(1273): n is a, c, g, or t
  misc_feature (1309)..(1309): n is a, c, g, or t
  misc_feature (1435)..(1435): n is a, c, g, or t
  Peptide Sequence Number=SeqID_7281
  Probeset Number=SeqID_10169
ncgntgcaaagcatagtatcatatcaatgacagtaacaggcgaacaaacacgtagagtgggagagagtgagatgagaaaacagagcanagagtggtagagtgatagtattgagtagaacatcctcacagaaccacagaagatatcactcattacactacacgcacacaccatacgcacgtagatgagcagtcgctgaacatagagaagatgatcatgcancatcgcatcgcagataactgttatagtgcatcatcatctatagcgtgaccttatgaagaagtatgatagnacacagtcatggccgagatacgtgcatgagagatccgatgagcagaaagtcgcagtggcaacagcccacacacgatagtgtgacacaacgatagtattacacacgtgacatgtacggaggcagtaagacgcaacacgagacaggagaccactaatagatgaagcagatagaacgtagagacgaatgaatcgactagcgatgcagtacgaatgcggatgttagtataccgacgcatatcatatgatatgatggcgtaatagtagcatcgaggcacaaggatgactgacgttgcataatagtgatgtgtgtgtggtggagtgtttagtgatgtgacgtcagctgtcatagtgatatgatggatagcgtgtgccgcatctnatatgttagtcttatccattcatcccactcgagcagctgtaacatatacatatagagcacgctccacttaatgtcatcttacaacacactaaatacacctcgactcctcgctctcgtgctcgtacacagattatataatattaatttcatacaatcttattaccattaatacatataaaatgtatatatgtgattggagctaggtaccaaggcgagatggacgtacaagacgcgctcccagccgcaccgccggggtgagnggtggaggggggaggggagtcangatgggatgttatattggatatggtcggnagntgtttattttatattgttcttgtttatattttgtatcactataactaagagagatacgcaagatgcaagaggagtagccgcgacagccacaacgtcacacggtcccggctgcataacgcacacgccagagactatatatggaacaacagacgaacagcgcgcgaaacccgaggcgggagcacgcatgggatcgcacatgaaacgcatgaccatccagcgaggtctccggtggaggtgtgattatagagtataggctagatcatacgaccctgcacaggctaacgacacgncccacccccaaaaaccatagacacaccacaccaaanacacaaaccacaaaacgcgcaagaacgcacccgacaaaacgatagagcagcaaaacacggagaacgaagagagagagcccacagccggagagcccaggcagaagaaaagaaaaaaagaaagaggcnaaaagaaa

SEQ ID NO: 391 - DNA, 546 bp, Glycine max
  Probeset Number=SeqID_10170
aacaaaaacaccgcgtcttccccgtgcggggaaaaagaaaagaaaagaaaagaaccctcaattttccgggaaaaccctccccacaatggtttcccgggaaaacaccaattggctcttcgattacggcttgatcgacgatattcccgttccggacgccaccttcggcgtcaattcctccgccttcacatggccccctaacgccttgaacgcttcctccaatgtcgggtactcgcagatcgcttcgccaattgcgtcttcccttttctcgctttcgttctcgcactcttttattttgcctccttttgcttattgttgatgattagggtttctgaatcggtgcttgattgtgttggttttgtgaatgtttgattttagggttttgtgtttctgaagttctgcgcggctctgaattttgtggtcttggaagaaatgttttttttggggggggggattgcttagtcacgggtggttgtaatttttgtttttttgaatgttacgtggtggaatttgatctgttttgggtgtgtaaatgtgcgagtttagttg

SEQ ID NO: 392 - DNA, 2077 bp, Glycine max
  misc_feature (10)..(10): n is a, c, g, or t
  misc_feature (13)..(13): n is a, c, g, or t
  misc_feature (15)..(15): n is a, c, g, or t
  misc_feature (53)..(53): n is a, c, g, or t
  misc_feature (59)..(59): n is a, c, g, or t
  misc_feature (74)..(74): n is a, c, g, or t
  misc_feature (145)..(145): n is a, c, g, or t
  misc_feature (168)..(168): n is a, c, g, or t
  misc_feature (256)..(256): n is a, c, g, or t
  misc_feature (272)..(272): n is a, c, g, or t
  misc_feature (314)..(314): n is a, c, g, or t
  misc_feature (322)..(322): n is a, c, g, or t
  misc_feature (384)..(384): n is a, c, g, or t
  misc_feature (420)..(420): n is a, c, g, or t
  misc_feature (464)..(464): n is a, c, g, or t
  misc_feature (473)..(473): n is a, c, g, or t
  misc_feature (504)..(504): n is a, c, g, or t
  misc_feature (512)..(512): n is a, c, g, or t
  misc_feature (529)..(529): n is a, c, g, or t
  misc_feature (541)..(541): n is a, c, g, or t
  misc_feature (558)..(558): n is a, c, g, or t
  misc_feature (583)..(583): n is a, c, g, or t
  misc_feature (587)..(587): n is a, c, g, or t
  misc_feature (606)..(606): n is a, c, g, or t
  misc_feature (619)..(619): n is a, c, g, or t
  misc_feature (634)..(634): n is a, c, g, or t
  misc_feature (640)..(640): n is a, c, g, or t
  misc_feature (642)..(642): n is a, c, g, or t
  misc_feature (671)..(671): n is a, c, g, or t
  misc_feature (754)..(754): n is a, c, g, or t
  misc_feature (756)..(756): n is a, c, g, or t
  misc_feature (763)..(763): n is a, c, g, or t
  misc_feature (770)..(770): n is a, c, g, or t
  misc_feature (807)..(807): n is a, c, g, or t
  misc_feature (819)..(819): n is a, c, g, or t
  misc_feature (826)..(826): n is a, c, g, or t
  misc_feature (876)..(876): n is a, c, g, or t
  misc_feature (900)..(900): n is a, c, g, or t
  misc_feature (923)..(923): n is a, c, g, or t
  misc_feature (946)..(946): n is a, c, g, or t
  misc_feature (949)..(949): n is a, c, g, or t
  misc_feature (978)..(978): n is a, c, g, or t
  misc_feature (984)..(984): n is a, c, g, or t
  misc_feature (1036)..(1036): n is a, c, g, or t
  misc_feature (1077)..(1077): n is a, c, g, or t
  misc_feature (1105)..(1105): n is a, c, g, or t
  misc_feature (1137)..(1137): n is a, c, g, or t
  misc_feature (1157)..(1157): n is a, c, g, or t
  misc_feature (1163)..(1163): n is a, c, g, or t
  misc_feature (1177)..(1177): n is a, c, g, or t
  misc_feature (1200)..(1200): n is a, c, g, or t
  misc_feature (1238)..(1238): n is a, c, g, or t
  misc_feature (1259)..(1259): n is a, c, g, or t
  misc_feature (1303)..(1303): n is a, c, g, or t
  misc_feature (1324)..(1324): n is a, c, g, or t
  misc_feature (1422)..(1422): n is a, c, g, or t
  misc_feature (1447)..(1447): n is a, c, g, or t
  misc_feature (1450)..(1450): n is a, c, g, or t
  misc_feature (1469)..(1469): n is a, c, g, or t
  misc_feature (1474)..(1474): n is a, c, g, or t
  misc_feature (1476)..(1476): n is a, c, g, or t
  misc_feature (1497)..(1497): n is a, c, g, or t
  misc_feature (1527)..(1527): n is a, c, g, or t
  misc_feature (1550)..(1550): n is a, c, g, or t
  misc_feature (1598)..(1598): n is a, c, g, or t
  misc_feature (1604)..(1604): n is a, c, g, or t
  misc_feature (1744)..(1744): n is a, c, g, or t
  misc_feature (1753)..(1753): n is a, c, g, or t
  misc_feature (1788)..(1788): n is a, c, g, or t
  misc_feature (1818)..(1818): n is a, c, g, or t
  misc_feature (1998)..(1998): n is a, c, g, or t
  misc_feature (2042)..(2042): n is a, c, g, or t
  misc_feature (2048)..(2048): n is a, c, g, or t
  misc_feature (2053)..(2053): n is a, c, g, or t
  misc_feature (2055)..(2055): n is a, c, g, or t
  misc_feature (2060)..(2061): n is a, c, g, or t
  misc_feature (2064)..(2064): n is a, c, g, or t
  Peptide Sequence Number=SeqID_7282
  Probeset Number=SeqID_10171
ccgagaacantananactatgtgcgcgtgatcgcatgacgtcgtgaccgtcgngcgctntctgacgttcctcgnccgatatcacagactatactgcttagacaatgacccagtatactacataccacgtactcacgctgatacanacataactgtacgtatgttgcgngtcggacgctatgtggtcatcgcacgatcacagaatcgctgtgctgcgtccggtcctactgcgtgctgtgcagcgtgagtctattatntcaattcgtctctctnactcgtgagtcgcatgcatgtgcatactcacaccgtgtcatnatctctantccattcatgtgcaatacatgctgtgcgatcgcgctgctgtgatactactcatcatagcgancgctcatatctgatacgcacgtcgcggaccgtgcgntcaacgtcatcatcattcgtcacatgtcgacgcgcgcagcgctntctcagcgnccgcgcgcgcctagcgtgcctcgcgagtgcnctgtccgnagctggcgctgagactncacgatgcacantataccgatgtcgagcnctcgccgctcgatctcatctcacgnaacntgcgatctcagcatgacgntgtcgtatgatgncgagagtgtgcgctnctcgangntcacgcagatcgcacgcgcgcgatctgtncccactccgtagcagcgtcacgttgtatgtactgaacgtacacatctctctgtgcagtcatcgcgatcgtctctatgtcctgngntctcatntttcgtncatactgctacacgtcacgtcagcatatacatcttgncctgtatatatngtgagtngtagcagtctgctacacgacatcgcttacgctctactcgcgttactactntctcgagcgcgtcatagagacatnaatgatgcagacagtctgagcgngcgagtcgtcactgcaagtacgncgntcactcagtcgagctatcatctgcatgtntcgtgntctgtcatctagcgtgctgcatacagtaactgctctgtactgagtgtggtgntcgtcgatcataactcgatcatcatacgagtgtcgctcgtntagtcagctgtgcacgattcagactatntagttagagatcatgtcacgtatgtgtatctntcagcttagtcgaactctcnacgtcngacgatgtagtgtntatcgtactcatgtactagtgangctatgtatgtactctcatatagctataattactaatnaattactcatcatcatcaatncagtgttgcataaactgtacacacatgtcatatctatcgcctgncatatgtagatgtcagtacangatttgactgcaatgactattagcgagtatgacatgatactgcatattatgctatataagtatcatatcatgctcgcaccgtacgtcacgtcgtggtnggctctgctgtccgtggtctcactnttnagcgtacgtgatcatcctngtctntntcctgcgtgcggatgtcgatngagtactattcgactgtgtcgtatagctgnagtaatttgctatacgtcatgtncgtgtgctgtcacgactctcgcgtgtcatctggcgcgagcgcagaggngacgangagcatatgcgcagagtcgcgtcgtcacgctacaggcgcgccgcgcaattcaacatctactctcacgcgcatacacgtcatcatggtcacactgctagagtgacgtgtattcactaacaactacgcaatactgcagccgntcactaccnatgtgttcgggcgtcgagtagtgcctagcgcgacntgcacacactgaggatgctcacgacaaagnaagagataagtaagagacgctatagtacatcactacattaaacactactgcgtatcgagaacgacgtgtgtatgtatgcgcgtggagtagtagacgcgcactcgtgtctatataggcgcgctgctccgtcgttgtgtgctctctgctgagctagatcggattgataataatagatcatangttctgggcagcagtgtcagagtgcagaactatccgtgtgctcnacaaanaatananaaaannaanaagaaaaaaaata

SEQ ID NO: 393 - DNA, 518 bp, Glycine max
  Probeset Number=SeqID_10172
ttgttgtttcctcatctaaagcctatacagacacaaagaacatatataacactttctaatatgttctagaatctagatctctacccattctccttattcactttttcttgagataaatggaggattcagaggaagaagaacttctaaatcttactctttcagttgatgctggtaggaagaggagaaagaaaggaaggacaagggatagtaataataataatagtaacactaattctgttattattcctattaagtccaacgaagggatgatcttcaggctcctccaaatgatgggtcctgcaccacatactcaacttgatgccgatgtagctgctgggatgggtatgccagacaatggaccaaagctaatgtctatgtaacttcttttttggtagtgggtgagacgatagtcttaggagctggtgttataaagatatagtgtttgttatttttcttctttttatgttactagtactggttattctattccaatataagcaatattatattttgaaagc

SEQ ID NO: 394 - DNA, 1512 bp, Glycine max
  misc_feature (1)..(55): n is a, c, g, or t
  misc_feature (72)..(74): n is a, c, g, or t
  misc_feature (76)..(76): n is a, c, g, or t
  misc_feature (85)..(86): n is a, c, g, or t
  misc_feature (89)..(89): n is a, c, g, or t
  misc_feature (96)..(96): n is a, c, g, or t
  misc_feature (98)..(99): n is a, c, g, or t
  misc_feature (185)..(185): n is a, c, g, or t
  misc_feature (258)..(258): n is a, c, g, or t
  misc_feature (532)..(532): n is a, c, g, or t
  misc_feature (675)..(675): n is a, c, g, or t
  misc_feature (1512)..(1512): n is a, c, g, or t
  Peptide Sequence Number=SeqID_7283
  Probeset Number=SeqID_10173
nnnnnnnnnnnnnnnnnnnnnnnnnnnnnnnnnnnnnnnnnnnnnnnnnnnnnnnccccccccccacccaannnancaccaccanncanaaaaaanannaagaggaaaatgagatggatgagagacgatgatcctacagttggaaggtctgctcacgtccacgaacgctcatgtcctatcctcgncgtatggtcgaggccctgccagtacgcgagcgccgcagacctccccacgcgatctcccaccagtaatagccgnatgcgggtctgcgtgtcctctcgtgcagcctagtctacgacgatcgtctgtcttcacgcccacgcccgcaccgcacgaccgaatagctcgccaaacgcgcccacgtccagcggcgtcagacaaacgccaccaaagcacgcacacactccgtctctacacctcctgcgctgcgcaaagaaccagccctctcggcgccgctgcccgtcccttcgcaccgcgacgccccctgcctgctccgcatcgctctctcactctcctccttggttattctctntagtcttacaatttatcttacggcctcatcccgaccccacacacgcgttacagaccccgcaccctgcagcgctatactcgtatgagggtgatgacatcaatatctatatcctgaatacattcaaataacggataataaaaagnctatactactaaatgacgcgatattgtagaagtatgataatcgcaagagaaaaatgactaactcgtcgtacgtcgtggcgcttgtcctgcgcgagcgcaccgctcgagaccatatctggtgacaagctctcctcaagacgcccacgttcgcagcagacctctcagcgaagcggcactccctcctctccccgcaccgtgcgcactcctccgacgcgcgcatccgtggcgcacacgtgcatgttggaagacacgcgcgcaacaacgcgccgcgggtcgctgaccacgggactcatagagtgcactctgcccatgtgagcatcgtcaattacaggcggtgccgcccgccacgcgagcagtgtagtcatggcgtggatgagtgtagctgtctggagtggcagcggcagagggtggtggcggagagcgcgcttcggggagaacagcgtggagagccgtatgtgcgcgatgctgtcctgagcacacgcgcgacacgaccgtgctgtcgcacttacctctatcacacagctctcgctctcgctgcgagtcgatgcccccgcgcactctcatcatactcgcttctcgcgggtagggtcactgatcgtgacgcttgtcaggcgatgcggtctgagtatacgcgcggtctcgcgactgccgggtcgagggagtatgagtgaccgctggcgtcaccgacgtgccagcgacggcgacggagaacgaggcgacgggcagtggtctagcgccgtcgcgcgccgtgcgggttatgtgctcagtgcgtatgtgtagcctgtacgacatgagcatatgagtttcttactcatctacctcctacgctcgcgcgcn

SEQ ID NO: 395 - DNA, 490 bp, Glycine max
  Probeset Number=SeqID_10174
cccaataagaaaatggccgcggaggagcagcacacgacatgaccagtgctcgtccccgacagacagcggtcctctttctcatgtgcgccgtctccaaacgaaggcgcatacgcacgcacgcacgctcgccggccagacatgtacagtgtcgcccgcgcggggtctcgcgctcccgcgtccggaccccgcggctctccggtcgctcccgctggccgattcgtcgggttcgcatcgatcgggcagccgcttgctgcgccgcgcgcgctcccgcctcttttgccccgtgaaaatgggcgaaatcgtcgaggtcatgtattcatgtcctgctgttgtgctggttccgttcacgggcgtggcaatggcatggattacggggaggtttgccgagcaggtttgcctatgtgtgggtgaactgggtgcggtttttcgttttatagcctgcagcctctcgtgcgcacgaccagtaatgggtgtctgacccaagacgctg

SEQ ID NO: 396 - DNA, 1686 bp, Glycine max
  misc_feature (677)..(677): n is a, c, g, or t
  misc_feature (782)..(782): n is a, c, g, or t
  misc_feature (968)..(968): n is a, c, g, or t
  misc_feature (1098)..(1098): n is a, c, g, or t
  misc_feature (1112)..(1112): n is a, c, g, or t
  misc_feature (1443)..(1443): n is a, c, g, or t
  misc_feature (1464)..(1464): n is a, c, g, or t
  misc_feature (1469)..(1469): n is a, c, g, or t
  misc_feature (1595)..(1595): n is a, c, g, or t
  misc_feature (1686)..(1686): n is a, c, g, or t
  Peptide Sequence Number=SeqID_7284
  Probeset Number=SeqID_10175
ttacgattctcacatctcatctcttactccgtgctagtttaccgttaattttatcacctctcgctatatagtcgatgtctggagttattgactatgacactgcagcacattcttagtagtatacaccgcacacccatctacacatctgcctacactatattcatcgtgatctaccacgatggacgaagtgtagagatgatataacgcgactgcgcgctcgacgtgttcgacgagtatgtgcacccacctttccgaatattccgtgcgacgccgccgggcccgtacgtaatatcgcacgctgacacaccagtcataatatcccagcaccggcctcctccgcccgtcgtctatcatattatctgtaccgatgccgcgcgacgccgcgcgtctatcgtgtgcgcgccagcttattattcgacgcctgcgggcgtattccgcgaattttgcggagatatatggtggcgttccgactcggcgcgcgcgtgcgtcgccgcggtatattaacagatgcacggcgcgggtactataacgcgtatacttatgagactctactatgtaaactctgagggaggatatcgacataaacatagatatgtagagttctccacacatcgcggacaccgcctgtcgtctataacgatagtgctgtgagcacacacatattgcgccgcggtggngcgagttgttggtatatgcgagagtaacaagtatatcatcgcgtcatgataagagggaatcacgacgctatcatatcgtacgtgtactcgcgccactgtgtcgcngttgtccttagctagcgagcaggggttagcggcgatatatgttattccgccttcttttatagtaatatacaaccagacaacacaaatgttctgtatatgagtcacggttgtgaagacagcacgtagacgtgacaggagaggtgcgagttacattactgttgttattgtgtgcgcgtgacagtggcnacatttcaaacaccaccccgctacactgggggtgcggcggtacgatagcacctatatatatatcgccgtcgccacgagtgcgtatgaggtcgcggtcgcgtgatgatggggatgtgtctgcgtgtagacngtcgcagttatatntaccgcgcgtatatttgtacacgggcgtgagtaacaaatagttatgtacgcacggctgcacgactgatcgcgagaaagtgatacgttgtacacggaataatactatgactatcgacttcagtattacgagcgggtaagtcgcatgtagcgtatctgtatctgtctgtatgtaagagagtgatgcacagttgaacaatgctgctgccttctgcacagtctgattatacagatatgctacgaaatatggtgtcatgcgctctctagtactatctctagacggcgccctgcgcgtcatcgcgcagcgtgtagcgcgctcgaatgatagcacaancgagagatatgtcatcgttgncatcnactatgacacgtcttgagtactgctcccgcacttatatgctcgcagctgagagggcgtaaaaagacatagcgaagagagagagacggtatgaacgctgcagacgacgtatgcgattacagtatggnatcacacgatacgaatggcagtagcgtatagaccaagcacgcacgctcagtgtagatgcggtctcgctgcgtagacatatctcgcagctcn

SEQ ID NO: 397 - DNA, 604 bp, Glycine max
  Peptide Sequence Number=SeqID_7370
  Probeset Number=SeqID_10176
ttgggcttgaatcaacggttctttagaaccaaggcaccatgtaggaagtttagaggtcaaacttcaaatgtccctggcaataagcatacatttaatcgatctatgtatcatacacttacgtagaggttgaggttatttagcaggtactatatatgtacctcgtgccgaattcggcacgaggatgtatgctaaatacttccgttcacctttccctgctcgttcaacttatcaagtagctgcattgccattggatgccatagattgaaattgagtgcatagcaggttatataagcaccaagagtaatagtatatctggctccttcagcaaacttggttaattacacgggaagggacatatcttagtattttggagttttactttgttttgttctttggataatcttgcccttttgattacatttaccatcctagcgaggtctctaatcttcggattctctctctcaaagattaatgcgcctattaaaagtgaaagcaacttagtcattgaatgttcttgtttcagcttttgtgacagcgtatcacatatgacagaccatgaatttagtcaactgtgcttttatccgaataaaaaaaaaataaaaaa

SEQ ID NO: 398 - DNA, 528 bp, Glycine max
  Probeset Number=SeqID_10177
cccacgcgtccgctacttcccactttttttaagcttcactttcactgtttctgtttgttagggtggcagttcaaacttcacttcattttatcagagattgtagggttttaaatgggggattttgaatcaattaaagtaagtggaaatactaatctaatgatattgttagtatcttatctctcattctcactctcatacgtttttaataactaatggccttacgactttatgatcatctgggatttttatctcacaaaaggaatgatcttccactgatgcatatatagttaattaaatatataagagtgatgttattatttacattttcatgctatatactttgaagtcatcgcaaacggtacgttgctataattatatgggtgtttgcaaatatatatattagtttcactgaaaatatccagagactaaaaaaaaaaaaaaatgcaacaagcaaaaaaaaaaaaaaaaaaatattaactaaaaaaaacttgctgctgtgtgcattgggaaaacacgtgaaagagtgta

SEQ ID NO: 399 - DNA, 494 bp, Glycine max
  Peptide Sequence Number=SeqID_7371
  Probeset Number=SeqID_10178
gagaaaatattatatcagagtgatagtaattaccgtattcctatttataggtgcagcaactgcagaagatgcagcagctgaggcgcatgagtcccctaccctacccccggtgagcaccgctccgcctgggcccgcggtcgacgcgccccctccagcccccccccgcccccctccccgcacctgcccccccgccccccgggggcgcaagacccaagaaacaaaccccccccccccgccccccccccgccccggctcgccctcacctgccccatcacagagggacgcccccgccccagcgccccccccccacaccccctcccccccaccctttggcccccggacccccgcccgcccccccctcccccccccccccccgccccccccctcccggcccacgccccccgccgtcgttcccccgctgctccccccctcatcgccccccccctccttccctcgctccccgcccttctccgttcgctccccccccccccccc

SEQ ID NO: 400 - DNA, 384 bp, Glycine max
  Probeset Number=SeqID_10179
tcgagtcagctacgtaggcccccccccccatatgttgattacaatagcactggtggagtagagctaggttttggacaatcactcatctaaatcttgtcaaatagtggtgataaggatttatgcgtaaaatctacaggatttttatacttagagattttgttcgtagttatcatcctttgttcaggattgtaaatgtgtccgtcttcagcaatcataggtttaagcatttccatcatagtgatactttggaattgagcatgttacatgcatgcttctttttatttttcattttctgttttgtaagttaggattcatcaaaacaagatcaatgggaacttgaaaagccattaaatattgttaaaaggcaaaaaaaaaaaaaaaaaa

SEQ ID NO: 401 - DNA, 447 bp, Glycine max
  Peptide Sequence Number=SeqID_7372
  Probeset Number=SeqID_10180
acattatgtcattctcttatttttcgtctgcgacacaatcgattgactattaacacatgtttgggtcaattcgggcgcttaaagaacagagtcgagtacagctcaagacccgtgcctccaaacctgattgcagcagagaaagaagaaccttacaaggaaaatgacaaaagctagattgaacctgaaaagtttgatgtttgattttgctaacaggaggagagcttaccacacttgagatacgagattctctcatttcttccctcgaacaacttcatgaagaacatggtgatcttctctctgacctcgctgtcagcttccctgatccaccaccaccacctgctgaagatagaccagtttcttcacctccacctcgtggtctcacatattccgctgcagatgttcggtacagttaaatctccgacgcagccacgggccaccatgctagga

SEQ ID NO: 402 - DNA, 1461 bp, Glycine max
  misc_feature (187)..(187): n is a, c, g, or t
  misc_feature (231)..(231): n is a, c, g, or t
  misc_feature (311)..(311): n is a, c, g, or t
  misc_feature (492)..(492): n is a, c, g, or t
  Probeset Number=SeqID_10181
ggcacgcagcgcgcggcgccgtatagagttgtgatatacagaccgaagctctcgcgccgtgtaaccacgcctgcacactcgtgtagagacagcgctgatgcgcgcaccactatgttcataaatacaacgtgctcgcgtcatgcggtggtctctacgatatagagatgatagagtgtcagtcgcgtanctcaacgctcgagcgagagctcgagatgagtattacgctcacantatacattataataatacacatccggtgcagtgtgagtcgtttcgcggcgatacattcgtctgatattattatatatcgnactagagagtatatcgacgcgagagaggactgtcgtcgcatcttatatcatcgcacgcataatagatataagtagtagtatggggcaggcggcgcatagaagcagaaaagttatatcatacacatgcgcgagtgttaatcacgccacgactccatcagaatcagttcactctttcagtacnttctatacatcgaaatgcgtggcgtggcgatagagacgacgcgagtggaggagtctgccgatcgactactatgataaaaataggaatacatacgggcgcggccgcaccatctctggagaccagactagtgtcgtcgccctctagcacagatgcggcgtgttgtgtcagcgcggcgtgatgcacatacaactaacgcgatagaagtccggagtagatgggtgtacaatccaccgtgtgtgccgcaccccacacatgcgagatcacatcaattgccgttagacgaaataccctcgctatcctaagttcgcataatatcattatcactcgacccgcgacgtcagcacgcccgtgtaatgatttcgtcggcggctggtagggcgtccacgctctctacgctcctttctccaacatctcacatatagcaaccggcgctcaatgggtgtgtgatcagccctacacattctatactccattgtgcacacatcgctgtgcaagaccatacacctcccacacagtattcaagcgcgttgttatgcactggtgtgaccgaacgaattttttctcatactcgtgggtgtccatataatcgcccgccgcgctcatgttgatagtctccatgtaatcgagctcgaggaatgcaggtgagaattctgccctcttaagcgctcccgcaggagtgtctgcctctcgcgcactcttctcctgggttggcgggtgcttccatatatagtgatatgttctgatttttcgctcgtctgtggctcagttgagtagcagggtggcaaactctcccggtctcatcgttcgcaaacccctctgcgcgacacgcccacccagcttcatatcaacaagtcggtcatatgtgcggcggccgacgagaagatatgaaacaccacaggcggcaacaccacagcgatctcagcgctacatacaacggtgacgcgcgggcggtaggggggggcacaaaat

SEQ ID NO: 403 - DNA, 2565 bp, Glycine max
  misc_feature (1)..(12): n is a, c, g, or t
  misc_feature (2382)..(2565): n is a, c, g, or t
  Peptide Sequence Number=SeqID_7373
  Probeset Number=SeqID_10182
nnnnnnnnnnnngtagaggcctcatcgattctcttctttgccttttactacacagactatttattgttggtgtaatttcaccaaattatttataaaagatttttgtgtttgattgatgattttgtttttcaacaaatcgatgatctgtcgtgtccaaacttgtcttttatgcccaaggatcaagtgaaaactgattgttttccattgagtctgatttagttcttagcttctgcttcgatgccttcaatcatgtcacctcagtggcaagataaggctgctggtttcttttcttcctccggggtgaagcttaaagaagccaaggaatcagcaggaacatttgttggcgaggtcacgaaggatacaaagagtaatgtggccgaagtggcaggacgagtgggatcgatggtgaagagtcggtgggcacttcttcagcagccatccacaagacatgctgtgcaggatcgtttcatatcagctgctgctacaacaggtaccctcctgaggagaggcttctcagggacaaaggataaggtggttgtgggaaagtccaaggttgaagagggtgcaaaaataacagcacaaaaaagtaagactatcttgacagatattgaaagatggcaaaagggagttgcgagcactgatgtatttggagttcctattgaggttactgtgcaaaggcaagattgctgcaaacctattcctcagatattaatcaattgtgcagattatcttatagtttcaggattgaactcgccacatctttttaaatctgaaggggataaaaaggttatccaccagttggtttccctatacaaccaagattctactgcttcggtaccagaaggcacaaatcctgttgatgtagcagctcttgtaaaatattatcttgctagccttcctgagccactaaccacattagagctttataatgagattagaagtgctcgatccagtatatattccatgagaaacatactcaagaggctttccagtgtaaactacatgactctggagtttataacagcacttctactccgtgttagccagaaatcacttctcaataagatggatgctcggagccttgctatggaaatggcacctgttattatgtggcaaaaggaacggagacctgaattttatcatcaatattggaatcaggtgtcaaaaagtctttccaataagactgtggatccaacacctggctcatatactgcctgggacatgcttgctgatgatggtgaagccacagatgcatcatctcctattcctttggatgacggcacaccagtagactttggtgcaattgaggttgttcagttgctcacagaacatcataatgcaattttcacagatgcaaatgagacagtctggaaatgaattgcttgattccttttactgtatttattggttgacttggaatattggacttggagtaaacttttttcccaatccgggcatgaagatcattattagcagctatatttgaagttatccacaatcatcacgcgcggaaagatgttggatattactggtccagttttagtgataatccctatctgattttcgatgttttatgcttttaggggagcgactgttttacttcataaagggggtaaaaacagtgacagtattgtacagctattagccgattatgtattgcttacagaaattcttgccacgaatgtgctgtgttattgtggtctttcgcttggattgataatgcgatctttgtttatagtttacgtagagtcatgtattcatattcatataagggtcacttggtacacctactagtagaatttgtcatttatatctagacaaacaactaaagagaatataaaacccgggcctttttttcgggccggtccctgtttccgtcccggttttccctttggagctttttttccccccttgctttctttttgcccttggttttttcctgggcgatttttttttccgttcgcttttcctcccccgtcctattcccacgcatattgggtcccgcctggggagcctaatgagtttgcgtgccctcattaattggcttgcgctccctgcccgttttccgttggggcccccttttttgccgggtgccctaatgattccgccttcccgcgtggagagtcttttcccctgttggtctccttttcggtttttttttccaccagggggccgttccccttttggtttccctcccccttttgttcctcccagagttcccgcctttgtgccccgttcgtttgccccccccgcctgtttttcctctttgtgggggttttcccgtgggtttttccttgggcgcgggttttcccctggcgggttcttttcgcccggtttttccccgcgcccggtttcccgcccccgtttttccccccctttttnnnnnnnnnnnnnnnnnnnnnnnnnnnnnnnnnnnnnnnnnnnnnnnnnnnnnnnnnnnnnnnnnnnnnnnnnnnnnnnnnnnnnnnnnnnnnnnnnnnnnnnnnnnnnnnnnnnnnnnnnnnnnnnnnnnnnnnnnnnnnnnnnnnnnnnnnnnnnnnnnnnnnnnnnnnnnnnnnnnnnnnn

SEQ ID NO: 404 - DNA, 600 bp, Glycine max
  misc_feature (507)..(507): n is a, c, g, or t
  misc_feature (569)..(569): n is a, c, g, or t
  misc_feature (593)..(593): n is a, c, g, or t
  Peptide Sequence Number=SeqID_7374
  Probeset Number=SeqID_10183
ttttttttttttttttttaagagcttataatatcataaaattcatacagaaagacgaaaactaacgatgattatagaccatttttcgcataggacacttaacttatcattgcagctcatatctgaataaaaatatagtaaagctcgagtctgcagtgattatggacaattctatatgtaatacactatatccgttcaagtctctttctcaaggttcctaaacatatttttatatttcatttcaatatcctgcagctctttcttcatcatctgctcaagttttattctctccgagtctacttcctccctatcttctatcctattcccactctttctccctggacttttatcattaaataactgatctcttttcgtttctaaaagatcccgagtcttatacacagactctttatttagactaggatttgatgtatgcagtcctgacttaaaacatgttgatcctgctttggaccctgctgctgtacttacgcttgtactaattgaaggngtcttcttattcatgccgtcaatccctgcaactagacccccatatggcatcaatcctttctnggcctcgaagtttgcatgtctacnccgatct

SEQ ID NO: 405 - DNA, 551 bp, Glycine max
  misc_feature (22)..(22): n is a, c, g, or t
  Probeset Number=SeqID_10184
tcgagtcagctacgtaggcccnccccccccaaaaaacaaaataaaacaaaactccaacaaacaaaaatccaaaattacaataacaaaaatagattcaaatttagagttatctaaatttattacaattctaattacaatcttttattttatgcagtatctctggagaatgtccaacaaaagtgataatcaaaacaaaaatgaattagatgagatatctttatcaattcagaataagtcaatcaatagcaatattgatttcaatcaaataaaacaaaatgttctcaatgctaacttaggtaaatttgatgacatattaaatggtataaacaaagagtatgtaaacaatagtggtttggattggggtcataatcctgatgatactgtagctaagaaaatattaagtgatcctacaggtaaaaccttagaagaaagtttaaaacaatttacaaccaatccaaaaactaacagcaaaaatggaaatacaaaacccaaacaattaaatagccaacaatctacatcttcaaatcgtagcattaattctgttactcccc

SEQ ID NO: 406 - DNA, 343 bp, Glycine max
  misc_feature (121)..(121): n is a, c, g, or t
  misc_feature (298)..(298): n is a, c, g, or t
  misc_feature (303)..(303): n is a, c, g, or t
  misc_feature (322)..(322): n is a, c, g, or t
  Peptide Sequence Number=SeqID_7375
  Probeset Number=SeqID_10185
aaaaccacgggcctctccgactattccgtgggcagcattcgcgacatggtcggctcagaatgtcgacatggacgaatatccttggcccacaagccccccgaccgcgcgtgctcgccacccnattggccggcggagcgtcgcgggtataaacgctggtgcgcgtcgcctgagccgcacgccgccgcgcactgtctctttccaacgcacccgagcagtcaactgaacggcagccaaccaagcgtcccagccggtcaccgggaggcttcgccgcgtgggtgggcgtcccgggagcagcagnaacgntgcagtcgctgcaggacanggcgtcggagtggagcggcgt

SEQ ID NO: 407 - DNA, 769 bp, Glycine max
  misc_feature (616)..(616): n is a, c, g, or t
  misc_feature (640)..(640): n is a, c, g, or t
  misc_feature (644)..(644): n is a, c, g, or t
  misc_feature (684)..(684): n is a, c, g, or t
  misc_feature (687)..(687): n is a, c, g, or t
  misc_feature (691)..(691): n is a, c, g, or t
  misc_feature (711)..(711): n is a, c, g, or t
  misc_feature (723)..(723): n is a, c, g, or t
  misc_feature (725)..(769): n is a, c, g, or t
  Probeset Number=SeqID_10186
tgctgtttaatttaagcaattgtcctatgttcctcagtacctaatttgttgttattgaaaaaaagacgcgctttattgtgatgggcaatcttttctgctcagaatatcaaatccatagacgatttgacttgaagggatcttcacatggccggacaacagataagaccaaggagattgatgaaactaccaccctcaaggacctggatctcaactttgtgtttcgtctacaaaataattggttccaggatttcatcaaacaaattgagcgggattgtgagttcttggaggctgagggaattatggattacagtcttttagttggccttcatttccgtgatgataatacatatgaaaaaatgggattgtcaccatttcttttgcgcacaggaaagtgggattcttatcagagtgaaaagttcatgcgtggttatcgctttctttgaagcagagctgcaggatagggatcgagttaaatctggccggaaatcattgattaggttaggagccaatatgcctgcgaagctgagcgcatggctcgaggagtgatttgatcaatacccccttgtgcagtgggaacctacatgttgtttatatggggatatgcatttgcagatcnattcacagaacggactgctaagtnttcngtgacctatattactgtgaccaacttcttaaaggtccggnttnggcnattttttgaacggttttaangaaaaggtcaantnnnnnnnnnnnnnnnnnnnnnnnnnnnnnnnnnnnnnnnnnnnnn

SEQ ID NO: 408 - DNA, 624 bp, Glycine max
  misc_feature (48)..(48): n is a, c, g, or t
  misc_feature (469)..(469): n is a, c, g, or t
  misc_feature (507)..(507): n is a, c, g, or t
  misc_feature (532)..(533): n is a, c, g, or t
  misc_feature (543)..(543): n is a, c, g, or t
  misc_feature (545)..(545): n is a, c, g, or t
  misc_feature (547)..(547): n is a, c, g, or t
  misc_feature (613)..(613): n is a, c, g, or t
  misc_feature (624)..(624): n is a, c, g, or t
  Peptide Sequence Number=SeqID_7376
  Probeset Number=SeqID_10187
atacaagcgcgaaaagccacgattgtacgcattccaaaaatcaagaangcctgaaaacctttctttcacataaagatgtacttttaagatagtttcaaagtattaaacaaacaaacaaaatgtttgaagaaccgcacaaaaaagaacaatgaaaataaacgaaatttatcttaaaaaatgagtcttttgtaacattacccttaaaacatgaatccttagtatttatatactaaagtacactatgacaaaaattttcaagaatctttttcaattttttgttgtgaaggaacaaaggagctctcgtcataataactaaggatgccatcatcttagtacttgttccttgtatttttccaaagcgattcgtaacatacaatttcgtaaagaaaccgccttttaaagtcaagactcttttcattcggaaatctatcttgatttaaaaatcgtacagaaaactaataacagttancttaacggccgttttagtatcattgaagatgactatangacggcctatatgaaagcatttagnnttttcctttngngntaatttattaatttctaaactttgttgaaaagttagtagttaagaatttttcaagtgaagagccgntcattaatgtn

SEQ ID NO: 409 - DNA, 756 bp, Glycine max
  misc_feature (662)..(662): n is a, c, g, or t
  Peptide Sequence Number=SeqID_7459
  Probeset Number=SeqID_10188
attgtccggaacctccgtttccctcaacttttcagcgctcctctgcttttccatctaatcctccatgcacaacaacacaagtaacgctacaagaatgcttgatccagccactgaattgttgccccccccaacttcaccgacaatctcttccatcccctctactgctcctgtcaccgagtcccccgtatcattcctccaatacagaagcacgacactgggtagactaatcggagtgaacttccccaactttgttttaagagtcccatcgctgctgcggatcccttattctgccatcgagattgtcagcggtgcaatgaggattgccgacgcaaccaagaagaagaaaaaggctaattccgccgcaacgacggcggagacacggcggagttggtggcagctctgccgctacttcgtcgccaggccggcgtctctcggcgagtttctggaggtggagcggcggttcggcgacggcgcgttctacggaacggcggcggagctcgaggggatggtcgccggcaaccagcagaggaacggcagcagggtgctcttctccgacgggagggttcttccgccgcaggcagacgtagacgacggagcaccgccgccggagagcctctgtaatcggtttccggtgtcgcttgccggaatttgcagcggcggcngcggcgtagtgttgtaataataagggttttcaatttttattttttttaattttatttttttaaagaaaggaaaattttgtggctttaattttga

SEQ ID NO: 410 - DNA, 612 bp, Glycine max
  Peptide Sequence Number=SeqID_7460
  Probeset Number=SeqID_10189
gcaaattccctcatggactgctattccaagggtactaatgaagtgagacgaaggtctagattcttacgtagaagaggaagagttcgtcgattgaagtacacctggaaatctgctgcttatcattcaattaggaaaaggattaccgagagaaaggatcagcccttgcggcagtataatcccatgtggttccaatcggcttggtggaaacagtgtccctgtctttcaaatgaaacttgctgggaaaagtactggggatgccccaaaggcttgaaaaacgattttcgggcttgcttttggctaaaaaacatggcaaaacccccatggccccgttttttcgccaaaggggaattggacccaaatgtttgaagaatatttgggcccttggggggagggcccccaggggttctccccccaagggggaattttttggtgtgaaaaccggatttttctctacaacgaaaaaaaggttcccttgaggggcttatttctggggggggggccttctaaagaagggtgggggaaaactatctcccggaaaaaccgggagaggtttttttttccggggcaaaaaagggggagaaaaatttttgccgggaaaattttttttctctt

SEQ ID NO: 411 - DNA, 1616 bp, Glycine max
  misc_feature (17)..(17): n is a, c, g, or t
  misc_feature (22)..(23): n is a, c, g, or t
  misc_feature (26)..(26): n is a, c, g, or t
  misc_feature (29)..(29): n is a, c, g, or t
  misc_feature (34)..(34): n is a, c, g, or t
  misc_feature (43)..(43): n is a, c, g, or t
  misc_feature (48)..(51): n is a, c, g, or t
  misc_feature (97)..(102): n is a, c, g, or t
  misc_feature (108)..(111): n is a, c, g, or t
  misc_feature (115)..(115): n is a, c, g, or t
  misc_feature (119)..(119): n is a, c, g, or t
  misc_feature (151)..(151): n is a, c, g, or t
  misc_feature (153)..(153): n is a, c, g, or t
  misc_feature (172)..(172): n is a, c, g, or t
  misc_feature (209)..(209): n is a, c, g, or t
  misc_feature (392)..(392): n is a, c, g, or t
  misc_feature (395)..(396): n is a, c, g, or t
  misc_feature (436)..(436): n is a, c, g, or t
  misc_feature (487)..(487): n is a, c, g, or t
  misc_feature (577)..(577): n is a, c, g, or t
  misc_feature (588)..(588): n is a, c, g, or t
  misc_feature (713)..(713): n is a, c, g, or t
  misc_feature (737)..(737): n is a, c, g, or t
  misc_feature (802)..(802): n is a, c, g, or t
  misc_feature (805)..(805): n is a, c, g, or t
  misc_feature (820)..(820): n is a, c, g, or t
  misc_feature (841)..(841): n is a, c, g, or t
  misc_feature (847)..(847): n is a, c, g, or t
  misc_feature (850)..(850): n is a, c, g, or t
  misc_feature (877)..(877): n is a, c, g, or t
  misc_feature (966)..(966): n is a, c, g, or t
  misc_feature (982)..(982): n is a, c, g, or t
  misc_feature (1015)..(1015): n is a, c, g, or t
  misc_feature (1064)..(1064): n is a, c, g, or t
  misc_feature (1081)..(1081): n is a, c, g, or t
  misc_feature (1097)..(1097): n is a, c, g, or t
  misc_feature (1099)..(1100): n is a, c, g, or t
  misc_feature (1155)..(1155): n is a, c, g, or t
  misc_feature (1238)..(1238): n is a, c, g, or t
  misc_feature (1288)..(1288): n is a, c, g, or t
  misc_feature (1339)..(1339): n is a, c, g, or t
  misc_feature (1420)..(1420): n is a, c, g, or t
  misc_feature (1518)..(1518): n is a, c, g, or t
  misc_feature (1570)..(1570): n is a, c, g, or t
  Peptide Sequence Number=SeqID_7461
  Probeset Number=SeqID_10190
atgaatagttatgtttngtgtnnaanaanagggnaagaggaanagtannnngagagtgaaagaaaggagagagattgtatagtgggtgtgattaacnnnnnnaaaacnnnncggnaaangcattcatagtatacaaacacgtcgcgatgcnantatatctccttaaatcacntacataattcttgtttgtaattgagttagaatttatntaccaacaacggagcgcagaatagaggtagcgaggtgtgacataactatgaatgagcgcgagttatgcggtcatgtcgcaatctgaataaaatctggtggcgacggcacacaacacgcgcggggcgtcgcgtctatgacggctcgtctactatgcatcgcctttcatatacatctctatacanacnngctcgtcgtgctacacatcgtgcgacagtagcgcgcgganagtatgaacatgtggtttgtatgactcattttgtttgtggtgttgtgtaangagcacgtatgaatgcgcgtgcgtctcttacgcgtgcgccgctgcgacgatgtcttcgttggtgattgctgtacgcgttgcacatatttncttatatgttntgcatacacacacgttgtccacgccgaacgtcgttgagagaccacacgcgtgcgtgatgttgtgttacgtagtaatcgagttgctgccacgccaaatactcgatactatacatggggctgtgctnactaacactgcctcgctctcactntctcttcgcgtgtcggcgtaagtacaacacatacgacgaaacgaccgatcgatactactaaacanatnacacggcgcgcggtncgcatatatggtggagaatgngtaganagngatataacagagggaagacaatcgtcnaccactcctccgtgtatatatacacactaccgcgcgcagcgtcgtcgctgtcttatgtttagtgtgttacatctctctctctcgctctnctgtcacctactcctntctgtgatgtgagcagatctagagtacggtcgncgcgcaccaccacctccatcaccgtccgcatgatatatgtatagagctnctagagtgtgcgtgagnaaaaccccaacaaccncnncaccccacggacactgcgcatgcgtcataataatatatatatcatttactctctntcttctgtcgtctctttatttgtatcttatgtctgtctgtcttgtattcgtctcaatctgttgtcttgtgcgtataaatatgnagagagcatcattcgcggcctgcgtacactctcttcgctctctgcacctncacccccccgcctcacaccccacacagcgtgcggtgacatcccactcctanatttgtctgtataacagagtctccgtactcttctcttgtgtgctgtgacatattcgacttgttctcgatccgtgtctcctnctctgctcgatggggcgacgcgcgtgagaatagtgtggctgttggtcgtggtcacgctcttctcctctcttctgtgtgtctgactcattcatcattcncgacactacagcgtcaccatctgtgtgcgcgcgggctacatagcacaacccnccacgcctcattgtgcgttctgctctctatatctcgtatatctatt

SEQ ID NO: 412 - DNA, 423 bp, Glycine max
  misc_feature (98)..(98): n is a, c, g, or t
  misc_feature (100)..(100): n is a, c, g, or t
  misc_feature (102)..(102): n is a, c, g, or t
  misc_feature (145)..(145): n is a, c, g, or t
  misc_feature (411)..(411): n is a, c, g, or t
  Probeset Number=SeqID_10191
gccgccgcaagtcaccgccgctagcctggaggcctcatgccgccaccgctcgcccctttctctgtaggtcacccacgcacctgggacccggggccgtngncntcctccccaccaggctcgaggaggcccgaggaggtgaccatgnggagcgcgcagccgtcggagccatgggtagatccagccgggaccgtcggcaaccatccctccttccggcgccgatgaagaattgaagaggcttgaggagaatgggcgcatgggccgtgcgcgtctcccgcgctaggagccaccggtcctcgtcatctgctaggatccacgaggaatcgatccatataatgtttgcgaggagctcggttagtgttgatgcctcaagggtttatgcatgtcagttccatgttgcttaaagccactgtnaccatggctact

SEQ ID NO: 413 - DNA, 464 bp, Glycine max
  Peptide Sequence Number=SeqID_7462
  Probeset Number=SeqID_10192
aaaaactaagattagccatggagaagaagactaaccagaccatcttctctatattttctcttcttctcttttcttcatgtgtctctgcccagcttcggacaggtttctaccagagatcatgcccgaacgttgaaaacattgtccgtaacgccgtccgtcaaaagtttcagcagactttcgtcaccgctccagccaccctccgtctcttcttccacgattgcttcgttcgcggatgtgatgcttcgatattgttagcatctccgtcggagagagatcatccagatgacatgtcattagctggagacggatttgacacggtggttaaggcgaagcaagccgttgatagagatcctaactgccgcaacaaagtctcttgtgctgacattttggctctcgctacacgtgaagtcgtcgttttgacaggaggaccgagctacccggtagagctagggaggagagatggc

SEQ ID NO: 414 - DNA, 481 bp, Glycine max
  misc_feature (358)..(358): n is a, c, g, or t
  Peptide Sequence Number=SeqID_7463
  Probeset Number=SeqID_10193
ccttccatttccgatccttcttccggccggcggcagcaacaacacccactggccgagcctagcaagaagcttctttcaagaatggatgtcctcatcaagaaccccaccggcagcacgacccccctgagggtctacccatcggacaccgtgcgtgatgtcaaggcaaagattcaggaacaataccccctcttctttggtggggtgcagctggatgacagccttacactggccaattacaacatccagcatgaatccacgatcgacctccgcgagaagatgaacatgaaggtctacgtgacagagacggtggcgggcaggaccatcacgatcaacgtcaacagtctagacaccgtcgatnacttgaaatccaagatccaggaccttgagggcttcccgaaggctcagcagtgcctcgtctttgccagcacgcggctggatgacgggaaccgcaccatgattggccacaacattggaatgagtc

SEQ ID NO: 415 - DNA, 462 bp, Glycine max
  Peptide Sequence Number=SeqID_7464
  Probeset Number=SeqID_10194
tttggttttcccaattcaacgtaaaggtgcaatgggtatcgagaaggctcaaatcaacattgtggtggttggttatgtggactctaagaagttaaggaactcaataagcctgttgctgagagacaaattgctgtcattaacttaactgccaaatataaggcctgcccatctcgccgtccttttgcacgaggggttctcaattggctcagttcctcttcgtggtggttggtcctgtggacccgggggaggcttcctccacttgcgagctgtagtaccctgttggggagaatgaagctcctggccttgccatatgtgggcttgcccgcccggccccggtggggtacctgtttatttggttttccattctttctcgatccctattgtttctgtgtcatcttccgcgggttgtttttgctagctttgctacggttacctcctctgtgttgtcgctcttgctgaaca

SEQ ID NO: 416 - DNA, 742 bp, Glycine max
  misc_feature (334)..(335): n is a, c, g, or t
  misc_feature (410)..(410): n is a, c, g, or t
  misc_feature (627)..(627): n is a, c, g, or t
  misc_feature (660)..(662): n is a, c, g, or t
  Probeset Number=SeqID_10195
accaaactcatctctctttgctacctcttagtcaaacaaagtaacaaaccatcctcccctctcttctcttcttttgttctctagatttcttctctcttgtttcttagaatccgtacaatctaatcaacacaacaaaaatggatgcaattagttgcatggatgagagcaccaccactgagtcactctctataagtctttctccgacgtcatcgtcggagaaagcgaagccttcttcgatgattacatcgtcggagaaggtttctctgtcccccgcgccgtcaacagactatgccgtgtttgaaagcgcgcgagcgcagtcgtggatcctgatggnncgcgcagcggcgctgaagtagagtcgcgaaaactcccctcgtcgaagtacaagggcgtgtgccccagccaacggncgctggggtgcgcagatttacgagagcaccacggcgtgtggcttggaacgtcaacgagaagagaaggcggggcgtgcgtacaatcccccgcgcagcgggtccgcggaaagggacgcgtcacgaattcaagcgctcgccggcgccaacgacaaaagggaaaaaatcgagtcctcactcgcatccaaacccgagatcgtcaaatgctgcgaaagacacntacatgacaagctggacaagaggaaccccccgnnnccctcccccggggggaaggtcccccgcggcggacgaaaataatttttcgggggggttaaaaaggcagggaggatttttta

SEQ ID NO: 417 - DNA, 780 bp, Glycine max
  misc_feature (1)..(1): n is a, c, g, or t
  misc_feature (737)..(780): n is a, c, g, or t
  Peptide Sequence Number=SeqID_7465
  Probeset Number=SeqID_10196
naatcagagattcgtcccgtgcctcaccctcccaccccaacgatttcgtcgagcacctcgcgggcaaagcaggcggacggcggacggacaaatcatggaggagagcggcgcgagcgcggcggccgtagtccctcggctgttggcggccaaggaggagtccgggaaaagcttctccgacatcgcggccgagacggggctcaccaacgtctacgtcgcgcagctgctgcgccgccaggcgcagctcaagcccgacatggcgcccgcgttccgggcggccgtcccggcgctcaccgacgagctcgtggagctcatgatgcggccgcctttccggtcctaccacccggacatcgtccacgagcccgccatatacagattgaatgaagctgttatgcattttggagagagcatcaaggagatcatcaatgaggattttggtgatggaatcatgtcggctatagacttctactgttcagttgacaagattcaaggggctgatggaaaagaccgtgtggtgctcacatttgatgggaagtatctgcctcacactgaacagaaagccgcgaatatgatgtcgaagttgccctgcaaggcaccttgagataatgagatggctggtactgggagaaggggggtatgtagcttcactaatgtctgcttatacttcggacaaaaaaattgagcgtcccttttctagtctgaatgatcgaccaaataaagagtggtcatatagtatgtannnnnnnnnnnnnnnnnnnnnnnnnnnnnnnnnnnnnnnnnnnn

SEQ ID NO: 418 - DNA, 639 bp, Glycine max
  Peptide Sequence Number=SeqID_7466
  Probeset Number=SeqID_10197
acaaagcaaagctcatccttgagttaaaaaatggcagcagcttcttccatggctctctcatccccatccttggctggcaaggccgtgaagctgggcccatcagccccagaagtgggaagggtgagcatgaggaagaccgtcaccaagcaggtctcctcaggaagcccatggtacggcccagaccgagtcaagtacttgggcccattctctggcgagcccccgtcctacctaaccggtgagttcccaggcgactacggctgggacactgctgggctttccgcagacccagaaaccttcgccaagaaccgtgaactcgaagtgatccactccaggtgggccatgctcggagccttgggctgcgtcttcccggagttgctgtcccgcaacggggtgaagttcggagaagccgtgtggttcaaggccgggtcccagatcttcatcgagggagggctcgactacttgtgcaacccaagcctgatccacgctcagagcattctcgccatctgggccacacaagttattctaatgtgtgccgttgaaggttaccgtatggctggtgggtcactaggagaggtcactgaccccatctaccctgttggctgcttcgacgcatatgggcttgctgtagacgctaaggct

SEQ ID NO: 419 - DNA, 1457 bp, Glycine max
  misc_feature (77)..(77): n is a, c, g, or t
  misc_feature (95)..(95): n is a, c, g, or t
  misc_feature (103)..(103): n is a, c, g, or t
  misc_feature (260)..(260): n is a, c, g, or t
  misc_feature (393)..(393): n is a, c, g, or t
  misc_feature (545)..(545): n is a, c, g, or t
  misc_feature (570)..(570): n is a, c, g, or t
  misc_feature (618)..(618): n is a, c, g, or t
  misc_feature (623)..(623): n is a, c, g, or t
  misc_feature (632)..(632): n is a, c, g, or t
  misc_feature (771)..(771): n is a, c, g, or t
  misc_feature (877)..(877): n is a, c, g, or t
  misc_feature (916)..(916): n is a, c, g, or t
  misc_feature (920)..(920): n is a, c, g, or t
  misc_feature (933)..(933): n is a, c, g, or t
  misc_feature (944)..(944): n is a, c, g, or t
  misc_feature (993)..(993): n is a, c, g, or t
  misc_feature (1025)..(1025): n is a, c, g, or t
  misc_feature (1085)..(1085): n is a, c, g, or t
  misc_feature (1181)..(1182): n is a, c, g, or t
  misc_feature (1227)..(1227): n is a, c, g, or t
  misc_feature (1254)..(1254): n is a, c, g, or t
  misc_feature (1323)..(1323): n is a, c, g, or t
  misc_feature (1360)..(1361): n is a, c, g, or t
  misc_feature (1364)..(1364): n is a, c, g, or t
  misc_feature (1366)..(1366): n is a, c, g, or t
  misc_feature (1368)..(1368): n is a, c, g, or t
  misc_feature (1370)..(1370): n is a, c, g, or t
  misc_feature (1372)..(1372): n is a, c, g, or t
  misc_feature (1376)..(1376): n is a, c, g, or t
  misc_feature (1399)..(1399): n is a, c, g, or t
  misc_feature (1402)..(1402): n is a, c, g, or t
  misc_feature (1415)..(1416): n is a, c, g, or t
  misc_feature (1422)..(1422): n is a, c, g, or t
  misc_feature (1437)..(1437): n is a, c, g, or t
  Peptide Sequence Number=SeqID_7467
  Probeset Number=SeqID_10198
caagactatgtcgacgggcgatagtatggccgcacgtcatgagtcccacctctcactcacctcgctcctgctcgtgncctaggcctatgcacatnacgcgatnacatacgcatggacgagggaagtgcacatatagaccacgcctgctcattgctctagcgaatagcacggtgcacagaactaggccagccacgcgccacacgtgcctgtgcgagatggatgtaatatgacgttggtcatgcacagacatcacacctagnacaagatatgagagagggtagtggagtgggcctgtgactcgccacgcgacacgatatacagtctaacatcgatcaccagccggcgataatgatagtgttttgtgattggtccgggccgtgtttgtgtgcggtntcgatccatcactcatcaccataacacacacacaatatatatggacgatcctgtcgtgtgtgttgcgttggcgagtatattcgttgcactaccacgaacacgacacatagcggtgcctgggactgtatgtgaagagtatgggtgttgttttntattgaatcgagattgtaggttatnattaatataataacactactgctcgtggtcgggtgggtctgtgtcttntgggntttgttcgngcatgaaactactacatctctgttgacagtcacatatatctcattatctcgcgtgtctatttgactgccattgaccatccttctctcatgtaagagtgatagtgatcgcttctgctatttcggcgctatgtagtttatnatatctattatattatatttattataaacacaccacagagaaagcagactacagtaccaatctaagacacagcgacgcacaacaacaccagtgagtggtctgtcgncgtcttctctgtctctctattactactcttatatttatnatanggtactatcttcncatgtttgatngatatagtcaccacacgcacagcaacacagacgagaattacgggcgaanataagcgagggcagcacaaacagtcggtcggngcgcgcggcgatatgtgcagacgtgctctctcgaccagacatctattttgtctagaaggntggtgagtcgggtggttactatacacacgtaagcctgcctcacacattggtgtataaatatattatagagtgtaagatcccatcctcacgtctcgnngtgggtcacaggtggtgtgtatatcaatctagcagtgcgatatantggtggtggtggtggcgcacataccanccagcatccctactctctctcctcgctcgctctcggtctgcccttctctcaactatacgaaggagatgngtgggaaaacagatataatagaggcctctgcgttgtnnggngngngngntttntctcttcttctattgggttgtgntgngtgtgtgtgttgnngtcggntgggccggaaagaanaaaccacaacacacaaccac

SEQ ID NO: 420 - DNA, 1840 bp, Glycine max
  misc_feature (56)..(56): n is a, c, g, or t
  misc_feature (58)..(58): n is a, c, g, or t
  misc_feature (78)..(78): n is a, c, g, or t
  misc_feature (126)..(126): n is a, c, g, or t
  misc_feature (233)..(233): n is a, c, g, or t
  misc_feature (289)..(289): n is a, c, g, or t
  misc_feature (397)..(397): n is a, c, g, or t
  misc_feature (456)..(456): n is a, c, g, or t
  misc_feature (535)..(535): n is a, c, g, or t
  misc_feature (599)..(599): n is a, c, g, or t
  misc_feature (968)..(968): n is a, c, g, or t
  misc_feature (996)..(996): n is a, c, g, or t
  misc_feature (1049)..(1049): n is a, c, g, or t
  misc_feature (1305)..(1305): n is a, c, g, or t
  misc_feature (1307)..(1307): n is a, c, g, or t
  misc_feature (1422)..(1422): n is a, c, g, or t
  misc_feature (1431)..(1431): n is a, c, g, or t
  misc_feature (1444)..(1444): n is a, c, g, or t
  misc_feature (1480)..(1480): n is a, c, g, or t
  misc_feature (1513)..(1513): n is a, c, g, or t
  misc_feature (1582)..(1583): n is a, c, g, or t
  misc_feature (1654)..(1654): n is a, c, g, or t
  misc_feature (1673)..(1673): n is a, c, g, or t
  misc_feature (1704)..(1704): n is a, c, g, or t
  misc_feature (1810)..(1815): n is a, c, g, or t
  misc_feature (1817)..(1817): n is a, c, g, or t
  misc_feature (1822)..(1822): n is a, c, g, or t
  misc_feature (1826)..(1826): n is a, c, g, or t
  misc_feature (1828)..(1828): n is a, c, g, or t
  misc_feature (1832)..(1832): n is a, c, g, or t
  Probeset Number=SeqID_10199
ccgcacgacgctcgctctcatcgctgcgatacggtcggcaacagcgtagtcacagnancttatcgctatagagttttngctacgcgtcatactcacatacctctgcgctcctgcgcactctcgacngtagggagatcgatgcgagagctatgtcgtgagtgatgttagacagacagtttcgctgacggatgatctgccgaagccctccactcactcgaggcgtctcccatcancgcactcgtctttcgacgcttcgcggacggtcgcctccgcgtcacgtcgtgcgaancaccgacgtgactcgtcgcgagtgtcgtgggtcgatctcacacatcgtcgtgttgtacatagctggcagtgtgtgcagcgcggtgctgccagcgactgccacaacgantgctctgttttcgagaccgcgagacggggacggcgcgccgcggcgtgcgggtgtgcatnagggaggaggtcgtgccgcgcatacggagcatgagagatgatggacaatacataagtggcacgccatacacactcgtcnagtagcattagtttcggattcgtgctaaaactctccttcagacgcgtgacgggacgggaataangagagcgttgatagagattacatgacgaggatatttcgtatgtgtgtattatcacgaacttccaaactcgtgtctagtagtgtgatcgagcagtgtgcttgattacagtgtggatcgttcatcctcactcacatatgatgggctgtttgatctagcaatatacgtcttggggtggtcggtgaggcgtggtagtgttgaatgtgagagtgcaccaagcacacgctctattcctctcagtgtaagtatctcctctgcgacacgtacactggtccagacgcgagcgagtcaccagacacgcgcgcgtcgccgcaacattcgtcatcgcagggtgatctttcctcaatacgtgagtagtgcgcgtcacagatnttaataagcaattatcttgtcgcgcaanttatttagttaagaatacgcgcggcacatgggcgagagcaggggaggtcggangccggcgcgtgtcggctaaggacgtacctgctcgtcgaggctatgccgcggaaagcgtttggattgacgtagtgtgttggtagttcgaagtattctatgagacgattgcatagcatgtattaacgcagatatatttgtcactgcccacagccctacgctcgccttgagcatctccatcttgatctgatatattctaagctgaggtcactcgcttcatatctgcaactgtaatatctcccatacgcatctcatgatnanggtacacagcgaccagacaaacaactgacgcgatatcaaccgcggtagcagacgtcatcggagggcgcacggagggtcgaagaagatagtacagtaaggagaagagagatatgtngcgtagtangagatgcgccggnaggcttggcgccgtttccgggggaggagggcgcatngagagtagaagtatggagatcggcgtccccgcncctcgcccgccgcggctccgccgagtgtccgaagccgcgcctgcccctccaggggatcacaaatccctnnctctttgggcgcgtgaagggtcggaaagcctcggggtgtcaacgggatacatatcaacacccaccacggangaaagaatcctcccccgtnatccatcgtggcgtcgccctcccgcgccacncggcggtcactgtctcggccgctctccgtctcgggggggcgaccccgcccacgcgtttttggataaaagtaaatgaggagttatataaattaatattaattatatnnnnnnanttaanaaantnaaanttttattt

SEQ ID NO: 421 - DNA, 584 bp, Glycine max
  misc_feature (460)..(460): n is a, c, g, or t
  Peptide Sequence Number=SeqID_7555
  Probeset Number=SeqID_10200
tcagctacgtaggccccccccccctaccctgatggaagaccttattatgagaagttcaactacggtcttatcaatgataatgactactgtgagttggttgatttctataaccttgcccatcctgagaacatgttcgaatcgatgaacttcttcactgattactcaagaactggtttgaccagatctttggttgtcagaaagatcggtgtcgataccatgagacaagtctccagatatatggagaagaaggacttcaactctgctcagtatcatttgactcctctgatcaccaacttcttcaccaagagagtcgatatccatatctaccacaccatcggaaagcatttcaactgtgccactcagatgtacaaccacatccccggacacggtgtcctcaagagaaaggatcttattgtcgacagtgttgattcctatgctgctagattcgaaggtggcaganaacactgcttcaacaagaagaagttcttcccttactcctacagactctacatggaagacgaatgcaaggctttcttcgaacacatcaactctgagacatacatcaagagtctcgagaaggaacc

SEQ ID NO: 422 - DNA, 507 bp, Glycine max
  misc_feature (433)..(433): n is a, c, g, or t
  misc_feature (445)..(445): n is a, c, g, or t
  Peptide Sequence Number=SeqID_7556
  Probeset Number=SeqID_10201
gatggcctgggcaggaatatccgcgaattataccagctcaaaacagatgcctagcgtgtaaatacgcgcttttttcagtaaattgtagtaaatccatgcatacagatgaaagctgtcgcctggttattacttgcttgtttacttccctgcctgctcatggggcagaattacctgcgtggagaagtgaaggatgagcaggggcgtttattacagggcgtacgcatacaattggcaagcaccggcacttatccatattataccggcaacctgggcagctttggcatcccttcttccaggctcattgataccatcacattgtcttacgaaggttatgataccctgcgtactgccatcgataccaggaagccccagttctttgttttgaaaatgcagcctgagttggcaaatttttacagggccaggctcagctctntcaccaaccatnttcaaacagaaccagttgtacctgcttctgtaatgggcgagagctacagcgacattatggaa

SEQ ID NO: 423 - DNA, 1372 bp, Glycine max
  misc_feature (395)..(395): n is a, c, g, or t
  misc_feature (483)..(483): n is a, c, g, or t
  misc_feature (517)..(517): n is a, c, g, or t
  misc_feature (710)..(710): n is a, c, g, or t
  misc_feature (879)..(879): n is a, c, g, or t
  misc_feature (1238)..(1238): n is a, c, g, or t
  misc_feature (1280)..(1280): n is a, c, g, or t
  misc_feature (1318)..(1318): n is a, c, g, or t
  misc_feature (1362)..(1362): n is a, c, g, or t
  Probeset Number=SeqID_10202
cgtatcttctcagattatgtaatgatgtcgcgctcttacgagtgactcacaatcgccgaggtcaagagctgccgaggtacaactcgtcgtacacgagataagtatattgcgcaacacatttatcagatctctattctctcgtgaggtaatattacatcggtgacgttggtggagtcaagcacagcgctgttgtactacatcgcagacagcttttggctcatctctgttggatattgtaggatagtacaggagacgtttgcccgtttgtgtactgatgcgataacgctgctcggcgcaatgctcgattctctctcatcgaagttgctgcgtgcgtcaccgtcgagctcgccaggctgacattctcgacatctgacagtgtatctctgtcgtgcgantttcatctctccgcctcaggcttagtcatcacgtgatccgatctccgtctccaactcgctcggagcttatatgcatacaggtcgtggncggttattgtggagcgtaacgtagtccgtccgtnttaccgcgccacgcagcggcgtgcctatatcgtgatgacgctagagcgttccgtgccctctagacggtcataggacgaggtgcgcggacggcgactgaggcactagcctgatcaagtggggtggaggtataatcacgctaacattagatcacatagcggttacttcagcgcgtcggaagagaggcctgagggnaagggcgcggacaagcttgagacttccgaggcgtcatcgtagcgaagagcggtagtcgacagtcgcagtggcggggccgtctctagtgtacaaaatagtaggtgtgataacagagcagaccagtatcgacagtttagtgttccgtcggtctaaactcgaactacacctnggacagaagcgagccgagggagatctagcgtgtcagctcttggtcgtgactgcgcgtgggtgagttgtcggaggtaaagatactctgatacacgtccgcatcactactcatctcgtttgtaaggtggtagacttacgtccatcactgcgttctatctgcttcagaccagatcccgtctcagtctggctgaggaattaccgggtgtacgctcggcaaggacgagggggccgcgcctttattcctcgcagggagcagagagagcgccggggcgcaggtgctctgtttgcgcatctaaggacgcattcttagtgttaagtgggatattgtgtagtgaactcttcccgccagtgccgcgtggnggattccacttatttataatagtagccgtcctcgctctatantgtcgttaggagattggccaagtgttcggcggcactcncttgtgattgtggcggcgtgaggcgggggagagagataggacanagtcacacaa

SEQ ID NO: 424 - DNA, 1559 bp, Glycine max
  misc_feature (20)..(36): n is a, c, g, or t
  misc_feature (41)..(42): n is a, c, g, or t
  misc_feature (54)..(54): n is a, c, g, or t
  misc_feature (63)..(64): n is a, c, g, or t
  misc_feature (73)..(75): n is a, c, g, or t
  misc_feature (83)..(83): n is a, c, g, or t
  misc_feature (89)..(89): n is a, c, g, or t
  misc_feature (95)..(95): n is a, c, g, or t
  misc_feature (99)..(100): n is a, c, g, or t
  misc_feature (122)..(122): n is a, c, g, or t
  misc_feature (152)..(152): n is a, c, g, or t
  misc_feature (194)..(194): n is a, c, g, or t
  misc_feature (204)..(204): n is a, c, g, or t
  misc_feature (240)..(240): n is a, c, g, or t
  misc_feature (444)..(444): n is a, c, g, or t
  misc_feature (447)..(447): n is a, c, g, or t
  misc_feature (515)..(515): n is a, c, g, or t
  misc_feature (522)..(522): n is a, c, g, or t
  misc_feature (531)..(531): n is a, c, g, or t
  misc_feature (533)..(533): n is a, c, g, or t
  misc_feature (561)..(561): n is a, c, g, or t
  misc_feature (840)..(840): n is a, c, g, or t
  misc_feature (892)..(892): n is a, c, g, or t
  misc_feature (934)..(934): n is a, c, g, or t
  misc_feature (1070)..(1070): n is a, c, g, or t
  misc_feature (1305)..(1305): n is a, c, g, or t
  misc_feature (1322)..(1322): n is a, c, g, or t
  misc_feature (1358)..(1358): n is a, c, g, or t
  misc_feature (1460)..(1460): n is a, c, g, or t
  misc_feature (1505)..(1505): n is a, c, g, or t
  misc_feature (1541)..(1541): n is a, c, g, or t
  Peptide Sequence Number=SeqID_7557
  Probeset Number=SeqID_10203
gggggggggggttttttggnnnnnnnnnnnnnnnnnatggnnggggtgtgtgtnggtggtggnnaggtttcannngcccaacnccctancttgtntggnntgaatagaagaggtagtggtcnatagggagaggacgagagtatcaatacgantccaacatctgactcacactctcaactgattatatagatagntaataatacntaatatgaagtatataccatacacttatctccaacntcacagctctctctctgcccccctccgattgggagttatgtggagagtggaggacaagatcgcgaagacacgcaagtctctcatatattcgtagtgcatgtatgcgatggaggagtatgttatttttcccgcgttctctatctctatactatatatcatcttcgccgtatccacatcctcacccaagcctcgctctctcatccntcncatcgatgtgatatacgtacgacagtgcaatcaccccacctctggctacgcggctctagatgagggantacgccngcgcgtgcngngcgggagcagagaaacacaaaactaagncgcgcgcgccacagacagcctctacctctctctgagtcctcgctcgcgtatgttctcctctcttctgtgcacaaccgccaacatctcttcctactacatctcatctatcctcatctctctctctccacggctgagccgcggtgcacttaagtcgacgtgtcttacagatgatagaacaggatgatcaatcaacatcacgtcgtaccgcgtatcgaacttgtaatacatcattattaacatgattacagggagacaccaccacaaagccggagcgggcgncgcgagcggctcgtgttcgagcgcgcggctgcagctgatcttgcgcataacngtgttgaagaaatgaccacaacacgcgacaacaaacggagtnacgacaagtcccacaccatagcaacgagcgaacaaaacatcagatgcgatcacacacatacgcgatgcgtccgacgccctcctcatctacgtcttagcgcacatcacgctcccgactctacaacacactagagtanatcagactaacacaatctgactgacactgcctacatacttaaacagactcataccttcagtatatcttctccctaaccttctcacgtcgtcacgcaacctaccgactcgcgctcgtctgcatgacagtacatgatcatcctacacgagtcgtgtgtccgcacgacacgactactcatctttacgcacagcactagcgatgcgtgccaatcaagatagagagaaagacacacatcnagacagagagacgatancaagaacaatgacacgagacgactagagtacatatnacagcatccgctgcgcgcgcctcgacccgtcataagtcatataatgatatgtatagtgtgtatgcataacgacgtacgggctatgtgtgtcgtatgagatangatattgagctacatcgagcagtagactatataatacatctccanccctacatcgcgcatgacaccaacagcacgctaacnacccgacacacgataggg

SEQ ID NO: 425 - DNA, 628 bp, Glycine max
  misc_feature (139)..(139): n is a, c, g, or t
  misc_feature (191)..(191): n is a, c, g, or t
  misc_feature (225)..(225): n is a, c, g, or t
  Probeset Number=SeqID_10204
aattaagagttatattatcttctgaagcgtgagggcgatggaggaaagaaagccactcaaactctacttcattcatttcctagcagcgggtcacatgatccctctctgcgacatggccacactcttctccactcgcggncaccacgtcaccatcatcaccaccccctccacgcccaaatctccgaaatccntcccctcccaccctctcctcccgctcacacgttnagttcccctccatgaggtgggtctccccgacgaatcgaaacatctcccgcgtctccgacttgacagcctcggaaggtgttagggccaccgcatgctccaccccccatcagggcttctgggacaaaccccacccaatgatcgccccgaattttcttccctggggggagattggccaaaaagttccaatcccgaattgcctaaaggggtttcccttttacaatggggggaaaaacccccccgagagttcgaattcccccaaaaaaagggccccccccccccacccccaaaggaacccgagaagaaattaccaaaattctgaagcggggggggaaaaagaaaaaaaaatggggccctcccccccctttttggagaccgggggagaaaaaccccccccatcaaaaaa

SEQ ID NO: 426 - DNA, 1424 bp, Glycine max
  misc_feature (1)..(29): n is a, c, g, or t
  misc_feature (51)..(51): n is a, c, g, or t
  misc_feature (69)..(69): n is a, c, g, or t
  misc_feature (109)..(109): n is a, c, g, or t
  misc_feature (117)..(117): n is a, c, g, or t
  misc_feature (204)..(204): n is a, c, g, or t
  misc_feature (916)..(916): n is a, c, g, or t
  misc_feature (1092)..(1092): n is a, c, g, or t
  misc_feature (1202)..(1202): n is a, c, g, or t
  misc_feature (1304)..(1304): n is a, c, g, or t
  misc_feature (1336)..(1336): n is a, c, g, or t
  misc_feature (1400)..(1400): n is a, c, g, or t
  misc_feature (1419)..(1419): n is a, c, g, or t
  Peptide Sequence Number=SeqID_7558
  Probeset Number=SeqID_10205
nnnnnnnnnnnnnnnnnnnnnnnnnnnnnaaggtgtaagaatgagggatgnaggagggatgtggggggntcaggggttgagggtgttgttgtgttagtgtgtttttgtngtgtctgngtggtgtggttaggggtggtgggttgtttagagtgtaggaggagagagaaattatgggatatataatttgcgggggtgaggtatganaggggggcgggggttgatttgagctgatgggtggagggcgagttggtagaggtagagggtgcgatgtcggtgggaggggatgtggggagggagagggagaggttgtagagaaggtaggggatggggtgtgagagcgggtgaggaggggtctgaacatgagggtggaatggagtagcagatgaaggggagagtaaggtgggaggggtgtgggtgcgtttcgtggggtgagatacggttgcggttcgcacagtcatgatagagataggagtggtgtggaagtagaagagagtgaggaggagaggagagagggtgtgagcgtggagagacggaggcaagtgagagatgaggagggcgacgggagagagggagaagccccggagagagaggtggcagagagatgaagaggggagaacagaaagaagaggatgcaacgatggaagaagcacggaacaacatcggaggaagagaagagagagggagcggtggagagcgcagtgcagccacacaccaagcgcgcgataccgacggcggcggagaggagcagtgcgggagcagacgagataggaaggagagcaggaggaagtcgacagtgtgagagatgaggagctggccgagggagtcgaggagccagtagaagcgagcgtggacggaggttatgagggatggtgctcgaatgcgcgtgttgtgggagggtattgtgaggtgatgtagnacgtgtagtagagaggatggaggacgcgagtatgagtggggatgcgtcagatagatggtgtatgatgtctcgcctaactgcatattataatttatgtcatagtgatatctacgcatgcatgatgcaaggacatgttacaacggacgctcagctgacactattcgttgcgagccgcntgcgccataacgtcataacgccgtccggtagcacggtcgagtgtggtaagcgaggagcacacgaaagagatcgagagagcagatggaaagtcgaccggaggataggaagncggtgcggatgggcggtcgaggcgcgcggcgcgcgctgccgcgaggcggcatcagatcctgtgcgcattgcactctcctgttcgtctcttggcgtgattgcntacggagtggctaggatgttgcagtcgtcgcngaccccgcagctcgctatatcgcgtctcgcgcggtgtcgagtgggtaggcagcacgacataatnctgatgcgagacaggcaantgcgc

SEQ ID NO: 427 - DNA, 761 bp, Glycine max
  misc_feature (1)..(160): n is a, c, g, or t
  misc_feature (761)..(761): n is a, c, g, or t
  Probeset Number=SeqID_10206
nnnnnnnnnnnnnnnnnnnnnnnnnnnnnnnnnnnnnnnnnnnnnnnnnnnnnnnnnnnnnnnnnnnnnnnnnnnnnnnnnnnnnnnnnnnnnnnnnnnnnnnnnnnnnnnnnnnnnnnnnnnnnnnnnnnnnnnnnnnnnnnnnnnnnnnnnnnnnnnncttcttcatttcaaaccactctctgtaaataggtgtttgctgggttcttaatttcagctacgtaggccccccccccttttttctggtgattggaaacattttttttttttgaggaagataataatgggagcggtttgttcggctggtatggtggagaaaaatggtgaacttggagggaagagtttggggttttctgggaagcttaagaaggaaaatagctttgtgaatcggagagaagctttttcagattcaaggtctaatagtggtcatgatagaaagaaaaagaagcatgatactgggttttcccgtgaacttggtctatcgattccttcacctgggggaaaacaggtgaaccagaggggttcttttctgggaaaagcaggtgagagagcaggggaagttctggacacaattggaagtggcatgccaaagttaaacactaatactgggtttgtctctggcacaacttttagagggaataagatatcaatactggcattcgaagtagctaatacaataaccaaaggagcaattttgtttcaatcacttgctgaagaaaacattcagttccttaaaaatgaggttttacaatcggaggggn

SEQ ID NO: 428 - DNA, 466 bp, Glycine max
  Peptide Sequence Number=SeqID_7559
  Probeset Number=SeqID_10207
attttagcaaactcgacgatttgacgtagctttttgagcacccgccgcaaacagtaaacagaatggattctcagatcaagcatgctgtggttgtcaaagtgatggggaggactggttcgcgtggtcaggtgactcaggtgagagtgaagttcacagactcggaccgttttatcatgaggaatgtgaaaggaccggtgagggaaggagacatcctcactcttctcgagtccgagagagaagccagaagactccgttgattctcttatgcaaagtcttctcaggatttacattttgatgctcatttagctttttgttttcgtctgagattgaagcctttgttgttaagacaatgtttgaatctagaaatgaatcttttatgacaaacgttttgtgccaccattgtcattaccgtaaacgttacaacgatcaaaaaaaaaaaaaaaaagcttatcgataccgtcgacca

SEQ ID NO: 429 - DNA, 940 bp, Glycine max
  misc_feature (1)..(38): n is a, c, g, or t
  misc_feature (940)..(940): n is a, c, g, or t
  Peptide Sequence Number=SeqID_7560
  Probeset Number=SeqID_10208
nnnnnnnnnnnnnnnnnnnnnnnnnnnnnnnnnnnnnnaaccccccccctcaaaaaacaagaaccaaatggactttgctaccccccctcgaggcccagttatcgataagcttttttttttttttttttgcatgaatatttttatcatataaaaacacctgtttgaaaatgttgaaagttgtcgaaataaaagaccttaattactaaatgtgacaatggtctaagctatgcatgcatgtcaaacactacaagtttcttgagcatccagttcaatcaaagctaaaataatgccttgtgtactgcacaagtgaatcacaaagtacatagctcttcagttcttcacactgatctctttgacaaaagagtcacagtttcctccttttgttggtgtttttctggccctcagcgttaacgttgtggttaacagccatctcctcagcagcagctttgtcttgatcttccacgtgcttctttggtaaaaaggcttattttccacactatgaagtcactctgactatcaaggttaaggtcgaccctgcggagcatcatgttgcaaaggctggctcaatctcatgaattatgctcattgccttgaagagattgcccccatttcagtctgcttaaatttttcttaagtgcccagatcgtccatgagtgataatttcctgcacttttttaatcaacccatcttcttttaaatatcttaactgcttcatcaaaaacttcaaagcccatggctttatattctttgaccattttgacataaacaaccttcttgagcacccttttggttccaaaaggacaagaggcttcatccttttctcttttccggctgagacacattataggatatacccgccgccttttcctttttcaaaatttttccagaaatggtttttccccattacaggtcaacctccattttcttttacccgagtcan

SEQ ID NO: 430 - DNA, 735 bp, Glycine max
  Probeset Number=SeqID_10209
ttttttttttttttttgtcgaacatttagaaaaaaatgccacttctatgtggattgagactactactaggatctctaatgaattcaacgagtgttggataaccccgtgaggcaggttaatcatcttgtttaatatgccggatccatgatttgacatctttattgctggatgagcctcgtatggacttgatataattttcccgccgaaaaactctcactgatctgatctgaatcatgtttctttgcagacgccgtccccgcccaataagcctgacgcttcttggagtactccacggggatccgtccgtcagggtatcacctccctcgacgcatcagattccccgatacccttcctcgcatgctttcaagagaagaagactccctggtgtggactaactccaccccatacctactgcgtaacacctcaaacaagagcagattgcatctcaacgccaatgtatacgttctcgatgccttcaacggcgaaaaaagtcttcccacttaaccactggcgaaaagcctcttccagatggcccatcacagcaaacatctgcttaacatgttgactgctctcctcgctcagcggctgcctttaacccgtcatcctcaagctaggtgatagttggctgtccacacctccccgggccttaataccaccttacagggcgcctcataggagcccttgcggatgaacgatcggttgggccccgttgattcccacttatacctccaacaa

SEQ ID NO: 431 - DNA, 1482 bp, Glycine max
  misc_feature (1)..(1): n is a, c, g, or t
  misc_feature (311)..(311): n is a, c, g, or t
  misc_feature (344)..(344): n is a, c, g, or t
  misc_feature (349)..(349): n is a, c, g, or t
  Peptide Sequence Number=SeqID_7561
  Probeset Number=SeqID_10210
ngaaacagtatggtagtagctcttacgctctgtaatgtcagctatatatgaatcttcgcgtactattattcgacgttgtgatgttgtaggcatctcggctgctcctatatttgatgtcgtaagatgatgctgttatagtatttgtatccaacggtacgtgcatatgcgtgctgttttgcagagtagccacgcgctatcagggtaatatgttgtccgcatggttgtttagcgagttctttcgtacttgtctattgtgttatgtgcctgattctgcttatgcttgataagttaacatatgtatccggacggcngattcgagataggggtaccagatcatacactgnaagancaagattcacctatgataagcgctttcttttatgtttctctgttatgtcatgagttcattagtacgcaatacacagcttcgccgtactgctgagttcagacttctgcgtgtcgtcattaatagcgggtctgtcattgtattagatcattatctcgattattaatgtgtgtatatgtgtgtgatgataacgacgtagatcagccacgctcatatcgtcgccagttatcaagggattatggtactgctcatcgcaacggaatgtcctgctatctccacatctctcatacataacatctcattcgatttcggtagagtaccattcttgctcaatatcattgctttgttagctgtacttattcagctctgcataacattgttatagttgcgctggtgtccggcgttgacggacctcctatacatgagaggcacggacagaagtgatacctatttacactgatggtgagcaaattaacgatgatctactagattcagactggtctttgtacagattcttaataagttcgcagacacaccgtgggtggcgagtgagagccagcacgaacccagaagcgatgcacgatctcgccctattatgtgtctcgtagaaagttagttgatgaacattcgactggtcgaattttctgtgtcttactcttactttttcgctgccacacgcgtatgaatttgatttgtaatattgcaatggcttctctcgacgttgttttgtgcatacgtgactggactatattaactcctatcaagcatatagcgcacgtcgcttatatctctattctatctcgctcgccatacatgcgcatcgtgacctggctatatcatgataaaccatgaggggtatatggaccagtgactctatgaactttcgtctcacactagagctggaggaagatataggcgcgcgagcgtatacaagaatgacggagaaagatctgatggtcataattactctttctgatactactgaaagaatctatagaatgcggggtgggcgcttctccctcacgcccctctcacctcctgttgagggcggcgctcctatttaccactatatagtatcttataaatatgattagataacgtatagcttgaagtggaactagaatgaggtgttgatg

SEQ ID NO: 432 - DNA, 461 bp, Glycine max
  Probeset Number=SeqID_10211
tcagctacgtaggccccccccccaaagcgaaagtaccggcgacacccaaagcctgacgaacatgcccccgaacgcccaccatcggcttacgtcatcttctcaaatcaggtgcgagagtcgctgaagggacaagatctttccttcaccgagattgccaaggtggtcggtgagaaatggcaggtcttgcccgccgaggaacgcgaaggttgcgaacgacaagccaatggtgcaaaagagaagtactatgcggaactcgccgagtacaagaagacgccaaactacgaggcttaccagaagtaccttgaagactttaaggcgaagcactcagtgcctactaaaggcaaacgttcgaaactggagtccgaaaccagtacttcaacacgagggggcagctacgaacagaacgaccaagccacaaatcgagcattaagtactatccagtcagatgcccaaacaacacc

SEQ ID NO: 433 - DNA, 1590 bp, Glycine max
  misc_feature (1)..(1): n is a, c, g, or t
  misc_feature (35)..(35): n is a, c, g, or t
  misc_feature (47)..(47): n is a, c, g, or t
  misc_feature (112)..(112): n is a, c, g, or t
  misc_feature (130)..(130): n is a, c, g, or t
  misc_feature (143)..(143): n is a, c, g, or t
  misc_feature (202)..(202): n is a, c, g, or t
  misc_feature (258)..(258): n is a, c, g, or t
  misc_feature (304)..(304): n is a, c, g, or t
  misc_feature (306)..(306): n is a, c, g, or t
  misc_feature (335)..(335): n is a, c, g, or t
  misc_feature (339)..(339): n is a, c, g, or t
  misc_feature (566)..(566): n is a, c, g, or t
  misc_feature (601)..(601): n is a, c, g, or t
  misc_feature (629)..(629): n is a, c, g, or t
  misc_feature (779)..(779): n is a, c, g, or t
  misc_feature (905)..(905): n is a, c, g, or t
  misc_feature (1005)..(1005): n is a, c, g, or t
  misc_feature (1069)..(1069): n is a, c, g, or t
  misc_feature (1177)..(1177): n is a, c, g, or t
  misc_feature (1197)..(1197): n is a, c, g, or t
  misc_feature (1216)..(1216): n is a, c, g, or t
  misc_feature (1219)..(1219): n is a, c, g, or t
  misc_feature (1316)..(1316): n is a, c, g, or t
  misc_feature (1397)..(1397): n is a, c, g, or t
  misc_feature (1399)..(1400): n is a, c, g, or t
  misc_feature (1407)..(1407): n is a, c, g, or t
  misc_feature (1422)..(1422): n is a, c, g, or t
  misc_feature (1437)..(1438): n is a, c, g, or t
  misc_feature (1441)..(1441): n is a, c, g, or t
  misc_feature (1467)..(1467): n is a, c, g, or t
  misc_feature (1477)..(1477): n is a, c, g, or t
  misc_feature (1511)..(1511): n is a, c, g, or t
  misc_feature (1520)..(1520): n is a, c, g, or t
  misc_feature (1528)..(1528): n is a, c, g, or t
  misc_feature (1562)..(1562): n is a, c, g, or t
  misc_feature (1574)..(1574): n is a, c, g, or t
  Peptide Sequence Number=SeqID_7644
  Probeset Number=SeqID_10212
ncggtgccacgcgtcgcgagcgcccgtggtagctngatgagtgatcnttctatcccgttcgctaccgtactaatacgtataacgatgtagcgatgcgttcggtgcactcacncctcataatgtgtcatangacgtcagacctncgagccacctgcagtgtctacgtacatcctactcgccatgtctcgtcgatgtcgcgtgngtgcgagcgaggagagacaggcgcgcacaggcatcatcacacaggacacgagacgnagatgctcacgcacagcatgacatggagatgacgcacatgagtacncngacggcacacaggagcgtgtatgagggtnatangtgtgtccgactagacgactaacataatgagcagtcacaggtcactgacgacgttgcgtcggcatagtgagagtggtcagtgtcggtcgagcatgggtatgatgcgagtatcaatcatccgaatagatgagtgcgcgtcacatgtgtatagcacctacacatatgcaactcagtgcgcgagacacagtcgcatcatgactgtcaggagtgcatctacctggtgtgtngtgatataacacacaggtggggtgtggtgaattcntcacaatcggcccatccacctcttactntgaagatgtgacagtagtgtgcgttaatctgctagcgcgacccactacatcacgacaagatggagacatgtcgtcgtcgtgcgcacacatgatatgcgtgtgacggagacgatcatgagagtagatgagtgggtggaagtatggggagtnggtccatccccacgtcgattattagacgagacatgcagtgagctcggcgcatctctcgacgttgcatcatcattctctttacacattgatgatcatattggcgttaatgatcttacgtaggttctntcatgtcgtcatatctcgactgcgttgtttactgctcctcgtctgtcgctccattttgtagtggtgtgcttctatacttctggtcgatgtaagacagcancacaaattgcgcgtacgcacagccgtgctcatccgtgtactcatgcgagacggtgtatatcaangagtcgtgggggagtgtatagtaacgaatgtgccgtcgagtcaaggacgtgagagccacaaaactacagataggaggtcgagatcgagcggagagagacagaggcgcnagcacagagacgcgcagacngcgtgcgacacacacactnaancagtgagcaagagggtagtgagcggcacacacaccatctctccactctacccactgcgaagaatactcgccgcgtgtgcgtagtgctctgtattgtnatcatccctacatcgtcgcctctcgtcgtcgtcgcgccatacacaatcgagacgcaagcagggtagacggccagagatgangnnttagganatatagtgaaatagnggtgccagcgctccnngtngcctggccggggcgcgggggggtganggaaaagganaataatactatacaacatgagaacaatagcatanagagatganggtatgtntataattgtgtgcgacaccgtatacaatcccatnaaattatccctnaccccactccctcctc

SEQ ID NO: 434 - DNA, 281 bp, Glycine max
  Probeset Number=SeqID_10213
tgcctgcaggctctgtttggattccatcagaaatgaaaggcctggatgaacattgagaccactttgtgtgttaacctcctgcggactggtgctctaccacaaaaagagggtccctcttatgaagcacttctgcttggttctcttaggctacaccatctgccccttatgatccttttgatttcacacacgcctttgaacccgctacctataaacgattgtggagacatttatgcatactagggctaaggacaatcggaattggaacttcatataactcctaa

SEQ ID NO: 435 - DNA, 421 bp, Glycine max
  Peptide Sequence Number=SeqID_7645
  Probeset Number=SeqID_10214
tttcctgcacactcaaggagctggctttggccctttcttttatcttcccatgatggaccattcaaaggaagctaagatttggaacaatgtgttagacaaacctgacaacgtggcatgcatcgtaataggaagcatgcaggcaactgttctgatataaacacttcctgcagtgtttcaaataagtgaaatacagtatgaactgaaggaccattcagcgcgtttgaactgtgggcattgggatcacattttctgctatgttaagaccttccaacctcatacatatcgtctcttaccagagacggacctacttgtcatgactctactcttcatgaagagatcttctgatctgtatctcatgacgtgccacacgcacagcgtgcatgctatgggaggaattggaatccacatgcctctcatagag

SEQ ID NO: 436 - DNA, 1758 bp, Glycine max
  misc_feature (1)..(1): n is a, c, g, or t
  misc_feature (4)..(4): n is a, c, g, or t
  misc_feature (52)..(52): n is a, c, g, or t
  misc_feature (96)..(96): n is a, c, g, or t
  misc_feature (157)..(157): n is a, c, g, or t
  misc_feature (184)..(184): n is a, c, g, or t
  misc_feature (197)..(197): n is a, c, g, or t
  misc_feature (301)..(301): n is a, c, g, or t
  misc_feature (437)..(437): n is a, c, g, or t
  misc_feature (513)..(513): n is a, c, g, or t
  misc_feature (516)..(516): n is a, c, g, or t
  misc_feature (552)..(552): n is a, c, g, or t
  misc_feature (602)..(602): n is a, c, g, or t
  misc_feature (610)..(610): n is a, c, g, or t
  misc_feature (648)..(648): n is a, c, g, or t
  misc_feature (690)..(690): n is a, c, g, or t
  misc_feature (749)..(749): n is a, c, g, or t
  misc_feature (766)..(766): n is a, c, g, or t
  misc_feature (784)..(784): n is a, c, g, or t
  misc_feature (799)..(799): n is a, c, g, or t
  misc_feature (812)..(812): n is a, c, g, or t
  misc_feature (905)..(905): n is a, c, g, or t
  misc_feature (910)..(910): n is a, c, g, or t
  misc_feature (925)..(925): n is a, c, g, or t
  misc_feature (956)..(956): n is a, c, g, or t
  misc_feature (961)..(961): n is a, c, g, or t
  misc_feature (992)..(992): n is a, c, g, or t
  misc_feature (1088)..(1089): n is a, c, g, or t
  misc_feature (1095)..(1097): n is a, c, g, or t
  misc_feature (1135)..(1135): n is a, c, g, or t
  misc_feature (1195)..(1195): n is a, c, g, or t
  misc_feature (1261)..(1261): n is a, c, g, or t
  misc_feature (1349)..(1349): n is a, c, g, or t
  misc_feature (1353)..(1353): n is a, c, g, or t
  misc_feature (1367)..(1367): n is a, c, g, or t
  misc_feature (1388)..(1388): n is a, c, g, or t
  misc_feature (1402)..(1402): n is a, c, g, or t
  misc_feature (1464)..(1464): n is a, c, g, or t
  misc_feature (1510)..(1510): n is a, c, g, or t
  misc_feature (1512)..(1512): n is a, c, g, or t
  misc_feature (1514)..(1514): n is a, c, g, or t
  misc_feature (1523)..(1525): n is a, c, g, or t
  misc_feature (1527)..(1527): n is a, c, g, or t
  misc_feature (1540)..(1541): n is a, c, g, or t
  misc_feature (1554)..(1554): n is a, c, g, or t
  misc_feature (1573)..(1573): n is a, c, g, or t
  misc_feature (1575)..(1575): n is a, c, g, or t
  misc_feature (1578)..(1578): n is a, c, g, or t
  misc_feature (1611)..(1611): n is a, c, g, or t
  misc_feature (1630)..(1631): n is a, c, g, or t
  misc_feature (1647)..(1648): n is a, c, g, or t
  misc_feature (1660)..(1660): n is a, c, g, or t
  misc_feature (1670)..(1670): n is a, c, g, or t
  misc_feature (1672)..(1672): n is a, c, g, or t
  misc_feature (1675)..(1675): n is a, c, g, or t
  misc_feature (1686)..(1686): n is a, c, g, or t
  misc_feature (1690)..(1690): n is a, c, g, or t
  misc_feature (1702)..(1703): n is a, c, g, or t
  misc_feature (1705)..(1705): n is a, c, g, or t
  misc_feature (1707)..(1709): n is a, c, g, or t
  misc_feature (1715)..(1715): n is a, c, g, or t
  misc_feature (1718)..(1719): n is a, c, g, or t
  misc_feature (1721)..(1724): n is a, c, g, or t
  misc_feature (1746)..(1748): n is a, c, g, or t
  Peptide Sequence Number=SeqID_7646
  Probeset Number=SeqID_10215
nagntgagctggagggggaggcatccgtggtctacatggtcaatggcatagnaagagggagggatcatctacatgtgtgatacgtagtgcagtacntcgcagtcacgttcacatagtgatatagaccacacagcacatatactgactgctatatatnatgagtcatcacatggcagtgtagcantagtacatagcgngcggagcgacttgcgcctcatacacatatctaccagtcctacagttgcatgtcaacacggcaccgacataatatatcatgagaacatgcgctacggatgacagngtcgtaggtaagactatacaagagacatcggcacgattcgtatgaagttcatatcatactacaatgcgcatccgatgtcgtaactgagatgcggacctatgtacatacactacaagatgtgtgcggcgtaatgctngacttacgacatggtctgagagacgtagtagagtgcgcgtgttggtatatatattgttatggatgtatgagtgtgngtngtggagttggtgaggagagtagtgagtgtgcgtcangatatagactcgtgcagttgacaagtactatagtactatatatcatgtantacagacngtcatacgagatcacataatagatcatagcagcggcgncgtgtgatggtccacatcatcagtggtgtatacatgcactancaactcatacatacactatgactatggtatagatcaatgataatcctcttcttctgctntattctacttggtgggnttataataactcataacntcatcactgtaactngacagcatgacgncactcccgccgctctctctctcagatgtggcagtcggcgctgcggtatggccgtgcacacgtgttggtgatgtgtgcgtgtgcgatatacganttatntcaagagatgtgttnctccaccaggctctatctatgtcgattatcntaacnatcatctctcacacagacacgtgccatgaancctgtggtgtgtgagtgagtgtgatgtagaggagtatagagagagatgagattcgcgacaagaagacgacgccacatatccactcatattcttcanncttacnnnatctactcatattacaacattatgatacggtgagtcgnctctgtgtatgtcgtgttcgagctctatccacaaggcgggatagaagaaaagagacagcngcgacacgcggcgagctgcgggcgcgcttaacaatgataacagtagagagagcgtaaattgtatgnatttggaagaggagattgtgaatgcgcataattcgtatgaagataagtatagcacagtgtatagtgcaatagatataagttcactctntctntatttgagataagnaattaatgttgtcggtggctntagtgtagctagantatacatagatctctacctactttctcggtttgtgtaagagatacaagtcgtgttgtctttntttttattaataatattatgtggtacacaacaaacatggagagaantngnccctttctnnntntttctttgttttnnttgtgagtgatgnggagcgcgcagcttctctngntcnatatagagtgcatccttccggtggggagtagangagagaacctaataataannatatatatggcgggcnngcggctgtggcnagtgtggtgngnttntttcttatgtntgtncttccctgctgnntntnnngttctnacnncnnnnaggagggaggagggcacccaannncaccacccca

SEQ ID NO: 437 - DNA, 2492 bp, Glycine max
  misc_feature (1)..(1): n is a, c, g, or t
  misc_feature (6)..(10): n is a, c, g, or t
  misc_feature (15)..(15): n is a, c, g, or t
  misc_feature (20)..(24): n is a, c, g, or t
  misc_feature (29)..(37): n is a, c, g, or t
  misc_feature (39)..(42): n is a, c, g, or t
  misc_feature (54)..(54): n is a, c, g, or t
  misc_feature (56)..(57): n is a, c, g, or t
  misc_feature (59)..(59): n is a, c, g, or t
  misc_feature (76)..(76): n is a, c, g, or t
  misc_feature (85)..(85): n is a, c, g, or t
  misc_feature (99)..(99): n is a, c, g, or t
  misc_feature (103)..(103): n is a, c, g, or t
  misc_feature (121)..(121): n is a, c, g, or t
  misc_feature (132)..(132): n is a, c, g, or t
  misc_feature (139)..(139): n is a, c, g, or t
  misc_feature (210)..(210): n is a, c, g, or t
  misc_feature (243)..(243): n is a, c, g, or t
  misc_feature (245)..(245): n is a, c, g, or t
  misc_feature (250)..(250): n is a, c, g, or t
  misc_feature (278)..(281): n is a, c, g, or t
  misc_feature (285)..(286): n is a, c, g, or t
  misc_feature (289)..(290): n is a, c, g, or t
  misc_feature (297)..(297): n is a, c, g, or t
  misc_feature (316)..(316): n is a, c, g, or t
  misc_feature (318)..(318): n is a, c, g, or t
  misc_feature (328)..(329): n is a, c, g, or t
  misc_feature (359)..(359): n is a, c, g, or t
  misc_feature (382)..(382): n is a, c, g, or t
  misc_feature (400)..(400): n is a, c, g, or t
  misc_feature (408)..(408): n is a, c, g, or t
  misc_feature (414)..(414): n is a, c, g, or t
  misc_feature (423)..(424): n is a, c, g, or t
  misc_feature (426)..(426): n is a, c, g, or t
  misc_feature (429)..(431): n is a, c, g, or t
  misc_feature (435)..(435): n is a, c, g, or t
  misc_feature (453)..(453): n is a, c, g, or t
  misc_feature (467)..(467): n is a, c, g, or t
  misc_feature (491)..(491): n is a, c, g, or t
  misc_feature (505)..(505): n is a, c, g, or t
  misc_feature (524)..(524): n is a, c, g, or t
  misc_feature (529)..(530): n is a, c, g, or t
  misc_feature (575)..(575): n is a, c, g, or t
  misc_feature (578)..(579): n is a, c, g, or t
  misc_feature (590)..(590): n is a, c, g, or t
  misc_feature (638)..(638): n is a, c, g, or t
  misc_feature (660)..(660): n is a, c, g, or t
  misc_feature (666)..(667): n is a, c, g, or t
  misc_feature (699)..(699): n is a, c, g, or t
  misc_feature (716)..(716): n is a, c, g, or t
  misc_feature (733)..(733): n is a, c, g, or t
  misc_feature (735)..(735): n is a, c, g, or t
  misc_feature (738)..(738): n is a, c, g, or t
  misc_feature (749)..(749): n is a, c, g, or t
  misc_feature (762)..(763): n is a, c, g, or t
  misc_feature (771)..(771): n is a, c, g, or t
  misc_feature (861)..(861): n is a, c, g, or t
  misc_feature (869)..(869): n is a, c, g, or t
  misc_feature (877)..(877): n is a, c, g, or t
  misc_feature (884)..(884): n is a, c, g, or t
  misc_feature (904)..(904): n is a, c, g, or t
  misc_feature (967)..(967): n is a, c, g, or t
  misc_feature (1003)..(1003): n is a, c, g, or t
  misc_feature (1073)..(1073): n is a, c, g, or t
  misc_feature (1084)..(1084): n is a, c, g, or t
  misc_feature (1130)..(1130): n is a, c, g, or t
  misc_feature (1139)..(1139): n is a, c, g, or t
  misc_feature (1176)..(1176): n is a, c, g, or t
  misc_feature (1182)..(1182): n is a, c, g, or t
  misc_feature (1311)..(1311): n is a, c, g, or t
  misc_feature (1321)..(1321): n is a, c, g, or t
  misc_feature (1342)..(1342): n is a, c, g, or t
  misc_feature (1395)..(1395): n is a, c, g, or t
  misc_feature (1464)..(1464): n is a, c, g, or t
  misc_feature (1481)..(1481): n is a, c, g, or t
  misc_feature (1487)..(1487): n is a, c, g, or t
  misc_feature (1497)..(1497): n is a, c, g, or t
  misc_feature (1520)..(1520): n is a, c, g, or t
  misc_feature (1556)..(1556): n is a, c, g, or t
  misc_feature (1586)..(1586): n is a, c, g, or t
  misc_feature (1601)..(1601): n is a, c, g, or t
  misc_feature (1608)..(1608): n is a, c, g, or t
  misc_feature (1610)..(1610): n is a, c, g, or t
  misc_feature (1636)..(1636): n is a, c, g, or t
  misc_feature (1646)..(1646): n is a, c, g, or t
  misc_feature (1648)..(1648): n is a, c, g, or t
  misc_feature (1663)..(1663): n is a, c, g, or t
  misc_feature (1673)..(1673): n is a, c, g, or t
  misc_feature (1712)..(1712): n is a, c, g, or t
  misc_feature (1722)..(1722): n is a, c, g, or t
  misc_feature (1751)..(1751): n is a, c, g, or t
  misc_feature (1767)..(1767): n is a, c, g, or t
  misc_feature (1774)..(1774): n is a, c, g, or t
  misc_feature (1802)..(1802): n is a, c, g, or t
  misc_feature (1867)..(1867): n is a, c, g, or t
  misc_feature (1869)..(1869): n is a, c, g, or t
  misc_feature (1896)..(1896): n is a, c, g, or t
  misc_feature (1900)..(1900): n is a, c, g, or t
  misc_feature (1914)..(1914): n is a, c, g, or t
  misc_feature (1930)..(1930): n is a, c, g, or t
  misc_feature (1938)..(1938): n is a, c, g, or t
  misc_feature (1945)..(1945): n is a, c, g, or t
  misc_feature (1970)..(1970): n is a, c, g, or t
  misc_feature (2028)..(2028): n is a, c, g, or t
  misc_feature (2059)..(2059): n is a, c, g, or t
  misc_feature (2070)..(2070): n is a, c, g, or t
  misc_feature (2084)..(2084): n is a, c, g, or t
  misc_feature (2095)..(2095): n is a, c, g, or t
  misc_feature (2144)..(2144): n is a, c, g, or t
  misc_feature (2172)..(2172): n is a, c, g, or t
  misc_feature (2208)..(2208): n is a, c, g, or t
  misc_feature (2217)..(2217): n is a, c, g, or t
  misc_feature (2234)..(2234): n is a, c, g, or t
  misc_feature (2240)..(2240): n is a, c, g, or t
  misc_feature (2246)..(2246): n is a, c, g, or t
  misc_feature (2258)..(2258): n is a, c, g, or t
  misc_feature (2261)..(2261): n is a, c, g, or t
  misc_feature (2266)..(2266): n is a, c, g, or t
  misc_feature (2268)..(2268): n is a, c, g, or t
  misc_feature (2270)..(2270): n is a, c, g, or t
  misc_feature (2275)..(2275): n is a, c, g, or t
  misc_feature (2278)..(2278): n is a, c, g, or t
  misc_feature (2282)..(2282): n is a, c, g, or t
  misc_feature (2297)..(2297): n is a, c, g, or t
  misc_feature (2299)..(2299): n is a, c, g, or t
  misc_feature (2306)..(2306): n is a, c, g, or t
  misc_feature (2309)..(2309): n is a, c, g, or t
  misc_feature (2311)..(2311): n is a, c, g, or t
  misc_feature (2340)..(2340): n is a, c, g, or t
  misc_feature (2362)..(2363): n is a, c, g, or t
  misc_feature (2371)..(2371): n is a, c, g, or t
  misc_feature (2374)..(2374): n is a, c, g, or t
  misc_feature (2401)..(2401): n is a, c, g, or t
  misc_feature (2407)..(2407): n is a, c, g, or t
  misc_feature (2432)..(2432): n is a, c, g, or t
  misc_feature (2435)..(2435): n is a, c, g, or t
  Probeset Number=SeqID_10216
naaaannnnnttttnaaaannnnnttttnnnnnnnnntnnnngggattaagtangnnantctactataatatattntatgaaaanataatatacatatnacancacacataagataaacancacagataacncactacncaccacgtgcacgatacatcacccacgactctctctctactacagcactagtaacgacgcagcacgacgcngcgagaagatcacctcgatgtgttatatatgcncnctgcnacgagctatggctctcgatgtacgactnnnntatnnttnnttatttnttctctcgtatctcgctancncgcatgacanngcacacacacacacacccgcccgcatcgcncacagtaatcgtctacacacgangatcgaccatacaacacncacatatnatacanacaccacannanacnnncaanacagcatatcatatcacncaattctcacgcanaaaatatcacaactcatacatgancgatctatatcacnagctcacgtatcgtcacancacanncgacatcactcacatcactatctagatacttaatatatatattanggnncgtgagagtgntatgatcatgatgttatattatagcgattatatatagatgcgatatgntgatagcagcatcaatgtggtntgattnntatgtgatgtagggatgtatacaaatagatgngtttatgatgtatgtgngtgagtcagatgagtantnctngcgcgtatatngattactataagnncacgacancgacgaagaagacactcaccacacgacgacagatacagatagatcgacatatgatgacagtgagtaaggtaagcacagatatcacttatncacgacgncctgaaantacgcanagcacgtcacagacgcagcngcgtgcgactcgatgcgccatcacgctttccttcatctcttgtctgcgtgtatagctagctcngctcatagcgcgacgcgctcacgtacagcgtcacancacatacatctatagactatatgatagatataatgacatacacaactctaatatcgaattgatgtgaaanacatgaaacgnaccaggagcactatatatgcagcgtgatcgcacaccacgacgtgtntagatatanacacactctgtggacaacatagatcacatgagacagncgatancatgcatgatgacgtgtctgcgtatcgtcacggcatctgtcgcgcgtgtctggatgagaccacgcgcgtgtgtacagtctcgctacggcgctcgtcgatcacgacgacactcatcagacgctcgcgctncgatgctgancactatcatagtcatatctgnctcacagacagaccaatatagatatgcatagtgactatctcacacatcaacanatacatcagtcagacacgatcacactgctaatgagcaacgtcgtactgacctctactacgactctactnactacagtcatctgctntcggcnctgcacgggntgagactgtgctcgaatcgacgnatgatgcagcagcgatgcgcagcgatctagcacggncgtcgttgatgctggctcaactgtatacancgcacatacatatangcactcncnttggttctgactcatcatcacacacnagatatccanancactatacagcccgntacgacgatncagacgcaactgactcatcgcatcacatgtacgcgcgancatccgctgnctctctcatgagctaccaatacacagcancggacacgatgacacnagcaganatcagtgtcatgatatagataatgacgngggtgtgatgggtacttcgatcgacagtcgccagcgatgtgctctgtctgtcgcatccgacccgncncgtgccgaacgcgcaccaagggatganaggnactgagaaaccagncgaccgactcgcacancgtacgcncgcactnactaccactcacactgcgcattagngagatacacacatcacatcgcagacgactgtatcatacatcatacatcaaccacaacngacccacacaagcagacacacatagtgagantgagatgcaantcgtgatgacacancaagagcgaancgcaacacgcatgaccacgcaacgatacggtgagccgtaggagcagagnataggagtgatgatgatagtgacgaagnatgagatagaggagacgacgcgcagtcgtgatgctncgatcagcngcgtcagcagtcatcantgagtncgctangaaacgatcggncgnatatnantnacagntcncgtngatcgatatcgacancngaggacntananaatgcacgagtacatgaggcatgaagatnaatcaaccaatcgacgactaanntaaatacnttntataaatccatccgtcgcgatctccgncgtcgncgcagggtcgcgactaatctagcanctnccatcacgagcaacacagactgatcggctgacacaccgtcctaacgcactcacgact

SEQ ID NO: 438 - DNA, 2591 bp, Glycine max
  misc_feature (1)..(1): n is a, c, g, or t
  Peptide Sequence Number=SeqID_7647
  Probeset Number=SeqID_10217
nagcctcaatccacggaaatcgactaaagaaacccaaatccttcgctactaccgttatccaaaaccaaaatgcaaagtcatttattcacagcatgatatcaatcaaacttcttcacttcacaatttcagagtagcgttcatattttttcccctttcccaacatactcccaacacttgcggtgccgccacgtgtcccatcgttttcggtgttagtttccttccttctcaggtaacaacagtcaccgatcactcccctcccgcacccaaaaataaaaaaaaaaactaaccaatttttctctccgtataaataacaccaaatcaaaaatcaaaaccatcgtgagggattctcttttcaaccaccgtcatcagcgatcggattcggattcggactccgtctcgggaaaattcgagaagatttttcgaatttttcaccactgctttgtgcgcagcgatcggtttcggattcgggctccgattttcgcctctcgcgaagagcttgggttcatttgcactaatggaggggaaggaggtttgcgcgtcggagtcggcggttgatggaagccgcgacgtttggagttcggagccctcgctcgcttcctccgcggatcacctcgttgtaatggtgaacggaattctcggacgtgagacggattggaaatatgctgcggagaaatttgtcaaggagttgccagataaagtgtttgttcactgtagcgaacgaaatgtgtctatgcatacactagatggtgtggatgtaatgggagagagattagcagaagaggttagtatatgactatataggagacctgtttaatgaatttacatgtcatgtgaatgtcaattttctctaatttctctagattcattatctgtagattatgttacctaatctttgtcactgttaataataaatgttattgtgcttatgatagacaataaggaatactagagtatttaagcaaaggaaaaaaaaaaaagtaaacattgtgtcagtataatcctagtattatttgattattgaagttgtgtaacaaatcatatgaagtatactgcaccaaatatttctttacatatcctctctgtcattgataaagcataacctgtacaaagttttttacatggagcttttcataaaatgtttatcagtaatttattggacaagaaactctttctacagtaatattctggaaggatataatgttccctacttttagacgggaaaatctgagtctatatatttggagaagggaacttgaagtttgttcaccagttcagcagttcaactaagaaagctgatatgtcaatttctgatgtatgttggagatggataaatttcatgtgttattataggttcaaatggagtctgtcttaaccagagaaatgtaatatttgagatctttactaacttgatattggatacataatcactgttgctatggacaacaactttaacacttaggtacttgaagtgattaaaagaaagccaaatatgcgtaagatatcctttgttgcacactcagttggaggattagtggcacgatatgcaattgggaggctgtataggccacctgaaaaaggatcaatggcggactcatgcaatgacgaaagtaaggagggctctgtgggtacaattggtggcttggaggctatgaatttcattgctgttgccacacctcatctaggatcaaggggaaataatcaggttccatttcttttgggggtacgagcttttgagaagtttgctacttatgttattcattttattttaaaaagaatgggtcggaagatattcataacttatgaggatgaaagaataaatacattgtttgtacttatggttcaacacaactatcatctttgttttatctcttggttgtgtactcttcaagcttcttctgtcctatagtttttgaaatgtgccgcctttttcggttacatctggcagcctcgcgcgacttgcgttttttctcttcatgtttggtctccgaaataccgtctccttctacatttcctgaatcgatgccagccttgatcacctctctgcggatcctccccaggagtttctcctaggactcgtccagggccaccaccaaccgcaggttgtactgggaccagaagaagtgtattgcttgaagttagatttgatagtaccatatcctacgacaagtcagaaaaagcacgggcaaaagccgcctatctgaggagtcgtcctagtagcctctccagggttttgtcgtcgggcgcttctacttccacgatgtaaggcggctgaaaggagatggtgttgggggtgttggatgtcgtggtagaaaaaagaatgagattaaggaggtgaaggagcagaagaaagcgaagggggaggatgggtaggatgagggcattaggagtctgtgacaatggttagtggtgtgtgagaagaagggtttataggagtgttgctggctgtggtgtgtttggagagaagagaagagggtggaggtgatttgattggtaagaatgatagagatcacgttgttgaatgtggttgaggcagccatgggtgagaatgatgcggatgatgatcaattgaaaatccgactgtagcaacgttt

SEQ ID NO: 439 - DNA, 248 bp, Glycine max
  Peptide Sequence Number=SeqID_7648
  Probeset Number=SeqID_10218
ctgtggatatcctgagccagaagctcatggatcaaggtgttggtgattctagaaatattaaggttttatctttttggtacataaaccggattgttgccttcaggatgatcttgggcagggaaggccttacgtgcttgcttagcggtttggggatatcaattaagacctatgccccttgaaatgcagtgtggtgggctacatattctgtctgccaaaggatggtttggggtggagttggatactacttg

SEQ ID NO: 440 - DNA, 719 bp, Glycine max
  misc_feature (513)..(513): n is a, c, g, or t
  misc_feature (516)..(517): n is a, c, g, or t
  misc_feature (519)..(520): n is a, c, g, or t
  misc_feature (523)..(524): n is a, c, g, or t
  misc_feature (526)..(528): n is a, c, g, or t
  misc_feature (530)..(530): n is a, c, g, or t
  misc_feature (534)..(534): n is a, c, g, or t
  misc_feature (538)..(538): n is a, c, g, or t
  misc_feature (552)..(552): n is a, c, g, or t
  misc_feature (562)..(562): n is a, c, g, or t
  misc_feature (575)..(575): n is a, c, g, or t
  misc_feature (582)..(582): n is a, c, g, or t
  misc_feature (590)..(590): n is a, c, g, or t
  misc_feature (601)..(719): n is a, c, g, or t
  Peptide Sequence Number=SeqID_7649
  Probeset Number=SeqID_10219
actcacgacactcatctcgacagcaattccgccgacaagatgagagccaaatggaggaagaagcgcgttcgccgtctcaagcgcaagagaagaaagactagggctcgttccaaataaacgtctcgccctccaatctcagcatcacccacctcagttctgaacgaaaatgatcactgaacgacacgttttctacgcacaaccttcctaccagttcgcaactcactctactccaccgcgcgattcggccctcaagctacgtcacacggcggattgcaagcacgcgagctttcaactactacctcgggaggtgacgactgtgctggactgaggaatgttatggaatgctggtcaatcgcctgaatggcacattggggttcttcgggagtttacttgaacacgattacgacggtcactctaacaccggctcgctacctcttgtggaggcttgctttgactgatacgtcgcatgtggacatgcgataacggaatcaaaaatgcttcacgacaaaaaanaanntnnaanntnnntntttnttanaaaaaaaaaaaaanattcctgcanccgggggatcatnattctangcggcgcnccggggggacnnnnnnnnnnnnnnnnnnnnnnnnnnnnnnnnnnnnnnnnnnnnnnnnnnnnnnnnnnnnnnnnnnnnnnnnnnnnnnnnnnnnnnnnnnnnnnnnnnnnnnnnnnnnnnnnnnnnnnn

SEQ ID NO: 441 - DNA, 544 bp, Glycine max
  Probeset Number=SeqID_10220
gagcttctagaactgattgaaagagactctgttatgatatggatgtttcagtaactcttgaaatatcacccatcatctatttaaatccttggataatattattctgaatcccctgaaaaaaaaaaaaaaaaaaaaaaaaaaaaaaaaaaaaaaaaaaaaaaaaaaaaaaaaaaaaaaaaaaaaaaaaaaaaaaaaaaaaaaaaaaaaaaaaaaaaataaaaaaaaaaaaaaaacaaaacaaaaaaacaaaaaaaaaaaaaaaaaaaaaaaaaaaaaaggagcgccctgccccccctaatgagtgccctaaaacaaaataaaatgagccgcccacactaaaccggtttaaaaaagaaaaacctgggaaaaaaggtgtattaaaaaatcccccaacccaaaaagagaggcccaattgaatatagagagcttttgcgcttaaatagctgactgactccatgctcttgcgcgttccccccgcgcgagctttaacagctcaaaaaaacggggcaacacggttatacaaaaaaaccgcgcatcccggaag

SEQ ID NO: 442 - DNA, 1424 bp, Glycine max
  misc_feature (1)..(1): n is a, c, g, or t
  misc_feature (26)..(26): n is a, c, g, or t
  misc_feature (61)..(61): n is a, c, g, or t
  misc_feature (81)..(81): n is a, c, g, or t
  misc_feature (110)..(110): n is a, c, g, or t
  misc_feature (205)..(206): n is a, c, g, or t
  misc_feature (213)..(213): n is a, c, g, or t
  misc_feature (443)..(443): n is a, c, g, or t
  misc_feature (580)..(580): n is a, c, g, or t
  misc_feature (692)..(692): n is a, c, g, or t
  misc_feature (713)..(713): n is a, c, g, or t
  misc_feature (1176)..(1176): n is a, c, g, or t
  misc_feature (1407)..(1409): n is a, c, g, or t
  Peptide Sequence Number=SeqID_7650
  Probeset Number=SeqID_10221
ncgagctgggcgacggaagatgccgntgagtgagtggtcgatgcacagctacggtaagaangatgtgagcgagagacgganatcgagtggattccgcggctacacgcagncgtgtagcgtgtgtgcgtgacggacagtgagcttagtcgagcctaggagtagatgtgtaggacgcagccgtcgcggtatgtgtgctcgacagtcnnccgtgtntgtgcgtggcgagatagagtcgagtggaccgcgagacagtgtggatgtgcgcatataccagaaataaagtacaggtatgtgaggaggaagagagatgcatgggtgaagagatgtaagtggtgagaagagagagggcgagatagtggtgggtgtgtgaagcacgaagaataagaggggacaatactgataagaggaagtgtcaagtgagcgtgaacaaacgtatgatatanagatgtgtaagcggtgctgatggacacgtaatatacgatacaaacacttctacatgcacgcgcaatgctctacgctatacgatgaagcgctaacgtggtgcgaggttgcggacgcaaccaagaacacacaaacaagnaagaggtgggtgggcagatgttgtaacatagacacaagagcaacagacgagggagcacgcgatagatgtgctccttgcgtcgagtgtataaatatagaaagcagagaacacntacagggtagttgtcgtcatncttgatagatatcatttttactaacacaaacaattataggtgttgcagataataatatgagtagaggagacacacgtacccgagcgcgaggagcgacaaggacaaagagagcggtggcgatgaggaggagagaggatgagaagaaaagtagtgtggataatgtggagaataagtagagatgaaagatgcaagcgatagcagcaagcattacaacaggtagtgggagtcataatatgtgtgtgggatatatgtgagtaggggcgagacggaaaggaggtacaggatggccggcggagcgtgaacgcaagcgacccgccctgggatgccacatggggtgggggtgtgcaaatgaaataaacgtggtggagtatcgagcgttcggaggtaccgaggtagtgatatgagtatataggttatagttcttgtcaacccatcggtgtgcgctggaccccatctcttgtcngcgggtgatggatcaaatgtggagacaccatggtgggggtgaggcagcgctacccgtagttatggcgaacgagaccgtgaagtgggttgatttgtgtagtgggggtgtcccttgctcgtaacccataacttacggagggtggggtacgcgcggtagtcgtataggaggaggtgagatgtggttgtgtcgcaccgcaagtcagatcgcgcgcgttggatgaggaagtgttannngggaagtccgcgacg

SEQ ID NO: 443 - DNA, 1535 bp, Glycine max
  misc_feature (30)..(30): n is a, c, g, or t
  misc_feature (382)..(382): n is a, c, g, or t
  misc_feature (547)..(547): n is a, c, g, or t
  misc_feature (559)..(559): n is a, c, g, or t
  misc_feature (616)..(616): n is a, c, g, or t
  misc_feature (800)..(800): n is a, c, g, or t
  misc_feature (841)..(841): n is a, c, g, or t
  misc_feature (973)..(973): n is a, c, g, or t
  misc_feature (1316)..(1318): n is a, c, g, or t
  misc_feature (1327)..(1328): n is a, c, g, or t
  misc_feature (1374)..(1374): n is a, c, g, or t
  misc_feature (1377)..(1378): n is a, c, g, or t
  misc_feature (1405)..(1407): n is a, c, g, or t
  misc_feature (1413)..(1413): n is a, c, g, or t
  misc_feature (1423)..(1423): n is a, c, g, or t
  misc_feature (1442)..(1442): n is a, c, g, or t
  misc_feature (1455)..(1455): n is a, c, g, or t
  misc_feature (1459)..(1459): n is a, c, g, or t
  misc_feature (1465)..(1466): n is a, c, g, or t
  misc_feature (1479)..(1479): n is a, c, g, or t
  misc_feature (1481)..(1482): n is a, c, g, or t
  misc_feature (1499)..(1499): n is a, c, g, or t
  misc_feature (1511)..(1511): n is a, c, g, or t
  Probeset Number=SeqID_10222
attcgttgattgctcgcgaccggcgatagntttgtgttgtggtgtgtgtaagtctccaacatcattccttcttccgtgtattagcggcatttattgcgcaccacacacatatattgatatcgcttactcactcgatagtccggtgtggagctatcacatctatgcgaagcgtcattgtactgtccgctagcttcctcgcgcgcgagtcgaggtggcgcgcgccacacggtgagaggattgcagtctcaacgtatcatcaaagaaatattgctattagtatccattgtccacacggaccgcgataaaagatggatatcaatgagatacccacgacatataatgcatacagcaaccactaaagagctcgattaggaagaggcgngatgagagatcacgtgtatattatacccgtgcggtgctcgcgtttgtatgctagtcttgtattctgttgttagcgttgtgcgttcttgtgtcgactgttaggtgtatgcatgtattttatactttatctaggttgttgtgtcttcgtcatgctgtcgtggtgtgntgggtggttgangggttatgtgctgtggtataattttacacattatagcgcgcatcatatatcgatgtntcacaagatccgcacatgtgttgatatctacagtagtaaagatcctcgagaagtgtggtaattcatgcacgcatagctaatgacacatctctctatgaacttacacaaccacactcacccacagactatctgatcgtcacccatcaaccgccatcgcgctactctgagatcctctcctttactngtgttgagccggcgcgcgcagcagcgatacaccgtgacgcntccgtacaatatcacatgcatctctaacaagattaactatctaaccataaagagatagtttgaacacaatcaaatatattacttctacacattacacatacaatcatacatatatgtttatttgtgttgctntttgtatggtgttgtgtagatgtatatcagattatatggtggcttagatgtgcgaacgcttatatatgttatagtgtagaggagatgtgaggagtcttacacgacatatatgttgatgtgtactctccgtcgccctagcccaccacagcgtgcgttcgagcatgcggtgccgcatcctccacacgctgccgctccctgcgctactcgccaggctcacgtcacctcttacatgacttgagaggagccgcgacacagtgagcccagatagtagcccgagcgcgaccgcaccaattcgactcaacgagcagtctctcctaccaacggcactcgatacgagggcatnnnacaaaaacnnagaggaaggaaaggagaacgaacaacaacgaccggccaccccgcgncgnncacggggcccccaagcccccccccgcnnngccccnatcctcctgncccaaaataaaaaccaacnaaaagaaatgaanaaanaaaaanngaacccacccccncnnccccgcccaaaaagtcnaaaaaaaaaccnaaacacaaaacacaaaaaccacac

SEQ ID NO: 444 - DNA, 1416 bp, Glycine max
  misc_feature (17)..(17): n is a, c, g, or t
  misc_feature (19)..(34): n is a, c, g, or t
  misc_feature (37)..(37): n is a, c, g, or t
  misc_feature (47)..(48): n is a, c, g, or t
  misc_feature (52)..(52): n is a, c, g, or t
  misc_feature (61)..(61): n is a, c, g, or t
  misc_feature (191)..(191): n is a, c, g, or t
  misc_feature (195)..(196): n is a, c, g, or t
  misc_feature (292)..(292): n is a, c, g, or t
  misc_feature (677)..(677): n is a, c, g, or t
  misc_feature (766)..(766): n is a, c, g, or t
  misc_feature (819)..(819): n is a, c, g, or t
  misc_feature (1014)..(1014): n is a, c, g, or t
  misc_feature (1034)..(1034): n is a, c, g, or t
  misc_feature (1069)..(1069): n is a, c, g, or t
  misc_feature (1085)..(1085): n is a, c, g, or t
  misc_feature (1129)..(1129): n is a, c, g, or t
  misc_feature (1175)..(1175): n is a, c, g, or t
  misc_feature (1193)..(1193): n is a, c, g, or t
  misc_feature (1282)..(1282): n is a, c, g, or t
  Peptide Sequence Number=SeqID_7651
  Probeset Number=SeqID_10223
tgtgtggctcccccccntnnnnnnnnnnnnnnnnctnctttttctcnnttgncgctttccnttaatactacgcttacttattgatcttagaggctagcgctaactccagaggtggcgcggcgggctcgctcttttttcctctgtgatgggtcgactttcttcgcgagtgagttgggaggggtaatcttcancaanngtataaacaaaattcatatataaagcaagcgatcccctgacatgtgggatacacgcctggtcatggctgggtgagaccgttctgcggggtggggcngcggtcttgctcgcgggtgatctagaatgcctcgagttcggtgtgtcgaggtggaggagggagtcggttgatgggtttgtggtggggaggccttatggtttatattggattttatgaagaacaggatgacaaagcaccgaaatatagagagaagagtaaccggaaaacagactaacatacagccactcgacctgactgtctcacataagcagagactatgggagtgaggtatggatgggagaagagtatgtacggtactcgtaggtttgtctagttcggatcctgcggtgctagtgtttgtggcgacggttggcgtcgccagtcttagggtgttctgtcgtgttgtgtttgtgatgttgagatcgtggtaatggcgatagccctntataggaggtagccgtgctgaacgcgcgcgaagcgatgacaccacgagaaacactgtaacaagtcatcgcaataatttctgtctgctgnagtgaggtggtttgatcgcttatgagggtgatctcaccactcccgtgtgatgncgcgtgcgctccaggcgtcagctaagcaagacatagttctgatatccctacgcgctattgcctcctcgcatcatcgtccgctgttctcactagcttctccacctatcgtggcgctcgcaccgcgataactctcgtattatatagtataatcttgtactcaatgtatatttatattatctcatgtcagtggaagantcagacgaccacaatcgacntgacgtctacacacgcagcgtaactgtcaggagcnatgacacaagaagagnagagacggtgcagtctcgcgagctgatgagacgcacagcaccancacggcggcgatgccggtgtcgactcgcgacgctcgtaataacacnatatcactcactacgtcntaataatgcgcagccgcgctgcactttcgtccctcgtctcctgtcactactcgctctgcctctgcgctcgagtatacgacggggcgcancgtagtcaatcatgtatctgatgagtgtgcaccaatagtctactgcactctgactcgggtcatggagttgccacgacggtaagatatatagtaggatgtgaagatcatctaatgagaagtatgatcagtgtgcg

SEQ ID NO: 445 - DNA, 388 bp, Glycine max
  misc_feature (14)..(15): n is a, c, g, or t
  misc_feature (31)..(31): n is a, c, g, or t
  misc_feature (33)..(34): n is a, c, g, or t
  misc_feature (51)..(51): n is a, c, g, or t
  misc_feature (86)..(86): n is a, c, g, or t
  misc_feature (90)..(90): n is a, c, g, or t
  misc_feature (93)..(93): n is a, c, g, or t
  misc_feature (118)..(118): n is a, c, g, or t
  misc_feature (127)..(127): n is a, c, g, or t
  misc_feature (144)..(144): n is a, c, g, or t
  Peptide Sequence Number=SeqID_7735
  Probeset Number=SeqID_10224
ggcggggaacaagnnccgcaaggcgccgggncnnccagcggcggcgacggngaactgcgccgacaacacgggggcgaagaaccccnacancancccggggaaagggaccaaaggccgngggaaccgncctccctcggcccgcgncggcgacatggcgatggccaccgcgaagaagggaaaacccgacccgaggaatattgtcttgccagctggcatcgggcgccagcgcaagccatggcgccgaaaggacggcggccacacgaacttcgaaaataatgctggggttactgccaaccccaagggagaaatgaaaggttctgctatcactggtcccaatggaaaagagagggcggattcgagggctaggagggcaagaggaggcaacgcc

SEQ ID NO: 446 - DNA, 762 bp, Glycine max
  Peptide Sequence Number=SeqID_7736
  Probeset Number=SeqID_10225
aggcattaagacctgaggcagctgctatgaaggctatgcaaaaagcaccgaatattgttgatgttgccaagcccatggatgagatcaatgaccagcccgagaccatgaaccagattcaggatccattgtcagctccaattggggcacctgctgattttgccgaggcgaaattggaaccagaccttaaaaaattggagggttttgagttggaaaaacaattttttcagccagcaattacagttcctgcagccccagtgcaggtcccagttgggcgccaactttctcgcccagttcctgaaaagggaactcctgaagaagatgaattggcacctttccaggctgagatggccctttgagcagaattttccaggcattttttgtgtccaagatgcggggcttcaaagaggaattgtacccccttttccggggattcctcctcgcttatctgggaaattattgagctggccaggggatgtttttaaaaggtgaaaaaaaaaaggttcataaaagtcgttcaaaacttatttacttttttttgggaggggttggaacccccctttcctttatacgtaacaattattgagccattgggcttttttatattttatggggtggagtttaccatggccagtttaaccaaggtattttttaaccatgttccaccgaagtataaggaataagaatttggttaccccccaaaaaaggaaaaaaaaaaaaaaaaaaaaaaaaaaaaaaaaaaaaaagaaaaaaaaaaaaaaaaaa

SEQ ID NO: 447 - DNA, 390 bp, Glycine max
  Peptide Sequence Number=SeqID_7737
  Probeset Number=SeqID_10226
ttgaaaatttaccatggggaagtggccgtggggttttccccccccctgcttgaataagttttgcagtaaacaatcgttcttcaaataccaacaaaagttttcgcccagcccttggaaaaggtaaaaaaattgtttttcttactagagttgatcctttcccagaagctttacgggttgttttttttggggttaagaatgaaattctgagttttaccgccactaatcctatgctaacggtcttttttgagaactgtaagagtctcaaatatctggttgatgagtgtcctttggcatttgtgacttagcaggtagtattttattcccttaaataaagcgcatttctatgtgcaatgggtgtgtttggatatcaacaaatatgagaaatgaaaa

SEQ ID NO: 448 - DNA, 417 bp, Glycine max
  misc_feature (91)..(91): n is a, c, g, or t
  misc_feature (94)..(94): n is a, c, g, or t
  misc_feature (97)..(97): n is a, c, g, or t
  misc_feature (144)..(144): n is a, c, g, or t
  misc_feature (380)..(380): n is a, c, g, or t
  Peptide Sequence Number=SeqID_7738
  Probeset Number=SeqID_10227
gttgcccttatcccgtctccttccataccaaccagccgccgccaccgccactccaccttccctcctcgtgtcgcttcatgtcgccgccggnggnggngggcccctccatctatcccgcaccggatccatccccgtctaccccancaaatgccccttcccattcaggtcgttccctcgagctgcggcggcccagtcctgcctctagagctaacgcggccgcagtggcggcaggactgactggtgggtttggaacccccgaggtctccggcggcgggcacagatccagctccgcggcgagccaacttgagtcagactcgtggggatggtgtgcggcaaggcggagcagaacacggacgtgcccttcacgctcgacgacggcnccagccgcatcaatttcatcagatggtttggcggtta

SEQ ID NO: 449 - DNA, 725 bp, Glycine max
  misc_feature (456)..(456): n is a, c, g, or t
  misc_feature (488)..(488): n is a, c, g, or t
  Probeset Number=SeqID_10228
ggttgtgtgggtgtactggggagatggcgccagctgatattcgaggggggggcgggtgtgggttggcggtgacggagtggggggttgttgcgggggcaggctgcgccgaaagaggggggggtgttcttctttcctaacgcctctttttaatatttcgcagaaaccgcgcgcagggagtatttaacccccagcgggtggcggggcgtggggaggggccggggccgttcccttgtcggggtggggggggggggggggccccctcccaccttttccagggggtggggtctgttcggtctcccggaaccttccgaaacgtgttataaggatggagggcggtgcggggaagttggttttttgttgttgttttgttcggtgtgccgaatgtgcaagccgctcacgacgtggggggggggacctattgggtgccccttccctttcgtatgagatccctcaggnccggctcccgggggggttgaataattcatgcngggggggcagagtaggcagaggaagggatacaaatctaggcaggctttggcgccgagccaggttgcgcttgaacaatggccatgggaaaagaaaattaagggatcccaagcgctaggtcagtgtggataaataatatcttaagactgcacctctgtctgggcggggggcaagaagggtttccaccacccaaattcatatttaggatagggtgcctcccattagtcagggcttgtcaa

SEQ ID NO: 450 - DNA, 615 bp, Glycine max
  Peptide Sequence Number=SeqID_7739
  Probeset Number=SeqID_10229
ggcgcccccccaccccgcccccccccaccccaagccccagcaccccacgccgggcccactaggcaggttgccccggcatgatgtccccgggacggaagttgctcagattgatggtgccccaaggatgggccaacccttggagccaatattgatttcaggccaaaaaccagcccctctggctttgagatcattggcccttccccaatgctttggattcagtggggaaccgttcatcctgggcttgtcctagctgctgctgaatccccctgaaattgctgaggcttaattaatgttgcaccaaattaggttaaaatagtatcaatgcttgcacctagaaataataattgtagccttggacttagggaattaagctttgaaggtgttagtagtgatctattggggggggtgatgcgcctctatgaagtttgttaatactatatgaagctttgagggggttgctagtgatctattgtgtcttaccttccccgaagcctaatttaattgggtcttttttctattataaatggagagggtggggtaccatccataccttcgtctcaaaaaaaaaaaaaaaaaaaaaaaaagaaagaggaagaagagaaagagagggaagga

SEQ ID NO: 451 - DNA, 1351 bp, Glycine max
  misc_feature (1)..(1): n is a, c, g, or t
  misc_feature (179)..(179): n is a, c, g, or t
  misc_feature (668)..(668): n is a, c, g, or t
  misc_feature (1324)..(1324): n is a, c, g, or t
  misc_feature (1327)..(1327): n is a, c, g, or t
  Probeset Number=SeqID_10230
ncgcggtgccacgcgtcagctgtatctgcgcgacagatatggcttgcctcgcgcgcacactcggtcgcgcgacgagcgcgtgctgatcgagctcacagtcgtgcatcagaggcgcgtcctgcgataagaggatcgtgcactccaagtgataagcgcgtcggcgcagtctcctgtactgnctgtgcacactgcagggaagctaaacagagtgcggagaagaaggagtacattgtataatatctagtatgtacattgtgttacagagagacgcttatgtcaacttggagtgctaccatcgcgcgtcgcgagagatccgcagttgggtagagatggatacgtcgtgtgtatccaatcgaggtgtgtgtgagagatgcacgtggagtgtgtctactacgaaggcctagtacgattgagacgtggtggggatgttagacagtagacgagtagagaagagtggactagagacgcggcgcattaggcgtcgtcatcctgcgtatattgatttcgatcatcataccttctttcctacatcgccagcgaagtagagcttagctgctgctgtgcaatgttactagactccgtagtcagatcggttctatttatccacctagtctctgatgtataggtgatataataataatgcggacgattgtaagcgcgcacataanagatgatgggacatgtacaggatgatgttgtcgcttgtgggacgcgttcgctccgacggtcgaatatatagatgggcgggtacggcgtgcgggtggtgatggtggagggttggtattgagagtccgcggtgaaaaggctataagataagctgagtggcaataatgagcgagaggcggtggggaccacgacgcaccgacgcatatacggatctatttaagtatttaaatatccaaggtgtagcgaggtagttgggttgggaggagatatatgggtgttgcataagaaaagagaggaaaaagacgagagaattatgcgcatatgttcgctcagacacccgcaaggtcagacgcaaacccctgtcgatgcggcgtagagttcatgagatgggagaggagagacaacatcctctctccccaacccgcccgggcgcgacgcaacaagtcgatcgacaagacaaattcaacgacgcaaacaacaaaacatttcaaacctacccatacccagcctaagcgtgtggggccaggacgcgcgcagagaagtacggtaatgaaagaagagcgcgaaagaaccgaggcgcgcgaaggaggcgggagggggaggtataaaacacccaaaattacgtactccacgtataagcgagagactaacacttttnaanaccaaccgtatcaaaaaaaaagga

SEQ ID NO: 452 - DNA, 1662 bp, Glycine max
  misc_feature (1)..(1): n is a, c, g, or t
  misc_feature (24)..(24): n is a, c, g, or t
  misc_feature (40)..(40): n is a, c, g, or t
  misc_feature (45)..(45): n is a, c, g, or t
  misc_feature (58)..(58): n is a, c, g, or t
  misc_feature (181)..(181): n is a, c, g, or t
  misc_feature (185)..(185): n is a, c, g, or t
  misc_feature (222)..(222): n is a, c, g, or t
  misc_feature (295)..(295): n is a, c, g, or t
  misc_feature (368)..(368): n is a, c, g, or t
  misc_feature (373)..(373): n is a, c, g, or t
  misc_feature (395)..(395): n is a, c, g, or t
  misc_feature (419)..(419): n is a, c, g, or t
  misc_feature (527)..(527): n is a, c, g, or t
  misc_feature (597)..(597): n is a, c, g, or t
  misc_feature (601)..(601): n is a, c, g, or t
  misc_feature (638)..(638): n is a, c, g, or t
  misc_feature (664)..(664): n is a, c, g, or t
  misc_feature (756)..(756): n is a, c, g, or t
  misc_feature (833)..(833): n is a, c, g, or t
  misc_feature (835)..(835): n is a, c, g, or t
  misc_feature (900)..(900): n is a, c, g, or t
  misc_feature (1037)..(1037): n is a, c, g, or t
  misc_feature (1048)..(1048): n is a, c, g, or t
  misc_feature (1064)..(1064): n is a, c, g, or t
  misc_feature (1102)..(1102): n is a, c, g, or t
  misc_feature (1128)..(1128): n is a, c, g, or t
  misc_feature (1149)..(1149): n is a, c, g, or t
  misc_feature (1183)..(1183): n is a, c, g, or t
  misc_feature (1211)..(1212): n is a, c, g, or t
  misc_feature (1215)..(1215): n is a, c, g, or t
  misc_feature (1217)..(1218): n is a, c, g, or t
  misc_feature (1242)..(1242): n is a, c, g, or t
  misc_feature (1353)..(1353): n is a, c, g, or t
  misc_feature (1445)..(1445): n is a, c, g, or t
  misc_feature (1495)..(1495): n is a, c, g, or t
  misc_feature (1501)..(1501): n is a, c, g, or t
  misc_feature (1507)..(1508): n is a, c, g, or t
  misc_feature (1534)..(1534): n is a, c, g, or t
  misc_feature (1538)..(1538): n is a, c, g, or t
  misc_feature (1557)..(1557): n is a, c, g, or t
  misc_feature (1571)..(1572): n is a, c, g, or t
  misc_feature (1582)..(1582): n is a, c, g, or t
  misc_feature (1587)..(1587): n is a, c, g, or t
  misc_feature (1611)..(1621): n is a, c, g, or t
  misc_feature (1623)..(1623): n is a, c, g, or t
  misc_feature (1625)..(1628): n is a, c, g, or t
  misc_feature (1630)..(1630): n is a, c, g, or t
  misc_feature (1632)..(1632): n is a, c, g, or t
  misc_feature (1634)..(1634): n is a, c, g, or t
  misc_feature (1641)..(1641): n is a, c, g, or t
  misc_feature (1646)..(1647): n is a, c, g, or t
  Peptide Sequence Number=SeqID_7740
  Probeset Number=SeqID_10231
nagcagtatcatataataatatangtgtatagttctatangcacntgttgtatgacanacatctgtacgtggacatatgatcgagagtctattcttgataattatcaacaagcagtacacatcgtatcatagactcacacacgagcatacgaatagctcacaatcagatactacatacatnatcnataatcaacacaacagcgtgacagacgagcaccatanatctctagggagctgtgtgagcgcgacactgtcgcatccctagcaatcagtagttatatataatcacatcacntatcttcgcaatcttcttctctgtgtagtagcaccgacgctgtcgcactcgatatacatagacgagcagcacntagantagtgcgtagtatagtagactntgccgtatcgtgataagatattangatagatgcatgtagtagtagatgatcgtatgttgattatctgttgtagttgtatgtcatcaatgtagtagatatatgtagcgattgatgtgtgctagtgatagtagnataagcgtcgcgcgcagcagtttctgatgtgctggtgtatgctatatatattgttatacgtataagatantatntgactgcgcatgctaggacgggttgagtgtgtgagtncatgtacgtctatgatcctcctctangcagatacttaatcagagtgtagtggtgtatatacctacatagagtgagtgtgagatagtatgtgtggttgtgggtgacacttcaatatatnataatatataagagacagatgagtagagagagagtaatacagatgtaatatctatagagaatatatcatgatacgtntnctatatatagtattgcgttaatagtcacatgttataatatgtgtgatctcaactccatatagtantttgtcataataatatattacatatattatttcacacttacatcctagtatattcattctactatctctcttaatgcagtataactcatcatacatatgattatatattaatgaataattatgtaatatattcttcncttgttatgtntcgtcttcttctgtcnattatgtttgtgtattatcattgctattaattgtatgnatgtcattatattataagtatatatnctagttatatttatctaaacnataataatataatatatatcttatttcaacaatngtacatatatgatattttaaagaagagnncangnnaatatgacagacatcacacagatnaacacaacatataccatagacataataataagaacaagaagacacacccgacacaatcgtatgctcgtctcacgagagtatttatgtatacttttgttctgttcgagtgtnggtctcgtcggtcctggttttctgcttactgcgtgatatatatatatataatcttgcatgttggatatactcgagtgaagattacactaatnacctcgcatcttcaatacacatatgagtgtaggaggatgtgcgtgtgcangtacgntatatnnagatacctgactatatatgtactgcnttcncgccttatttccatatatntcatacacataaannaaataaacanactanatatatccctcgtacgttcttagnnnnnnnnnnncnannnncncncnccccccnccacnncccccccaaaacccc

SEQ ID NO: 453 - DNA, 1368 bp, Glycine max
  misc_feature (75)..(75): n is a, c, g, or t
  misc_feature (98)..(98): n is a, c, g, or t
  misc_feature (114)..(114): n is a, c, g, or t
  misc_feature (368)..(368): n is a, c, g, or t
  misc_feature (497)..(497): n is a, c, g, or t
  misc_feature (653)..(653): n is a, c, g, or t
  misc_feature (724)..(724): n is a, c, g, or t
  misc_feature (727)..(727): n is a, c, g, or t
  misc_feature (785)..(785): n is a, c, g, or t
  misc_feature (891)..(891): n is a, c, g, or t
  misc_feature (956)..(956): n is a, c, g, or t
  misc_feature (1204)..(1204): n is a, c, g, or t
  misc_feature (1252)..(1252): n is a, c, g, or t
  misc_feature (1254)..(1254): n is a, c, g, or t
  misc_feature (1276)..(1277): n is a, c, g, or t
  misc_feature (1292)..(1299): n is a, c, g, or t
  Probeset Number=SeqID_10232
cagcgcgccgacctcacaccaccacacacacagacgaacgagccagcacagcacgagaggcatgggtcgcggcangcagaagtatgcacagtggcagngcacggcgccacaagncgacaggagagagaagaggacagaccaaagcccacagaacaagtattcgctcgcgcgacagagcgcgaatggatatgggcggcaggcgggtgaccagccaatgaagagaagcagaataaacagcacagatctgaagtagttgaagaagtatagacgaaacaagcagtacacacaacacgccacgacaagtttgatagtgtatatactagcagtatgctttgtatgtgcaagtaacgcccaagcaacagcatgantaatcgcttaaggtccgggtgaggacggaccggagtccagggacgagcgcgcggaccgatacagacaactgttgtccttaatcaactcaaaactacattaagcaatcagaacaaggagaaatatgatgntatgaggggaagagacagggcgtacggctatgttgggggggtgtggcggtgtgtgggtacttgtcttcctccaccatccattagggtggtgttttttttttggggtgaagataaataaacacaacataacactatataatatatatcatatttgtngtgttagatacacataatttttgggtgggagcggggtggggggtgctagggtagggaaaccaatttcaatnttntctaatattgctccgagtttttatataacaacacaatcacagcaaccatctcctcacnaataaaaaattgtaggcgagcgagcagaaacacaccacacaaccacacagaacaaaccatagagacaatcatatcaaacacactactcctcatacagatctaacanatataccatacaacctctctaacgtgtctaacaacaaaaaatgctacgctaaaacactatatttntctattctaaatctctgtcttgtgttttttgccccacaccaccatagtgtgaactcgactggcccgcaaaaaacaccccacgtcctctccatactaagacacaggggagtgtaatagaaggaaagatcagaaaggtggatgtttcagcgggtggtggcagggcgggagagaacagcgctccccacaacacgagatccccagaggcgcgtgcacacacaaccaataaatagatgttatattatttcttncgatctatcgaacaacatcaacaaaattattatgtgagacgtactttntncctaagtattatcgtatttttnntaacaatatgagggnnnnnnnnccccacagggagggggggtggggggtgggggatcacacccctctaccccactccccggcggggcctcca

SEQ ID NO: 454 - DNA, 1028 bp, Glycine max
  misc_feature (78)..(78): n is a, c, g, or t
  misc_feature (98)..(98): n is a, c, g, or t
  misc_feature (898)..(898): n is a, c, g, or t
  Peptide Sequence Number=SeqID_7741
  Probeset Number=SeqID_10233
tataactcaacacacccacatacatcctaatcacccaacctaccccccacacccatcggatccgagacccccctcggnctgtttcaaacaaggagggngaaccgaaagtgtttccgctcgatgaacccggcgtcggcgttgaccctatctcacggcgcgaactgtgtcacaccgcgcatgagctggcgggagaagggatgttaatcctctggagcacctcgtatctcgacgaagccgagcagtgccgtgacgtgttactgatgaacgaaggcgagttgctgtatcagggagaaccaaaagccctgacacaaaccatggccgcacgcagctttctgatgaccagtccacacgagggcaaccgcaaactgttgctacgcgccttgaaactgccgcaggccagcgacggccatgattcaggggaaatcggcacgtctgatcctcatcaaagaggccacaccataccatattcgccatgtcgcacgccatgcccgcaatccaccccacccaaactacccccgcgtcctgaccatgcgtctattgatttcaatgcctgctctcctcaggaaactcccacaccgcccactccacgccaccctcccctctcacaaaaccaccggacccccctctcgctatcaactctgatacctccctacgttacacgcctctacccctacccaacattccggaataacaccttcaccccaattagtactacccccacgcactctttcttcacactaccactcgttaaccaccccactagctccatctgccccatccacgccgtacatgtcatctctcttgacccgtggtcgctccctccgacccactattgctcgactcccctccttacacctatcacatctcctacgctctcatcagaccaaagcacgcgcgnttcgctctcacatacactcaccacatcagctttattaatcttccgcccaaccccctctacctccacactacacgatgccacatactcccatgtcacttcttcacccccatcctcatagaaccatactgca

SEQ ID NO: 455 - DNA, 1854 bp, Glycine max
  misc_feature (7)..(7): n is a, c, g, or t
  misc_feature (12)..(12): n is a, c, g, or t
  misc_feature (14)..(14): n is a, c, g, or t
  misc_feature (30)..(30): n is a, c, g, or t
  misc_feature (35)..(40): n is a, c, g, or t
  misc_feature (44)..(47): n is a, c, g, or t
  misc_feature (60)..(60): n is a, c, g, or t
  misc_feature (72)..(72): n is a, c, g, or t
  misc_feature (97)..(97): n is a, c, g, or t
  misc_feature (99)..(100): n is a, c, g, or t
  misc_feature (102)..(102): n is a, c, g, or t
  misc_feature (118)..(118): n is a, c, g, or t
  misc_feature (160)..(160): n is a, c, g, or t
  misc_feature (222)..(222): n is a, c, g, or t
  misc_feature (229)..(229): n is a, c, g, or t
  misc_feature (355)..(355): n is a, c, g, or t
  misc_feature (357)..(357): n is a, c, g, or t
  misc_feature (421)..(421): n is a, c, g, or t
  misc_feature (450)..(450): n is a, c, g, or t
  misc_feature (461)..(461): n is a, c, g, or t
  misc_feature (490)..(490): n is a, c, g, or t
  misc_feature (520)..(520): n is a, c, g, or t
  misc_feature (524)..(524): n is a, c, g, or t
  misc_feature (529)..(529): n is a, c, g, or t
  misc_feature (533)..(533): n is a, c, g, or t
  misc_feature (578)..(578): n is a, c, g, or t
  misc_feature (715)..(715): n is a, c, g, or t
  misc_feature (728)..(729): n is a, c, g, or t
  misc_feature (757)..(757): n is a, c, g, or t
  misc_feature (781)..(781): n is a, c, g, or t
  misc_feature (785)..(785): n is a, c, g, or t
  misc_feature (791)..(791): n is a, c, g, or t
  misc_feature (837)..(837): n is a, c, g, or t
  misc_feature (849)..(849): n is a, c, g, or t
  misc_feature (931)..(931): n is a, c, g, or t
  misc_feature (942)..(942): n is a, c, g, or t
  misc_feature (1013)..(1013): n is a, c, g, or t
  misc_feature (1132)..(1132): n is a, c, g, or t
  misc_feature (1329)..(1329): n is a, c, g, or t
  misc_feature (1337)..(1337): n is a, c, g, or t
  misc_feature (1339)..(1339): n is a, c, g, or t
  misc_feature (1349)..(1349): n is a, c, g, or t
  misc_feature (1374)..(1374): n is a, c, g, or t
  misc_feature (1385)..(1385): n is a, c, g, or t
  misc_feature (1387)..(1387): n is a, c, g, or t
  misc_feature (1397)..(1397): n is a, c, g, or t
  misc_feature (1403)..(1403): n is a, c, g, or t
  misc_feature (1413)..(1413): n is a, c, g, or t
  misc_feature (1424)..(1424): n is a, c, g, or t
  misc_feature (1426)..(1426): n is a, c, g, or t
  misc_feature (1428)..(1428): n is a, c, g, or t
  misc_feature (1456)..(1456): n is a, c, g, or t
  misc_feature (1499)..(1499): n is a, c, g, or t
  misc_feature (1505)..(1505): n is a, c, g, or t
  misc_feature (1528)..(1528): n is a, c, g, or t
  misc_feature (1557)..(1557): n is a, c, g, or t
  misc_feature (1565)..(1565): n is a, c, g, or t
  misc_feature (1594)..(1594): n is a, c, g, or t
  misc_feature (1616)..(1616): n is a, c, g, or t
  misc_feature (1637)..(1637): n is a, c, g, or t
  misc_feature (1680)..(1680): n is a, c, g, or t
  misc_feature (1694)..(1694): n is a, c, g, or t
  misc_feature (1730)..(1730): n is a, c, g, or t
  misc_feature (1743)..(1743): n is a, c, g, or t
  misc_feature (1793)..(1793): n is a, c, g, or t
  misc_feature (1814)..(1814): n is a, c, g, or t
  misc_feature (1854)..(1854): n is a, c, g, or t
  Peptide Sequence Number=SeqID_7742
  Probeset Number=SeqID_10234
gtgtttnttggngntgtgtgtgtgggttgngttgnnnnnntttnnnnttttctttttgtngttcttttctcntttttctttttttttgttctgtttncnngntctctttctctttgtnttgtgacgcgtacggagtggagaacgagccgactcctcaccngccaccccgcccccacgcgctcgcttctgcgctgttgtttgtttgtgttgagggtcggtgtntgtcgcnggtgcgatatatagggctgttactcgtcaaacgagtggaggtgtgaagtatatttcgtctctctatccacttgtgtctcgtcgcgctcatcaacccctcctctcccactctcgtgcgtcagcacancntcacaactatcacttgtgcactctgtactgctcctgagctcatctacttcgccaggaaatcgantggacgcgaacgactctgccgctcgcgtnacgcactcgtncgcggcgcgctggtgccggccgccggccngccgcggcggcgacgcgcgcccggcgctcngcgngaggncgtntattatcgtatctatatatagtgtcgacgctgcgattgatgcganttactaccatttatactttatctatctctttctctcgtctataacatcacactctaccataccgaggatgcattctcccacttctcttatctgtaatatattatgactgctggtagagactatcactactatcatcntaacacttgtgtnntcttgcgatactagagccaccgcaggancaaagtaataagaatacatgcatnaaanacttcntcgatgtcaataaacaaacatcttacaacaccagatctaccaagcngcggaggataangaaattgtaagcaggggagtgtatgatttgattatgatatagtgtctattgtgtagtccgtgttcgtgtacgagaggaagtnagatatgtcangatcatagtgatataatatgtgacaacttgacgatagtacacgagaatgcgatcattatacaaagatactntcacgcgcgcgctcgctagactgatgatgcgtgtgacacaccgcacaggacactctctactatcatagtgttgctcaagtatcacacaaccacctactacactctatctctctctcacntcgacaccacatcgtctattatatatattgtagtatagagtcactatgccagcgtgaatcgcaccatcgcacgctgccgcgccccatcatctgttctcactcatctctacagcgcgcacgcgacgccgacagacacacatgccactctcgctctacgcgccgtctcgacgacctcacgcgccccgcacgcgcacaancactacanantacatacagntactcactatattgatattatactntactctgcatncnatatgcgatnctgtcnctgcagtaangcctgaccatncnancgagtacgtagctattcaaagcgtgtgnatgacaggatatgacgctgactctctcatgctgtccacacgtngctctnccgtgcatgtgcagatcgcacangaaacatctgtactgcgcgcatgtctgcnctcatctntctcatctctcgttggctcgtgtcgcacngcgatagcacgcccaacgcgantcggtcgaccagagacggacnagacctagcatatccagatataccctagcagaaacatcattcnagttcacaaagctnggcagcgctggccagcgctccgtatgcgctcgcacncacagccatgcancatcacagacagacgtcgtcgacagcgcgacgacaacggaacgaacgcangaactcgactggaatgctctntatcacgatagacaatctctctcttactcactgactaccn

SEQ ID NO: 456 - DNA, 1848 bp, Glycine max
  misc_feature (1)..(29): n is a, c, g, or t
  misc_feature (34)..(34): n is a, c, g, or t
  misc_feature (47)..(49): n is a, c, g, or t
  misc_feature (58)..(58): n is a, c, g, or t
  misc_feature (462)..(462): n is a, c, g, or t
  misc_feature (468)..(468): n is a, c, g, or t
  misc_feature (832)..(832): n is a, c, g, or t
  misc_feature (1069)..(1069): n is a, c, g, or t
  misc_feature (1072)..(1072): n is a, c, g, or t
  misc_feature (1074)..(1074): n is a, c, g, or t
  misc_feature (1078)..(1078): n is a, c, g, or t
  misc_feature (1104)..(1104): n is a, c, g, or t
  misc_feature (1108)..(1108): n is a, c, g, or t
  misc_feature (1178)..(1178): n is a, c, g, or t
  misc_feature (1182)..(1182): n is a, c, g, or t
  misc_feature (1219)..(1220): n is a, c, g, or t
  misc_feature (1235)..(1235): n is a, c, g, or t
  misc_feature (1237)..(1237): n is a, c, g, or t
  misc_feature (1268)..(1268): n is a, c, g, or t
  misc_feature (1277)..(1277): n is a, c, g, or t
  misc_feature (1282)..(1282): n is a, c, g, or t
  misc_feature (1402)..(1402): n is a, c, g, or t
  misc_feature (1414)..(1414): n is a, c, g, or t
  misc_feature (1421)..(1421): n is a, c, g, or t
  misc_feature (1441)..(1441): n is a, c, g, or t
  misc_feature (1486)..(1486): n is a, c, g, or t
  misc_feature (1501)..(1501): n is a, c, g, or t
  misc_feature (1567)..(1567): n is a, c, g, or t
  misc_feature (1570)..(1570): n is a, c, g, or t
  misc_feature (1596)..(1596): n is a, c, g, or t
  misc_feature (1612)..(1612): n is a, c, g, or t
  misc_feature (1615)..(1615): n is a, c, g, or t
  misc_feature (1619)..(1619): n is a, c, g, or t
  misc_feature (1679)..(1680): n is a, c, g, or t
  misc_feature (1703)..(1703): n is a, c, g, or t
  misc_feature (1710)..(1710): n is a, c, g, or t
  misc_feature (1751)..(1751): n is a, c, g, or t
  misc_feature (1767)..(1767): n is a, c, g, or t
  misc_feature (1781)..(1781): n is a, c, g, or t
  misc_feature (1806)..(1806): n is a, c, g, or t
  misc_feature (1836)..(1836): n is a, c, g, or t
  Probeset Number=SeqID_10235
nnnnnnnnnnnnnnnnnnnnnnnnnnnnnggggngggggggtggggnnnacgaggggnaagagcttcaaaaagcctagatgcctccatccgccgggtcgggcgcgcgcgcctcgtagaactctatgtagcgatacccgccgcggccctgccagcgcaacttccgcagcgcagcactccttcatcatgaggatacactccctacatcacgataacaaacacaatggctacctgtctctctcctcttatatcatttctacacgcacggatgagtcctcttaagctgtatcgtacagctgctgctgctgctacatcagcagcgtgcctacgaacgctcagaggtagtcgatcatcaaatgcgtcgtacgactccgagcgcggatacgggtcgtgtcgcgctccgcccaggtggtgtgtcggagcgggatcgcggcggaccgctggtgtgacgcgggcgggcgccnatcgcngctcgactagctgccgccagcacacctacaccgccgtcgtgcccgccacacacacaaccctgtcggcgactctccccttcgcctgccgctagcacaccgcccgcatgcagttgatcctcactccgcgcgtcatgcatgatcctcgcctcacaccgcgcctaccgcaccccacctctccacccggccgccgcgcacgcgtctgccagtcgcgccacgccggcctccgctggcgagcgcacaacgccctcccacaggtccctcgtcatactccccacgcgcaccacacacgagcccggccacgccccacccaacaggagttcactctatgacaacgcggctcgcgaacttataactcacatccccnctctcctcgcgccatctctgataggcatcggtatgattaaacactccacgcgagggcgtactatccgtgatacactctgggccgcgcgctatgacaagttgaggcgccgcgcgactcatggctagagcaacacagtgtgcaagtggcgacgacgggcaatgcgcggccgatggcgcatgcgagctcgctcgctctactagtcgccaaatacaacattcgttacaatatcctctcgcngcncntatngcacctctgccaactgccttgttatncttngtcgctcacgctccatgccatccactacactcaccaccgctatctatctacatacgcacgcctagacttncctntcgtctctgccacttatatagcgactcgaatctcatnncgacatatagtgttngntcgtgcccatctcatctatcggctctcactntgcgaccgngctcnttgtcgtagctgagtgagccgctagctacctgccgaccttctactcgcgctcctctgctcgtcgtggtcttatctgccttctgtacgtatgcttgtcgactctgcatcatcatcctgcgncgatgggcctgncacgacncgtcatgcgtcggtgtgcgncatcgtcactcgtggagcaggtcgctatcctcgatcagtgtggtnatacatggatgtgcntacctcactccccgctcgcgctcgcgacgtgcctggcatcacgcccgctcgctgcgagcgcctccncgngagcacggacgacactgcgctcgcgncgccctgtacgcgcantgngccngtcgcgtctgacagcccgcacatcctacctccagtctctaccactgtctagcccgcaaanntccaacatcgtcagactacactncgctctntcacacgacacgtctacgcgtctctcctgatcgcgaccatntgatcgtccacatttntactactctacagnacgtgacatacgcatgtgagaaggnactatgatagaatgcgagagcagcacactntatcgtctgtct

SEQ ID NO: 457 - DNA, 477 bp, Glycine max
  Peptide Sequence Number=SeqID_7833
  Probeset Number=SeqID_10236
agccgtttttattattgacaccaacagcttggagatccatctcgacctgctgcctaggagactctatcttgctgggatcctagagcaagagtttctaaaatatcagcagcagcagcaaggaggttcccaaagccagaaaggaaagcatctagatgatgataacgaaggaagcaacatattgagtggcttcgcccttgaattcttgaaagaagcgttcggcgtgaacatgccgctagtgagaactccctggtgagaacgtagatggtggttagtggaagcccatttgtgaccgtgaaaggaggtctaaagagtcacagcttccgccttgaggaagccccgcaagaagaagttgattgattgttgaaggaagagctgccccagtggcgtggagaccgacaaaggttgccaacgccaaagcaaaaggagcaaaatggcatttgttgaaaccttttgcacaattgagactttcgccaaaac

SEQ ID NO: 458 - DNA, 514 bp, Glycine max
  misc_feature (29)..(29): n is a, c, g, or t
  Peptide Sequence Number=SeqID_7834
  Probeset Number=SeqID_10237
ggcagcaaaaaggctggtttctggagagnggatcacggcacggagctcggcgagaggtgtgcaccatatcgcttaccccaacgcaccagagtcggggaagactgaactgagagccatatatggacaactgtgtcaagacgataagcccatgggtaggagatccgatgccacaaaccggggacagtttgccgcaaccgtggaagctccccactagaaatctgacatcaagcctgtgtttgttgatctcacacaggaagatcaagatgctgttcggcaacttgctcgaagaaggaagtgaagcctctgggaaaagctgtgggaacctcaagaaagagcggcacatattcagaccagacatagccaatttttctcacgataagacatggcgtgactggctacatggacgctaatcagctaatatcagctatgcgaaactgctgggactgaccgcaccatgtcagaaaaggtccctgcacatgatcgccagctgcgcgataatgaagctgaacaacga

SEQ ID NO: 459 - DNA, 1812 bp, Glycine max
  misc_feature (42)..(42): n is a, c, g, or t
  misc_feature (45)..(45): n is a, c, g, or t
  misc_feature (68)..(69): n is a, c, g, or t
  misc_feature (84)..(84): n is a, c, g, or t
  misc_feature (86)..(86): n is a, c, g, or t
  misc_feature (98)..(101): n is a, c, g, or t
  misc_feature (142)..(142): n is a, c, g, or t
  misc_feature (144)..(145): n is a, c, g, or t
  misc_feature (148)..(149): n is a, c, g, or t
  misc_feature (160)..(161): n is a, c, g, or t
  misc_feature (167)..(167): n is a, c, g, or t
  misc_feature (186)..(186): n is a, c, g, or t
  misc_feature (189)..(189): n is a, c, g, or t
  misc_feature (214)..(214): n is a, c, g, or t
  misc_feature (218)..(218): n is a, c, g, or t
  misc_feature (257)..(257): n is a, c, g, or t
  misc_feature (262)..(262): n is a, c, g, or t
  misc_feature (319)..(319): n is a, c, g, or t
  misc_feature (331)..(331): n is a, c, g, or t
  misc_feature (406)..(406): n is a, c, g, or t
  misc_feature (425)..(425): n is a, c, g, or t
  misc_feature (451)..(452): n is a, c, g, or t
  misc_feature (483)..(483): n is a, c, g, or t
  misc_feature (508)..(508): n is a, c, g, or t
  misc_feature (527)..(527): n is a, c, g, or t
  misc_feature (658)..(658): n is a, c, g, or t
  misc_feature (856)..(856): n is a, c, g, or t
  misc_feature (979)..(979): n is a, c, g, or t
  misc_feature (1019)..(1019): n is a, c, g, or t
  misc_feature (1063)..(1063): n is a, c, g, or t
  misc_feature (1066)..(1066): n is a, c, g, or t
  misc_feature (1104)..(1104): n is a, c, g, or t
  misc_feature (1141)..(1141): n is a, c, g, or t
  misc_feature (1151)..(1151): n is a, c, g, or t
  misc_feature (1187)..(1187): n is a, c, g, or t
  misc_feature (1307)..(1307): n is a, c, g, or t
  misc_feature (1316)..(1316): n is a, c, g, or t
  misc_feature (1393)..(1393): n is a, c, g, or t
  misc_feature (1571)..(1571): n is a, c, g, or t
  misc_feature (1673)..(1673): n is a, c, g, or t
  misc_feature (1722)..(1722): n is a, c, g, or t
  misc_feature (1734)..(1734): n is a, c, g, or t
  misc_feature (1749)..(1749): n is a, c, g, or t
  misc_feature (1757)..(1757): n is a, c, g, or t
  misc_feature (1761)..(1761): n is a, c, g, or t
  misc_feature (1782)..(1782): n is a, c, g, or t
  misc_feature (1795)..(1795): n is a, c, g, or t
  misc_feature (1807)..(1807): n is a, c, g, or t
  misc_feature (1812)..(1812): n is a, c, g, or t
  Peptide Sequence Number=SeqID_7835
  Probeset Number=SeqID_10238
gaaggaataagaggtgtgttaacatatatgtatgggttactnagncactcctactatgactccttgtnnggtgaatagtaatancncataatacgagnnnntctggggtttgtgtgaatgtgtttgtaaacagtgggggggnannggnngggtggtggtnngattgntgtagggagcgggcgcatncancacctcccatgtgagtgtgagaagngggntgactcgcgcagccaccgccatcatctaatggtaaatcntcatntgtcattcaccctcctccgctgggggggtagctggtaggtgctagtgggattctccncatcgcgccagntaatatgcagccatcatctctcacactctactatacaatcatcgtctccgtgtctagtgcggcaggagtgagtantcaccactccccgcgaccncctgctcatcgttataatagatatgnnccacctcaatcccttcaggcgctcgcgtatngtgtgttgtcatgctctgtagctcngtgtctagctgagcgcgcncctgcgctacgccaataggacaggtgaagcgtctagtagctctacgctatgtcgcgcactagtgtcgtgtgatctaaacctctctaggtcgacgcctcacgactatatcaataagtcccaaccatttcatntctctaatgaccggaagacacatattatggaattgttactgctcctagcaccctttctatagagatatataccattcaccgcaccacccggcaggatgtgagtccgcatcacgcagatctcgtcgtcacagcgccactggtagagaagtatagacgcgtacgatcgcctgtctgtgcctccgtcccattacacggccnattgctatgttcatgcgctcgtcatgatactcttgtgtgacactcgtgctacgcacataactagatctaatatatctattcttataatctcacaatatacgagatcaatatctaacatctcanatatcgtacattagacctcgatgtgtctactattctcctnaaccctggagttacctcccgtctccattgtggatacactccatncanacgcacccctgcacgttggtcatactatcaacttcctngtggtctctatctttgtgacagcgcatagaatactanttcactaccncatcgacgcgtcgtattcggacgtgatgtcgaactnagttgtcggagtaccaaatgtcaatcatacatactcgacactcgtcccgccacctcgcaatctcgtcctagctacgctactcgcatctccactatacatgatgtgtgtcctcgcagcctnactatgtgntgaggtatagtcgcgtgagtgcattgtcatctgtctcacactctgatgtcctcgtaataatatatatacggatatancgcactctcgacgatttacatcatcctgtggactctatcggacgatgctgcgtagtcctctacgctggctcatcgatatagtcactcactgcatattatactcgtagcacaccgtacactgtctgctcccgctgcactgtgttgactcatatgctctctacatctctctcgctcaccncatcgcatgctgctccctaccacctgtcgccttatctctgcaacgctcatgacgtcatacgtacatctatcgctctctacctctagacgctcgactcgaganatctctcgcgtgtatgtgagatagtgtgcacggtagctatcgtatcgcncgtcgcaatccncgacatcatcacacntactacanccgnatgccgcattcagcgtagacnctgacacgctcanattgtcactgcnctagn

SEQ ID NO: 460 - DNA, 1358 bp, Glycine max
  misc_feature (33)..(33): n is a, c, g, or t
  misc_feature (50)..(50): n is a, c, g, or t
  misc_feature (62)..(62): n is a, c, g, or t
  misc_feature (66)..(67): n is a, c, g, or t
  misc_feature (74)..(74): n is a, c, g, or t
  misc_feature (78)..(78): n is a, c, g, or t
  misc_feature (88)..(88): n is a, c, g, or t
  misc_feature (102)..(102): n is a, c, g, or t
  misc_feature (107)..(107): n is a, c, g, or t
  misc_feature (125)..(125): n is a, c, g, or t
  misc_feature (353)..(353): n is a, c, g, or t
  misc_feature (363)..(363): n is a, c, g, or t
  misc_feature (433)..(433): n is a, c, g, or t
  misc_feature (617)..(620): n is a, c, g, or t
  misc_feature (644)..(644): n is a, c, g, or t
  misc_feature (718)..(718): n is a, c, g, or t
  misc_feature (726)..(726): n is a, c, g, or t
  misc_feature (757)..(758): n is a, c, g, or t
  misc_feature (768)..(768): n is a, c, g, or t
  misc_feature (770)..(772): n is a, c, g, or t
  misc_feature (774)..(774): n is a, c, g, or t
  misc_feature (834)..(834): n is a, c, g, or t
  misc_feature (876)..(876): n is a, c, g, or t
  misc_feature (881)..(881): n is a, c, g, or t
  misc_feature (883)..(883): n is a, c, g, or t
  misc_feature (886)..(887): n is a, c, g, or t
  misc_feature (891)..(891): n is a, c, g, or t
  misc_feature (922)..(922): n is a, c, g, or t
  misc_feature (924)..(924): n is a, c, g, or t
  misc_feature (928)..(928): n is a, c, g, or t
  misc_feature (936)..(936): n is a, c, g, or t
  misc_feature (939)..(939): n is a, c, g, or t
  misc_feature (943)..(943): n is a, c, g, or t
  misc_feature (963)..(963): n is a, c, g, or t
  misc_feature (993)..(997): n is a, c, g, or t
  misc_feature (1012)..(1012): n is a, c, g, or t
  misc_feature (1024)..(1024): n is a, c, g, or t
  misc_feature (1027)..(1027): n is a, c, g, or t
  misc_feature (1095)..(1095): n is a, c, g, or t
  misc_feature (1114)..(1114): n is a, c, g, or t
  misc_feature (1116)..(1116): n is a, c, g, or t
  misc_feature (1124)..(1124): n is a, c, g, or t
  misc_feature (1126)..(1126): n is a, c, g, or t
  misc_feature (1129)..(1129): n is a, c, g, or t
  misc_feature (1206)..(1206): n is a, c, g, or t
  misc_feature (1220)..(1220): n is a, c, g, or t
  misc_feature (1231)..(1231): n is a, c, g, or t
  misc_feature (1256)..(1256): n is a, c, g, or t
  misc_feature (1326)..(1326): n is a, c, g, or t
  misc_feature (1332)..(1332): n is a, c, g, or t
  Probeset Number=SeqID_10239
gggggtttttggggtggttgccctccccccccncgcgccggcctctcttntaatttttattntatnntcgtttnaggnccggcggagnaacgggaggatatntatangatggccccccccaccgntgccaacatacaacacatattgtggcgcgacggagcccccgccacccacaccacacactaataaatactaatagactgatgtggtagccaccccacataaaaaagaagaagtaaaatatactaatagtcacctaagcatcggcgcccgcgcgagaggtgtagaaaacatagagcacatcagacagaacgacatattgagacacatcacacaccaaccacataataagnacaaatgtcnactctcgtagccaacacatttggcgagggtagcatgagacgcgaccgaacctctcccctctccatcatgnaggctagagtgaccctgctatacgcacggagtgcggctgagatgcccaccttagagtgtgggggagtgttggaggagaaggacttctgtggtgggtgtgtgagatgaaatggtacacgcatgactatccttggaggagtgtgggtggtgtgtgcggcgtgctcaaggtggtgtgtgtgggaggnnnngtatagatgggagtagagataggngagaaaataattaatagatcgatgaagggatgagtgaggtgggtgggagctggagtatcggagatgagatgttnagtgaagnagttgtaggttggtatttgtgtgtgtagtannaacccccccnannntntaatatattagttaaatatatgtgtgtgaattacatatgctattggctgctggtgtaggnatagtgtgtgtgcgccacaccaccaccccacgcggcgagcanccgcncngcnncgtntgtacggaggaagggtggtgtgtggttgcgngnctcnatcaggcnccngttngatgccaaacacagcactcnacccgaagccggacgtggtagtacgtgccnnnnncactataccaccggntgagatgacaanaanctacagggccagcacgagtgccatgcggcgtcgttgacggttatcagaatgtgtgcgttatgtattangttagtgtatgagttggtnanagtgttantncgnaatattaatgtgtactgtcagaggaaagagtcgggcaccggtcggtgaaacaacacaagcgtgggaactgatgactntctaccggctactntaccacaactntcacaactacaccatcagtaatgcngaaccacaccatacaccagacaacacacacaacaaatcaaacatcacccaactatgtaagacaagagtgntgcgangtagtgcacgagagctacgcccaaca

SEQ ID NO: 461 - DNA, 607 bp, Glycine max
  Peptide Sequence Number=SeqID_7836
  Probeset Number=SeqID_10240
gtgccttagggagaggatgtctcattgatgaatcccaacaagctgggagggcagtatcagatctgcgttgcgctcattaataacagaggaaagctgttagttgagattacgatgtctttcggagagatttcatcatatgagttcaaagaatgccatatctctcgctccataatggccgaccgtttgttgtccaattctcagctgacatctgagaacacattgggtacatcgaccataagctcattagtaacgatgtctaggaaaatcagcatgttaagcttttttaagaaaccatgtggtgtcttccacttgaatagaaggagtacattatctttttaaagaatctgctgggaaccatagagtgtctacatatgtcaaaattattactagaggtgtttatttcaggaatgtaaattgctttatgatatttccccccccccccccccccttaagtatctacaaacatgaggtgtccaattcttacatgatattaccactaatagaccaacacacagcagaacactatgaaaaataattttatatatagagaaaaagtgataaataacgggatacaaaatgaaaagagaaatagaaaaaaaaattgagt

SEQ ID NO: 462 - DNA, 1004 bp, Glycine max
  misc_feature (1)..(377): n is a, c, g, or t
  misc_feature (978)..(1004): n is a, c, g, or t
  Peptide Sequence Number=SeqID_7837
  Probeset Number=SeqID_10241
nnnnnnnnnnnnnnnnnnnnnnnnnnnnnnnnnnnnnnnnnnnnnnnnnnnnnnnnnnnnnnnnnnnnnnnnnnnnnnnnnnnnnnnnnnnnnnnnnnnnnnnnnnnnnnnnnnnnnnnnnnnnnnnnnnnnnnnnnnnnnnnnnnnnnnnnnnnnnnnnnnnnnnnnnnnnnnnnnnnnnnnnnnnnnnnnnnnnnnnnnnnnnnnnnnnnnnnnnnnnnnnnnnnnnnnnnnnnnnnnnnnnnnnnnnnnnnnnnnnnnnnnnnnnnnnnnnnnnnnnnnnnnnnnnnnnnnnnnnnnnnnnnnnnnnnnnnnnnnnnnnnnnnnnnnnnnnnnnnnnnnnnnnnnnnnnnnnnnnnnnnnnnnnnnnnnnnnnncgtaaaacctaggatggaaccagctgttaatcacacatactctgtgcctttttatctctgtcaaatgtaattatcagctgcagcaaccggcacaccgacctagccattccaccggcccttgttataaaatacaccgagggcttcactccggtaacatcgcccagcctggagcgaggcagctgcgcagggctccccccccccaaagggcatccctcctgcaaggtagcccagaatcgacaaaactttcagcacactcacttgttcaagccggggatgcgtcttctacatcacccacttgaatggtaaaagcatgaaaacaggtggtcttcctatggtctcgaaagacacttttcctttaagtcaccacttctgtctgattgagagaatttgtgacctttgacgagccatgggataaacagttgtgtgataactgcaatttgattgatcaatccactttgagaagcagacatgagagaacttgcctcttgacaaacatacatggaaaattgatttatttgaaactagccaggttgtaagcttgcctttggtcgttataattgtggcttcatattgtttctattatgaaggaccaagctgtaannnnnnnnnnnnnnnnnnnnnnnnnnn

SEQ ID NO: 463 - DNA, 458 bp, Glycine max
  Probeset Number=SeqID_10242
acacaatgctttgcatatggatgtttgagattgtgatagcatgtcacctaaaaaattattctttttatcacttacctactcgaggacgagcaggagttaagcttggggatgctgatacattggaaatgtatctataatttttgatgctccatgcttgtttattgccaattactttatgttttacttgtgcttcttggtgtttttattgatttcctgccactaacatattgacaagatgccaaagtggccagttcctgttttcttctgtttttgattccagaagagctgaaaaataaatattcttaaaattgacaaaggaagctattttacgaagttttacactggaagactccagaagccagaagggggcacctggggggcctggtgggcccacaccacccccaggggagactgggcccctgcatgcgcctgggtggggtgtggcccaccaagctgct

SEQ ID NO: 464 - DNA, 365 bp, Glycine max
  misc_feature (96)..(96): n is a, c, g, or t
  misc_feature (134)..(134): n is a, c, g, or t
  misc_feature (265)..(265): n is a, c, g, or t
  misc_feature (290)..(290): n is a, c, g, or t
  misc_feature (309)..(309): n is a, c, g, or t
  Peptide Sequence Number=SeqID_7838
  Probeset Number=SeqID_10243
acccgtttgggaccgatcgaccacttcacttcccggaggccgaaacccacaaagcgtcccccgtcgccgtcttcgtccaccctcccgctaaaccgnctccacaccacccacccaccgccgcctgcgcctagggntccgccccccatgaccgtcggcgagccggagatgccggcgtcggcgcgcaggcgtttcttcctcgccagcgtcgacgcgctcatcttcctcaattgcgggctgctgtgggtcctctgcgcggggtccctcngccttggtcatcgcgcgccttgccntgggtcaggtcgaggttcnctcccgcgctctgggcggcgtcctgggtctccatttacttccttatgttgctcggc

SEQ ID NO: 465 - DNA, 523 bp, Glycine max
  misc_feature (191)..(192): n is a, c, g, or t
  misc_feature (441)..(441): n is a, c, g, or t
  misc_feature (447)..(447): n is a, c, g, or t
  misc_feature (479)..(479): n is a, c, g, or t
  Probeset Number=SeqID_10244
acaaacaaacacaaaactgcaacgaacaatggcgagcgaaaatcctgaaaccaccaacaaaccatcgtccacggacatggaccttaagaaagtcttcaaccagttcgacgccaatggcgacggcaagatctctgtctctgagctcggcaacgttttcaaatccatgggaacgtcgtacacggaggctgagnncaaccaagtcttggacgacatcgacatcgaccgcgatggtttcatcaacatggaggagttcgccgccatctgccgctcatcctcctctgccacagaggtccgcgaagcattcgatctctacgaccagaacaagaacggtttgatctcgtcctccgagatccacaaggttctcaaccgtctaggtatgacgtgttcccgtcgaagactgtgtgagaatgatcgggcgtgttgacactgacggcgacggtnacgttnacttcgaggagttcaagaagatgatgtcgtcncgtgagctactcaacaagcaatccgcctagggttccgatttgcc

SEQ ID NO: 466 - DNA, 1013 bp, Glycine max
  Peptide Sequence Number=SeqID_7839
  Probeset Number=SeqID_10245
cgttctccgctcgccgccgcgccgcaatatcgtcgggaacatgagcggcgcgacgggcaccgccgacttcttctaccgggaggcgctgcgcctcggctacgtcgcccgctctgccttcaagctgatccagatacagaagcagcacaagctcatcgccccgggcgccgccgtgctcgacctcgggtgcgcccccggcgcgtggctccaggtggcctgccagaaccttggcccgctcgagaagggcggcctggtcgtcggcgtcgatgtcaagaaggtgaaggtcccctcagcgcactgcgactggcgggtcaggacggtctgcaccgatgtgatggctttgatgaagcagcaagccagggcgatgtcgccgcaggaacggggattttctgtgatattatccgacatgtgtccggtagtttcagggatcacaaccagagacgaagctatatcttgtgagctgggcatgcgtgcgctctcgttggcagttggtaagataaaggtcaaagaatcggccgactatcgtgagactatggagaggtttcagagctccacaggcccagatcctgatgaggacggtgttcttagacgtggaggcagcctagtaatcaagtttcttgagaacgaggatataccagggtttaacaaattttgcaaagagaagtttaagaaagtatctctcctgaggcctaaggcgacgaggtctagttcgagggagatctacatgatctgcgaagggttgcggtagaagattggccaccactcacctcccatgagatcttgcaagcttgtgctgagcagagtggctggaccaagaactctacaaatttgccggtgagctgtaggcgtgtaggcctgagatgatgctaacttcatcggcaattcatgattactgagttgaggaaactccgatggtatctctcctggaggtgatttggtttggtgcctttgttaaagaacagccgtattggctttgcgttcgtgcttttagaagaaaaaaggttgtacctgtctcg

SEQ ID NO: 467 - DNA, 452 bp, Glycine max
  Peptide Sequence Number=SeqID_7840
  Probeset Number=SeqID_10246
aaatgttgaatgacttagatctgccggggcagtttcattccagagatataattatatcgattgataggtgggctagttcagtttcggcaaactcatcgccaatgaatgattgggaacagaaggaagctgtggaagaaggctcatactatgaggctggataggtagtcccggattcatggaaagatgatagtcagctacacccagattcagatgattttacaaaaacaattgagggtctgcaaagtcagtagtatgggagggattagcagaatgaaaggttggagcaatcattgatggaaagaaacagcttagttcagagatgggaagagcctgtaaatagggttgaaacgccttcacatttgcagttgatggaggcggaggataaaattgaaaggatagctagtgcgcctgaaatagtataatcctctgatcgtgtcatatgcagggagggg

SEQ ID NO: 468 - DNA, 490 bp, Glycine max
  Peptide Sequence Number=SeqID_7841
  Probeset Number=SeqID_10247
ctccctggtcatggttgattcctacaccgtgcttctgcatgacacctcttctacatttgccatcactcctgatgccatattctgacctctaaccttcttgcccgatttgtttacgacctgcaccgatcttgtgcgactaacgtgctgcgcgattggctttgcattcacctttatactagttgcgcttgatccctacttcatcaacctctccatggagcacataatttctacttaccaccggacggcaactatggctatccttcttgactacaatggtacactaatgcctcaatcatccaccattgataacagtcccagtattacatccattgaaattcttagcagtttgtgtatagataagatccacatggctttccttgttagcgctagaagtcgaaagatgctttctgaatggttttgtccttgtgacaatctgccagttgcagctgaccctggctactttctaagaatgaaacgacatgaagactgg

SEQ ID NO: 469 - DNA, 628 bp, Glycine max
  misc_feature (449)..(457): n is a, c, g, or t
  Peptide Sequence Number=SeqID_7944
  Probeset Number=SeqID_10248
tcatttctcaaccccgattccggtcccaaaaccctaaggtttgttcccaggttctttccccaaaccaaattggggattttccatttaatccaggttaccccggcccccccggcgggggccgtccccctttttccaaaattaaccccaatccccttttccttctccttcccttgaacttggaaccacccagaataattttttccttggcaggccccgggacctcccccttttcccaagcgaaaggacaagccacgaggtttctttttcattcgggctggtttcctttcccccccaatcagggatcatgaggaagcccaccactttttttctttcatcttcatgaaaaaatttccctccccctcactacgggagagacccctgaaggggttttatatagagatttaattaagaggggtgtcttgtttgtgaagcgaccctcccccccctannnnnnnnngtttgggggggggggggggggtggtttttttatgtatatatgtatatgtatattttttttggggtggtgcacgcaatgagagaggctaattaagaagaagacaggggagagaagaggtgaagaggtggagaaagagaagagaatagaactatagaagtgagaagggatctt

SEQ ID NO: 470 - DNA, 1545 bp, Glycine max
  misc_feature (1)..(1): n is a, c, g, or t
  misc_feature (13)..(13): n is a, c, g, or t
  misc_feature (40)..(40): n is a, c, g, or t
  misc_feature (45)..(45): n is a, c, g, or t
  misc_feature (57)..(57): n is a, c, g, or t
  misc_feature (73)..(73): n is a, c, g, or t
  misc_feature (96)..(96): n is a, c, g, or t
  misc_feature (118)..(118): n is a, c, g, or t
  misc_feature (136)..(137): n is a, c, g, or t
  misc_feature (141)..(142): n is a, c, g, or t
  misc_feature (150)..(150): n is a, c, g, or t
  misc_feature (152)..(152): n is a, c, g, or t
  misc_feature (158)..(158): n is a, c, g, or t
  misc_feature (167)..(167): n is a, c, g, or t
  misc_feature (175)..(175): n is a, c, g, or t
  misc_feature (190)..(190): n is a, c, g, or t
  misc_feature (192)..(192): n is a, c, g, or t
  misc_feature (196)..(196): n is a, c, g, or t
  misc_feature (206)..(207): n is a, c, g, or t
  misc_feature (217)..(217): n is a, c, g, or t
  misc_feature (220)..(220): n is a, c, g, or t
  misc_feature (230)..(230): n is a, c, g, or t
  misc_feature (235)..(235): n is a, c, g, or t
  misc_feature (244)..(245): n is a, c, g, or t
  misc_feature (259)..(259): n is a, c, g, or t
  misc_feature (266)..(266): n is a, c, g, or t
  misc_feature (274)..(274): n is a, c, g, or t
  misc_feature (276)..(276): n is a, c, g, or t
  misc_feature (281)..(282): n is a, c, g, or t
  misc_feature (289)..(291): n is a, c, g, or t
  misc_feature (304)..(304): n is a, c, g, or t
  misc_feature (312)..(312): n is a, c, g, or t
  misc_feature (333)..(333): n is a, c, g, or t
  misc_feature (347)..(347): n is a, c, g, or t
  misc_feature (359)..(359): n is a, c, g, or t
  misc_feature (369)..(370): n is a, c, g, or t
  misc_feature (377)..(377): n is a, c, g, or t
  misc_feature (390)..(393): n is a, c, g, or t
  misc_feature (395)..(396): n is a, c, g, or t
  misc_feature (404)..(404): n is a, c, g, or t
  misc_feature (408)..(409): n is a, c, g, or t
  misc_feature (412)..(412): n is a, c, g, or t
  misc_feature (419)..(419): n is a, c, g, or t
  misc_feature (426)..(426): n is a, c, g, or t
  misc_feature (432)..(432): n is a, c, g, or t
  misc_feature (434)..(436): n is a, c, g, or t
  misc_feature (440)..(442): n is a, c, g, or t
  misc_feature (447)..(447): n is a, c, g, or t
  misc_feature (455)..(455): n is a, c, g, or t
  misc_feature (458)..(458): n is a, c, g, or t
  misc_feature (460)..(461): n is a, c, g, or t
  misc_feature (466)..(467): n is a, c, g, or t
  misc_feature (476)..(476): n is a, c, g, or t
  misc_feature (482)..(483): n is a, c, g, or t
  misc_feature (488)..(489): n is a, c, g, or t
  misc_feature (492)..(496): n is a, c, g, or t
  misc_feature (499)..(505): n is a, c, g, or t
  misc_feature (508)..(511): n is a, c, g, or t
  misc_feature (514)..(516): n is a, c, g, or t
  misc_feature (529)..(529): n is a, c, g, or t
  misc_feature (537)..(537): n is a, c, g, or t
  misc_feature (549)..(549): n is a, c, g, or t
  misc_feature (551)..(551): n is a, c, g, or t
  misc_feature (555)..(557): n is a, c, g, or t
  misc_feature (562)..(566): n is a, c, g, or t
  misc_feature (575)..(575): n is a, c, g, or t
  misc_feature (578)..(578): n is a, c, g, or t
  misc_feature (583)..(583): n is a, c, g, or t
  misc_feature (588)..(589): n is a, c, g, or t
  misc_feature (594)..(596): n is a, c, g, or t
  misc_feature (620)..(621): n is a, c, g, or t
  misc_feature (624)..(625): n is a, c, g, or t
  misc_feature (627)..(627): n is a, c, g, or t
  misc_feature (631)..(633): n is a, c, g, or t
  misc_feature (635)..(635): n is a, c, g, or t
  misc_feature (664)..(666): n is a, c, g, or t
  misc_feature (670)..(670): n is a, c, g, or t
  misc_feature (672)..(672): n is a, c, g, or t
  misc_feature (705)..(706): n is a, c, g, or t
  misc_feature (733)..(733): n is a, c, g, or t
  misc_feature (768)..(768): n is a, c, g, or t
  misc_feature (770)..(772): n is a, c, g, or t
  misc_feature (779)..(780): n is a, c, g, or t
  misc_feature (783)..(785): n is a, c, g, or t
  misc_feature (796)..(799): n is a, c, g, or t
  misc_feature (808)..(808): n is a, c, g, or t
  misc_feature (830)..(830): n is a, c, g, or t
  misc_feature (840)..(841): n is a, c, g, or t
  misc_feature (848)..(849): n is a, c, g, or t
  misc_feature (865)..(865): n is a, c, g, or t
  misc_feature (867)..(867): n is a, c, g, or t
  misc_feature (869)..(869): n is a, c, g, or t
  misc_feature (877)..(877): n is a, c, g, or t
  misc_feature (901)..(902): n is a, c, g, or t
  misc_feature (922)..(922): n is a, c, g, or t
  misc_feature (924)..(924): n is a, c, g, or t
  misc_feature (928)..(930): n is a, c, g, or t
  misc_feature (933)..(933): n is a, c, g, or t
  misc_feature (940)..(940): n is a, c, g, or t
  misc_feature (972)..(972): n is a, c, g, or t
  misc_feature (1005)..(1005): n is a, c, g, or t
  misc_feature (1042)..(1042): n is a, c, g, or t
  misc_feature (1056)..(1057): n is a, c, g, or t
  misc_feature (1151)..(1151): n is a, c, g, or t
  misc_feature (1172)..(1172): n is a, c, g, or t
  misc_feature (1185)..(1185): n is a, c, g, or t
  misc_feature (1470)..(1470): n is a, c, g, or t
  misc_feature (1480)..(1480): n is a, c, g, or t
  misc_feature (1499)..(1499): n is a, c, g, or t
  misc_feature (1510)..(1519): n is a, c, g, or t
  misc_feature (1524)..(1539): n is a, c, g, or t
  Probeset Number=SeqID_10249
nagcgcacggtancgtgtacgcgtgatgcagagtctctgnaatangtgtacagtgantgtctagagtaacttngtagtcgtagatcgtgcactcgntaagtgcgtgtcgtatcatctntgctcattgatatagatnntggnnctgagtancnagatgnctgctacgngcttaagngcatacggtcaatcncnttancacacagacnnctacccgtantancccagctgcnacaancgcgcacanncgcacacgaatgtngtttggncgcgtagngngtggnncgtgtannnctgcggctcgctncctcgcgncgcacccgcatagaagagtgnagatgttctggcgngaacagaggganggagcccgtnncacgatncgatccgcgacannnnannacaacacncttnnggntcgcacncgtgggngagatncnnnaggnnnccttnccacgaantgnanngcgcnncgcggaggnagaggnngcagnncgnnnnngannnnnnntannnntannngctctgttgtatnttgtcgcnccgctccgctcncncctnnngcggnnnnntactgcacnccncacantcggnncaggnnnatagagatggcgcgttgtcgcggnngcnngncccnnncncagccgatgagatagtcgggtgagagtgnnnggcncncagcatgggcgcgtcggggtgggggggtcatcnnaacacgttgtggtcggcgggaggagcncccggcggcacgggcgaccacccggaacccgcgancnnnccctgcnnctnnnctgtggtgggnnnnggccccgcncgcgccccctcacacacaaaanacacacaaanncatcccnnatcacttttactcctngnangggggggnagaggagggggggggcgtcccgcnnccctgcacacacaatctcancncccnnncangtgcgtnttgcacgccgaagcgcggtaacaggagtaggnggccgggaggggcggcgccgcgggccgcgtcgngcgcagagaaggagactgtacgagcaacacaacgacnagaagatggggggnntgttctgttgagaaaaggtgaggtagtggggcgcgcgtcctcttcctgcggcattcgccaaatggatggggctgcgcacagagcagctggtggnggtggggtgggcgacaaaganacacggctatagncttgcaggtggtgctccaactcactagcacctccaattatgcaggggctcatgtgtttccactggattatctgtatatctccttttataatacatctcaccacctttgtgttgtcctcggatagcgtggaggagtctctttattttttgttaagaaagagagagcagagagataataagcggtttaccctcgcccacccccgccgggggatgtcctcacctagtttcccatgaaggaggcctagcccaccacacgcggaggatggcgcccacacactgatgtaanactctatganatgtgatatcttcaatcanttaatcgtttnnnnnnnnnnggggnnnnnnnnnnnnnnnnggggcc

SEQ ID NO: 471 - DNA, 691 bp, Glycine max
  Peptide Sequence Number=SeqID_7945
  Probeset Number=SeqID_10250
ggacaatgccaaattcttgcgcagagtacccatagaagaccctatatctctaacaactaccttactggcacagaatgacaagcggaaagaaaattttttccacgatattgactatgatattactgacactggccgaggatcagctggtgattactatacagagcggcttcctgcacccactttgtcattcctttcatatgctgaagagattaaagcacccgacaacagtgggtctctaatgcgacttcatggctccatgccggacaatgcattacaaaagaatccagctgagataaactggaatctccatcatatgattgcatcaggtaaatgatgtccgactcaaaactagactagcggcggatacatttcaaacataagagctggggcttcttccaattatctatatgcaactccgtacggccttaatctcgcagctggcactgaacgccgcaatatgacgaccccaatactcaatactgcatttatatatgcatgcatgcgtgaaagatctgcaaatctccgtcaccagataattgctgtgatactgaaccatctgatgcctgaacagtttgcttttcgaacatgctttgtaaatatgctgacttttgtatcacttgcaggcaagtcatattgtggaacccagcaacggattgcactatcgcgctttactggcctacaagtacaaaga

SEQ ID NO: 472 - DNA, 535 bp, Glycine max
  misc_feature (104)..(104): n is a, c, g, or t
  misc_feature (131)..(131): n is a, c, g, or t
  misc_feature (155)..(155): n is a, c, g, or t
  Peptide Sequence Number=SeqID_7946
  Probeset Number=SeqID_10251
gcgctggttcgacctgatgatggcgaaccaggatgacctcgccaccctcatgacggccgagcagggcaagcccctggccgagtcgaaaggcgagatcgcctatnccccctccttcatcgactggttcgcgnaagaaggcaagcgcctctacgggnatgtcattccaacacaccagtccgacaagcggctgatggtgttgcgtcagccgatcggagtggtggctgcaatcacgccgtggaatttcccggcggccatgatcacccgcaaagccggtcccgcactcgccgcaggctgcaccttcgtctgcaaacccgcgcaccagacaccctactccgccctcgcgatggccgagctgggacggcgcgcaggcattcccgccggcgtgttgaatattgtgaccggcatggatgcggttgcgatcggcggggaaatgacttccaacccgatcgtgcgcaagatcaccttcaccggctccaccggcgtcggcaagaagctcatggcacagtccgcgagcacactgaagaagctgtcgctc

SEQ ID NO: 473 - DNA, 852 bp, Glycine max
  misc_feature (1)..(20): n is a, c, g, or t
  misc_feature (817)..(852): n is a, c, g, or t
  Peptide Sequence Number=SeqID_7947
  Probeset Number=SeqID_10252
nnnnnnnnnnnnnnnnnnnnccaacacacgactaggttatgcagcgggggcggttggtcgggagggggagagggcaggagtaacagccggtggcaagagatcggcggggctctggttggctcggctggggtggctgtaaggcagcccctttcgaggtgcctggcgtgtcgccttcaggcttctactcggggccatcggtattcgcgaaggaagctgcgccggagggcgggcgtccccggggggcccgggggggccgtcggccgttttcgcgctgtggggtggggttgcgtgtccccccggtttgtgggagtttcctggttgtgttgcgcagtgtctttcggggatttatgggttgcctgtggggtgggctacctagtcgtagtgggtgggtgtctgatggaaagtcttttatttcttatcggcttggtctatttgctttgtggggtgctcctctctctttgtggttgggcacctttatctcgtgatgtttgtgggcatgtgaatactctgaatgtgcatttcgaagtttgagaagtttcgacgcgttactgccattcctgtgaatgtttcggttgtgcacttgtagaatttggggtaatttctaattcgcgatcgaacatgttttgagaagttatatagtaatttgcaggctgtaaattgctctaatgtaggccgggttgtttgtcgtggcttcaaatttccttcctgttaacccgggtcatgttatatgtttccaaatgaaatttccacttcatgctagtcgcttagcactgggtggcgcagagtactagctgcatctcaaaaaaaaaaaaaaaannnnnnnnnnnnnnnnnnnnnnnnnnnnnnnnnnnn

SEQ ID NO: 474 - DNA, 602 bp, Glycine max
  misc_feature (1)..(1): n is a, c, g, or t
  Probeset Number=SeqID_10253
nattttctaaaacttttttggaaaaatttggtggttaagaattttttcaaggagagaagcctttccttaaggttttcccacccaatttcaaaagatggtttgtacataaatttcggtatttcaagaaaatttcaagaaaccgtttttaaaaacccttatttaaaggcgcagctaggggcattacttcatgtaaaactatcttttgatgtttcagggtccctgctgtgtggtttatgcaataccttaagaagagaaaaatctttaatagagcttgagatggatacagaagtttcgaataaagatttttggtatgattttaggaaagaagctaagaattgtaaatatttgtcctatatataggagtttgtatttatctgtcggcatactaattggtgataaatacatatttactgttactgtcactttcactcccgatattccagtttatatggacggaatgtgtcgatatattatctatacaataagatttgatataatcatttttaagttcagtatgaatttaattgattcaagcaaacaaaaaagggaaaaaaaaaaaaaaaaaaaaaaaaaaaaaaaaaaagaaaaaaaaaaaaaaaaaa

SEQ ID NO: 475 - DNA, 463 bp, Glycine max
  Peptide Sequence Number=SeqID_7948
  Probeset Number=SeqID_10254
ttccatgtaatccgattacatcgctagtcacggccgataccgcccaccccgaatctcgtgtttcttctcgccttctgccccaccatctcctcatcaatctctccatccaggcgaaatctccgatagggatggcatggggcggaggcgcccaggttcgcgtggggcgcgagagcagctgagccggccggaaagctgtacgcaccggtgttgctcaacctgtccggcggctccggcgcgcgagccgttcatggcggcggtccagaaggatgacgtggcggccgtggggcagcggtacgcggcggacagcagcgaggcgccgtcccgtccatggtagcgcaggatttggctcccgtgatcgcaatgttcgcgctgatgcaaggctgttgttcttgtgataatttttcttcaatttgtacccctccgtttcgaattatttgtcacaggtatggatgtatctagatgt

SEQ ID NO: 476 - DNA, 1406 bp, Glycine max
  misc_feature (48)..(50): n is a, c, g, or t
  misc_feature (59)..(59): n is a, c, g, or t
  misc_feature (64)..(64): n is a, c, g, or t
  misc_feature (150)..(150): n is a, c, g, or t
  Probeset Number=SeqID_10255
aagagggttgtgtgtttgtatattattgtttattgtctgggtgtgttnnncccccgccnacacnacctctcgcctcgaccctctctccgcgctctctggcgctaataacgtacctctgaccttgtgcgaatacccgctaaatctcctccnccgcgtgctcaacgacgccccagacgcgccgagctcgtacaacacactctctcgccccctcgcgcccccacccgtcggggatgtggtctgggtgtagccgtgagatatgcgccaacccgttataatgggtggaggggcgtggtgtgggacgatcaacgtgaaatgtgaagatgctcttgtgttaaatgtgtaatggacaagtggctgcgtgtaatgtgattatgtgttataggcgaaaaaaaggacggggaggggaagaaaggtgggtacagggtgtggtgttgtggttgtttggtagaataactcgccgcgactggcgccgcgggaacggtggggggggggggagacgtggtggctggacaagcgcgtcgttgaatctaaatgtcctgccgctcgcgaagacgagagcggcggggggccgccggacaagcgaggccgccgagcggaaatggggtgtgcgcgcgggtgtctaggtacttttctcttgtgttggttttccccgcccgccccgcacagacaaacacgcgcgcctcgcatgtcgttccctatgtggcgcggttcaaactctcgcccccccgcccgctgctcggctaaattgtttgtgtgtgccactcccctgacctcccgcccactacaaaaccctctcgcttatctgctcatatgcctggctggtcccacctctggggtaaaaacaaaacccgcccgcggcgggggcgcgggcgggagtaaacaagaaactcgttgtgctcgcgcccctcctcctcctaaccgccagcgcactgtgaacttctgctcgccacgtggaaaatcggtgtgggttgtggtcgcgcgccacaacattgcggcgcacaacatctgtctctaatcacttcttaatatcttccctcttcatcctcctccctcttcgtcatctgccgttgtctgtatatctcgcgcccgctccgtctccctcgcttccctctctcgccacctctctcacatacagtggtgttgcgttgcgcaaccactatggtggcgacaccatcgtccgtctccgcctctgtctaacattgctggtgtcttggtatctctactttggctagcgtcctatctccctctcctcgctccctttctgcacaccggcgctcgcgctaaatatgtgcggtggtgtgtgggtgtgaatatatatacattagatttccttctcctcttccttcttctctcctctctctctgcgccttttattcaaatagtgtggataacatgctgtgtgtgtg

SEQ ID NO: 477 - DNA, 577 bp, Glycine max
  misc_feature (465)..(465): n is a, c, g, or t
  Peptide Sequence Number=SeqID_7949
  Probeset Number=SeqID_10256
tcagctacgtaggccccccccccgaataaacaattcaaaaattctaaatttttatcaagagaggtcgatgaataaactgatcataatctttgctttcctcataatctcaggctttgctgcttatccttatcgagaagaaaatcatataatcaaccttggagacccaagttggggcctcgctaaccaagagtttccacatggactctttgtttatttttatgaaccttattgcaacccttgcagacaaatgtggcccgaaattattgaagctgctcaatattttgcaactcatggttctaaagtcaagattgctaaagttgagtgccacgatgaagtcaatctctgcaacgcacaagaagttcgagcttttccaactctcatgctgtatattaaagatagacccaaggtcgagtacagaggatcaagagatgctcaaagcattcaaaagtggatttcaaaggttgntgattcttcctacgaaaccgttgatagccttgatactttgttcagcaagttcagcggagctatccttttaaatgcagagtctgcaaatataaatcaagcaatttaaaatgat

SEQ ID NO: 478 - DNA, 454 bp, Glycine max
  misc_feature (35)..(39): n is a, c, g, or t
  misc_feature (42)..(43): n is a, c, g, or t
  misc_feature (336)..(341): n is a, c, g, or t
  Peptide Sequence Number=SeqID_7950
  Probeset Number=SeqID_10257
caaaaccacgttgtaacaagaagtttcagaaaccnnnnncannacagtgttattcaaagaactaaatctccaacttcgaaaaccttacttgagaattttatacgttgtgatcaagagacgaggacaaatgaacttgggtttgaccaagctaaaagtagaagttatgtccccaactggggcattagagataactccattcctttgggcagaactacctctatacctcctcccttatgctcacagtgtcagaataaagcaccagtatttggaaagcctccaaaacggttttcttacaaagagctagaggaagctactgatatgttctcagatgagagnnnnnnggctgaaggtggatttggtgtggtccacaagggaatactcaaagatggtcaggttgttgcggtgaaacagttgaagtttggtggctctcaagcagatcttgatttctgcaagg

SEQ ID NO: 479 - DNA, 1537 bp, Glycine max
  misc_feature (22)..(23): n is a, c, g, or t
  misc_feature (25)..(25): n is a, c, g, or t
  misc_feature (64)..(66): n is a, c, g, or t
  misc_feature (68)..(69): n is a, c, g, or t
  misc_feature (74)..(74): n is a, c, g, or t
  misc_feature (76)..(78): n is a, c, g, or t
  misc_feature (93)..(93): n is a, c, g, or t
  misc_feature (97)..(97): n is a, c, g, or t
  misc_feature (109)..(109): n is a, c, g, or t
  misc_feature (111)..(111): n is a, c, g, or t
  misc_feature (123)..(123): n is a, c, g, or t
  misc_feature (176)..(176): n is a, c, g, or t
  misc_feature (206)..(206): n is a, c, g, or t
  misc_feature (233)..(233): n is a, c, g, or t
  misc_feature (274)..(274): n is a, c, g, or t
  misc_feature (276)..(276): n is a, c, g, or t
  misc_feature (310)..(310): n is a, c, g, or t
  misc_feature (313)..(313): n is a, c, g, or t
  misc_feature (323)..(323): n is a, c, g, or t
  misc_feature (396)..(396): n is a, c, g, or t
  misc_feature (418)..(419): n is a, c, g, or t
  misc_feature (455)..(455): n is a, c, g, or t
  misc_feature (480)..(480): n is a, c, g, or t
  misc_feature (506)..(506): n is a, c, g, or t
  misc_feature (567)..(567): n is a, c, g, or t
  misc_feature (606)..(606): n is a, c, g, or t
  misc_feature (656)..(656): n is a, c, g, or t
  misc_feature (688)..(688): n is a, c, g, or t
  misc_feature (919)..(919): n is a, c, g, or t
  misc_feature (995)..(995): n is a, c, g, or t
  misc_feature (1043)..(1043): n is a, c, g, or t
  misc_feature (1173)..(1173): n is a, c, g, or t
  misc_feature (1179)..(1180): n is a, c, g, or t
  misc_feature (1186)..(1186): n is a, c, g, or t
  misc_feature (1246)..(1246): n is a, c, g, or t
  misc_feature (1327)..(1327): n is a, c, g, or t
  misc_feature (1349)..(1349): n is a, c, g, or t
  misc_feature (1398)..(1398): n is a, c, g, or t
  misc_feature (1477)..(1477): n is a, c, g, or t
  misc_feature (1484)..(1484): n is a, c, g, or t
  misc_feature (1529)..(1529): n is a, c, g, or t
  misc_feature (1533)..(1533): n is a, c, g, or t
  Peptide Sequence Number=SeqID_7951
  Probeset Number=SeqID_10258
gtggtggtgtgtccctcgcggnnantgtgttgggtgtgatatctgttatttgtgtgtgtagttnnncnnccacnannnccccaaaggctggcnaganctccaccgacgngntgttatgtatangtattattatatttcttatgtgtgtggtttgcccttgtgttggcgtgacgagntgggtggtgtgtgtttgtgctattagctgncgatgaacaataatgtaaatgtgtttntgtgttgttgtctttggatggtatacatacttctacgtttntnttgctcgttaagtttagactcgcgttcttattanaangtatgaaatntgttggggatggtaagaagtgctattagatatactagtgagatgtgaccaaatatagtggagtacgagtaggnagagtggtgtggcgagagaaanngtcttagttgcggtgaacatccacaacaatgtagcntatataagacatgtggtttgggtgngataattattcttgttgtgtgtgaanattaaagtaggtgtgtgtgatacatgtgctcggtgcgcgaataaaagcgtgcgggaggcanacactgcgctgggtcgtgcaatatatcgaatcaaaacanatgattcctacatatatattgtgttctgcatgatgtgtgtgtgtgtgatngatgatgtgtggttgagagaaatacacacaancaaacacacaactcatctacatagactacaatatagatgagtatataggtgagtgtgatggataattaatacgaggttggtgctggatatctattagatgttgttgtgtagtatattatcattgtgatggaagacaccaccatcactctgtctcgtacggtgatttttcttaattgtgatttatgtgggctgttgtataatagtagagaccaacacccaccgcacaccaanacacaccatatcttcggtcttctcgttctgtatctatcatccatgtgtatattttctgtcatatggttgtgtgagntatttgaataaagtttatggtctctatactgcatacacatctgttccnatacgggtgcggtggcgagtgtgtagggcgtatatctatgctcatcctatacaaccctctttcgctgttgtcgtgtgttagagacgtgttcgttcgtctcgtgtgtgtgtgactctgagagcgtcagcantcatcnntctcgntgcaatgatccgcacgtcatatgctgggcggtcgggctctcttcatacttattcaagttntgcgtctctatacactgctgtatgacactctctgacttggtggcggatcgtgtcgtgcgtacaagatagataactaagaangtgtatatacatatacactacntatcacacgttgtatgggctatatcacactctgctatgcgactactgantacgtggcggtactcgtgactctctgctacatatgatttgatgtgtgtgtagtgtgtgtgtacaactatatgaatgcanagagacnacacacgcatcgtgccctgtctactcatccataaacaactctagncgtncgtg

SEQ ID NO: 480 - DNA, 371 bp, Glycine max
  misc_feature (100)..(100): n is a, c, g, or t
  Probeset Number=SeqID_10259
aaacaactatcgaagtctttcaatcaagtcaacggaaaccatggattcagagatcgcctacgacttctctccagcgttcataatctacaagagtggccgngtcgagcgcctcaccggtgaaaccatcgtccaatcttctttaactccccacaacggcgtcgtttctaaggacgtcgtttattctcccggcgagaatctctccgtccgtgttttcctcccggagaaagccgcgaagaccggtgagaagctccctctcctcgtttacttccacggaggagcattcatcatcgaaacccctttctcaccgacttaccacactttcctcacgacgtctgtatctgcttccgactgcatagcagtgtcggtggact

SEQ ID NO: 481 - DNA, 1452 bp, Glycine max
  misc_feature (1012)..(1012): n is a, c, g, or t
  misc_feature (1104)..(1104): n is a, c, g, or t
  misc_feature (1172)..(1172): n is a, c, g, or t
  misc_feature (1417)..(1417): n is a, c, g, or t
  misc_feature (1452)..(1452): n is a, c, g, or t
  Peptide Sequence Number=SeqID_8036
  Probeset Number=SeqID_10260
cataacaatagtaaaatgccagtcacgcgatcttccgtctttctctataagccggcattcctacgcggtggcggaacgctctagaactatgtggatcccccggcgctgcagagaattctttgttttattatttttttctcatattttttattatagtatgcgtttgagtgttaggattcttttttcctaattttctacgaagtccattcttaaatgggtgcaaggaattgactaagtattaatgagaacaattggttatcatatttaaaatcaattctggggtctaaacatgtcttaatcaccgggataacttacgacagaggagaaacaaaaactttattctgattgcttgcataacgtgtactccatagggaaagatggccgttgatggggcgccgcggggtgcccccgatcgaagtgcggtatgtcgtatttgtgccacaatatattttatagaaggaaatgtcgcgaggtttcattcctcctgctgtggcctgtccgctggacatgttcgtgtgatattatggatatcctacaaagtgttcaccttatcgtcttcacacccttctcgtctcataaaatgagtattcgcacactcaccctttcgcctcttgattacactcttatcgagcagttatgttaattgatcaaagtagcttgtcatcttcgcgtatatccatccgccgatctttctactggacgtaatactatttataacgctatacactcttcgacgaacagagtaggttgtagataagtatagtaccatatacttgttgcaattaactcgtaattatagcaacctagtaccctcctgcctcgtccgctgctctaagagtgccgcttgtgtgagtgtgacagcagcaacataatatcgagtatatgctccaccaattatcacctactaagtagatataaatgtctgtcaaattacaacaagccctcgtacttagacgtcagttcttgtgtacttcctattttatatactatatcgtatatagaggttcgcctnttctatcccggtgcgtgtatcattgtgttcgtgtacctataatagcttatcctgtactatgcagttcacgtagattcgtcttctctgtgacncacgatcttctctgagacacatgtcgtgcttatgaatcgacttactgcatactacaatagctacaatncaatccacttggctattactcgcctcactagcgaccggcagccgcattgctgtcaattacatattggtttatagcacagtgtatctgcgtgatcgtctggtatgatcacactccacttcacatatctgtcattacatgtgcttatcttgtctcgtcgatagcatatcaagacccgggctctgagacgacgtataatctcgcgcgtgcactctacagctatgctatcgacgtctgtactctgacanttctgacactgccgttgatctcctctttgctgttn

SEQ ID NO: 482 - DNA, 663 bp, Glycine max
  misc_feature (1)..(1): n is a, c, g, or t
  misc_feature (650)..(650): n is a, c, g, or t
  Probeset Number=SeqID_10261
ncagctacgtaggcccccccccgttgcaatatttgtgcaagctccgttgctttctccgccaccactcctccgatcattctccggcacgctttttcttcaatccctctcgccacttcatctccatccacaaattttattcgccaaattgctcgttgttttctgagattcagtttatctgcaaaatttaaaattcgtaactaatatttataggaattgtggacgtaaatatgtgcgtgtgtgtgtgaaattagcgtgtaagtaattgtggttgttgttgttgttgttgtttagaattgttgtattggatctgattgattggaattgggaaggtgtagggtagagaaattgggaacaatgagtgaggtgtttgaagggtacgagcgtcaatactgtgagcaatcggcgaatctttcgcggcaatgcactgcggcttctgctcttgatggaggtaatgcaatcaaatcactttcttcacacacactcttcaattcaacacttgttctgttattgttgaggttgatgatttttaggcccttgtggaaatggaaactatgggaacgggaagaatgttgtgaaatgtaatgatcaggttcggttgacaggaagacgatagagttttttgccttttgtgatcactactttaagattgntaaatgcttctct

SEQ ID NO: 483 - DNA, 1889 bp, Glycine max
  misc_feature (181)..(181): n is a, c, g, or t
  misc_feature (373)..(373): n is a, c, g, or t
  misc_feature (639)..(639): n is a, c, g, or t
  misc_feature (820)..(820): n is a, c, g, or t
  misc_feature (908)..(908): n is a, c, g, or t
  misc_feature (1129)..(1129): n is a, c, g, or t
  misc_feature (1204)..(1204): n is a, c, g, or t
  misc_feature (1379)..(1379): n is a, c, g, or t
  misc_feature (1440)..(1440): n is a, c, g, or t
  misc_feature (1470)..(1470): n is a, c, g, or t
  misc_feature (1590)..(1590): n is a, c, g, or t
  misc_feature (1592)..(1592): n is a, c, g, or t
  misc_feature (1599)..(1599): n is a, c, g, or t
  misc_feature (1608)..(1608): n is a, c, g, or t
  misc_feature (1673)..(1673): n is a, c, g, or t
  misc_feature (1679)..(1679): n is a, c, g, or t
  misc_feature (1682)..(1682): n is a, c, g, or t
  misc_feature (1710)..(1710): n is a, c, g, or t
  misc_feature (1795)..(1795): n is a, c, g, or t
  misc_feature (1799)..(1799): n is a, c, g, or t
  misc_feature (1850)..(1850): n is a, c, g, or t
  misc_feature (1859)..(1859): n is a, c, g, or t
  misc_feature (1862)..(1862): n is a, c, g, or t
  misc_feature (1872)..(1872): n is a, c, g, or t
  Peptide Sequence Number=SeqID_8037
  Probeset Number=SeqID_10262
tattccaaccctcgtctttatgcgtcacgctgagtatcgctccacgcggctcctagattatatattgtcgataacatctatatctataatatactttgtgatatttctctcacccgcaggagtagcgtgcgcggccgcgcctacttattgagacctaagatagttgtattcgcacacgggngactatgacaagagtatcattccctcttgtgtctgtatcttattctgattctgctcacgtggtgctactcatatgtcatcagtcataaacctcgttgcacattgtatctcgcgtctctctagacgtatcgccttgtaaactatattagtgatgacatataaagcgcgagaattatatcgacacgatcccctngccacatcaggacgtatatcacgactcttgctgcacataactgacactagctgcatgctcacacctgatacatgcatagtgcatgacatcgtcgaccacacacctgagaaatcacactcaacgactatttgtgttaccgtagatttattaacgtacgatgtcatacataattacgagacaatggagattgtgtacatgtcgagagacaaaggagacgaccacaccttcttgatattgcatcgtctgtcgcaactcttttcgtctanatggatgatggacaatcacaaatccttaatctggagatggatcatgctgtatggtcgtatatctgtaatcacagacgaccaatatataatacaacaccgacatgctggaatgcggcggggcgtttctcacggaatactcgcgcttagcgcggataattagcgcttataaaggctatgaggntctatctccatatcagcacccaacagcatcatacagcgtttgtttacgcccctgtaaccacacagtctccaccgacccagctagtcanagcataattacattctacgctagcatgaatttagcaaagtatgattcacatacccgtgctacccgcgaacgcgctgcgctaacttatcttatctctcatgaccactctcggctataacacgcgacacgtcccgtcgagacatatacaggcatatctccgataccgtatcgtgttaacaaagcgatcacacttctagtgcgtagacgcacgtagtgcactgngatgacgtgtagtgacgtattaactatagtaattactcatcggaatcccatacaactctatctgctctgttgcantactcttctctctctcgacgatcgtgtgcagtagtatgtgactcgttatatgagcttgtctggatctgtcgtcgcacctcatcaccgcacgctctatctcttattacgcaccaccgcctctatgctatgtgttatatatatcatatgtgattacacacgacgctcactgctgctntgtgcgtgagacgtcgaccgcacgtgcgtatatgtgtgtgtagagtgacacacgtgcgtcngtgagactagtgtacgtatgtatgctgcantgatcacgaagcgcgatcgcgaccgccattgttataatatagtaaatagtgatcatctgtgcagatacagcgacacgcttaatcaagcgttcatacctcctaactccagatgtacggagncnatcatancacgatgantatagatagcgatcaagcctagttctgtagagtcgtctcatcaccgcagctctgtagttatctgngaattngantagacgtactgtacatcatcgaccctcncatgagtgaccgcaacgtaacatcaatcgacacactgatgtatcgtcaactcggtctcagttatgacatactgatagtacatgtncgcntgcgtgtacgcactacatgattaagactcatgctactgtcgcccaccacantgctattgntgngatgctccgnacgcccattcagcgcaa

SEQ ID NO: 484 - DNA, 596 bp, Glycine max
  misc_feature (581)..(581): n is a, c, g, or t
  Probeset Number=SeqID_10263
tcagctacgtaggccccccccccgaaccatcattgcgccttgcagcagctacgccttctacttaaatcgtaagaaggaactctctctccaccgtcccatcctctttccactcaacttctgccaatgcgtccgtttgcacctcaagtcgcacgcttcacgaacagatcaacttcatcctcaccagcactacagtccgcagcaagttattttacatccggttaccgcagcactccttctcccacacaacaacaaaccagaatgtcttcctccaccgagactggcgagcttaagctcgagagcaccgtcaagaccgccactggtgtcgagctcagcaacgagcagaggactatcgtgtcttcagtgctggacctcttcgctggcaggccctcccttgccaagctacagctctggaaggacgatgccgtcttcagcgaccccatcactgtcgcaaagggcaggaaggagtttgagcctcaatggtacggcctccaaaccgccttctccgaaatcgagcgcaaagaccacagcgtcacctcctccggcaaccccatcgagctagacatgaccacaatgtacaaggncaagggtatcggcaa

SEQ ID NO: 485 - DNA, 721 bp, Glycine max
  misc_feature (1)..(1): n is a, c, g, or t
  misc_feature (3)..(7): n is a, c, g, or t
  misc_feature (12)..(13): n is a, c, g, or t
  misc_feature (18)..(18): n is a, c, g, or t
  misc_feature (543)..(543): n is a, c, g, or t
  misc_feature (585)..(585): n is a, c, g, or t
  misc_feature (592)..(592): n is a, c, g, or t
  misc_feature (605)..(605): n is a, c, g, or t
  misc_feature (607)..(608): n is a, c, g, or t
  misc_feature (622)..(622): n is a, c, g, or t
  misc_feature (625)..(625): n is a, c, g, or t
  misc_feature (627)..(627): n is a, c, g, or t
  misc_feature (638)..(638): n is a, c, g, or t
  misc_feature (641)..(641): n is a, c, g, or t
  misc_feature (649)..(649): n is a, c, g, or t
  misc_feature (656)..(657): n is a, c, g, or t
  misc_feature (666)..(666): n is a, c, g, or t
  misc_feature (671)..(671): n is a, c, g, or t
  misc_feature (675)..(675): n is a, c, g, or t
  misc_feature (681)..(681): n is a, c, g, or t
  misc_feature (684)..(684): n is a, c, g, or t
  misc_feature (692)..(692): n is a, c, g, or t
  misc_feature (700)..(701): n is a, c, g, or t
  misc_feature (704)..(704): n is a, c, g, or t
  misc_feature (714)..(714): n is a, c, g, or t
  misc_feature (716)..(716): n is a, c, g, or t
  misc_feature (718)..(719): n is a, c, g, or t
  Peptide Sequence Number=SeqID_8038
  Probeset Number=SeqID_10264
ngnnnnnagggnnttganccatgggtaccgggccccccctcacactacagaggctaaggaattcgatcgcgacatttcttaacggacacctaatacattcttaatatcacgagtgaatcatagggcttcgatatgaagaaggcttttacgctcatcgaactgctggtggtcatcgcgatcatcgcaatcctcgccgctatcctcttcccggttttcgctcaggcgaagctcgcggcgaagaaaacgacctgcgtttcaaacctgaagcaaatgggcacgtcgaccatgctctacacgagcgactacgatgatgcctactatcctcaccggttcaactgccgcaacgccgcgaacgctttcatcacgtgtcctgactatctcgacgcgtcgaacaacctgaagccggaagccaaaatgctgagcggcggcgccgagcagcgctactactgggtttatctgctccagccgtacacgaagaactatggactcttcctgagcccggccaactcgaacggtttcgttccgggcgccacgtccgctccnacctgctcgggtgcgggttgccagggcacggttacggtgganagacagnttcggccaaacgncnnttacctgacccggnggntngtctccgacgnggnggtaaccngaaacgnnacggtcggngttcngccntccttnacngtatggcntcaatccnnttnatgggcgggngnanngg

SEQ ID NO: 486 - DNA, 514 bp, Glycine max
  misc_feature (473)..(473): n is a, c, g, or t
  Probeset Number=SeqID_10265
atccagagagaccatcagcggctagcttcacagaatccagcggcggtgacgaatccatccatggtggaggaccaccgccgtgaccgcgcccggcagcggcggccaggcatgctcgtggtggcagcgctcggggctctcggcctcctcgccctctccggcacggtgctggctgcctcggtcgcggggctggccgtggcggtgccgttgctcctactcgccatcccggtgctcgtcccggcagcgctgcttgccgctctgacggccaccggcatgaccttttcaggctcgctggccgtcggggcgacagcgctgctgtcacgcttggggagcgcggtgaggagggcggccgcaaccccgccggactacgtcgagttggggaagcggcgggtggcagaggtggccggggagcagacggcgcacattgacgccggaccggcgatcagtccagagcaagtggcccgcaaccgccggcnatacggtggctctcacgcctttatctcttattaaaatgaat

SEQ ID NO: 487 - DNA, 478 bp, Glycine max
  Peptide Sequence Number=SeqID_8039
  Probeset Number=SeqID_10266
aagacccttttccctttggacccctttggggagtttgtcttttgaggggcccatggggtaattggtttctccggccgcaaaatcttctttgccacctatgggggatgggggggccacggggggggtgccttttctgggaagggtctccccacgggggataggggtggggcctccactgtgaggcaagctgcaaagagcattgttgtaaatgggctttgtaggagggcgatattgcaaatgtcttataccactggggggccccagcccctttttgtgtttttttacccttatggccctggggagatccccgtcaagggaatcccctgcattttgagggggaggtttgtattcaggcctggcacaatttcccccaccccttatttcaagaggggggggaaagggaggtttttgaggagtgttgcatatgggcactttggcggagatgaacccggcttctcacgggaagaggggaagcccc

SEQ ID NO: 488 - DNA, 234 bp, Glycine max
  Peptide Sequence Number=SeqID_8040
  Probeset Number=SeqID_10267
ttgtcatcatggcagggatcatgctggtggaaatgaaaagataaagcaattggtgcctggaatcaaggtctatggtagtttaattgataacgtcataggttgcactgataaggttgaaaatggggataaggagtcccttggggctgatatttatatattgtgtcttcacacaccttgtttggaaaactcatcaacccgctactatttgtttgcaacaaatgtgcgcaggcagca

SEQ ID NO: 489 - DNA, 462 bp, Glycine max
  Peptide Sequence Number=SeqID_8041
  Probeset Number=SeqID_10268
ccatttcccattaaggtgggccaatttttggaaagggggatggggggggccttttttctaatacccccaccggggaaaaggggaattggtgccaagggaataaagtggggtaaccccggggttttcccgtccccacggttgtaaaacccggcccaggaaattgaaggggggggccccaaaaaaaaaataaaacgctggaaggccggggaaggaaagttggggcctttaaacgggcccccccctagttttttttttttttttttttttttttttttttttttcttttttgttttttttttttttttttttttttttttttttttttttttttttttttttcgaacacgaaaaaaaacatgtaatcgagacaggacagcccaagcagagccaaaccggaggagaaggggaatctaactcgagccttaatttaagcatcaacaatttcctcagtgtccgcagaag

SEQ ID NO: 490 - DNA, 530 bp, Glycine max
  misc_feature (484)..(484): n is a, c, g, or t
  misc_feature (493)..(493): n is a, c, g, or t
  Peptide Sequence Number=SeqID_8042
  Probeset Number=SeqID_10269
ataaactcatcactcaattttcgctggccttcacctcgtccttgtagcctctctctcagattttaaaaggaacttttgcttttcttcgttcccaaggcaattcagagagtcaacatgtctggtgatgaagctgctgctgctcctgctgttgttcctccggttgccgaggcagctgctgccattccagaggacatggatctgttgactgcattggagttgacgctaaggaaagctcgtgctcacggtggtgtggttcgtggtctccatgaaagcgctaagcttattgagaagcgttctgctcagctttgtgtcttggctgaggactgcaaccagcctgattacgttaagcttgtcaaagctctttgcgctgatcacaacatcaacttgcttactgttccaagtgccaaaaccctcggtgaatgggctggtctttgcaagattgattcagaggggaatgcaaggaaggttgttggatgctcgtgcnttgtagtcnaggattacggtgaggagacaactgcactcaacatcgt

SEQ ID NO: 491 - DNA, 1874 bp, Glycine max
  misc_feature (26)..(26): n is a, c, g, or t
  misc_feature (28)..(28): n is a, c, g, or t
  misc_feature (30)..(33): n is a, c, g, or t
  misc_feature (37)..(39): n is a, c, g, or t
  misc_feature (44)..(44): n is a, c, g, or t
  misc_feature (47)..(47): n is a, c, g, or t
  misc_feature (68)..(68): n is a, c, g, or t
  misc_feature (71)..(71): n is a, c, g, or t
  misc_feature (74)..(74): n is a, c, g, or t
  misc_feature (77)..(78): n is a, c, g, or t
  misc_feature (81)..(81): n is a, c, g, or t
  misc_feature (83)..(83): n is a, c, g, or t
  misc_feature (88)..(88): n is a, c, g, or t
  misc_feature (90)..(91): n is a, c, g, or t
  misc_feature (95)..(95): n is a, c, g, or t
  misc_feature (99)..(99): n is a, c, g, or t
  misc_feature (103)..(103): n is a, c, g, or t
  misc_feature (106)..(106): n is a, c, g, or t
  misc_feature (112)..(112): n is a, c, g, or t
  misc_feature (151)..(151): n is a, c, g, or t
  misc_feature (158)..(158): n is a, c, g, or t
  misc_feature (165)..(165): n is a, c, g, or t
  misc_feature (176)..(176): n is a, c, g, or t
  misc_feature (216)..(216): n is a, c, g, or t
  misc_feature (219)..(219): n is a, c, g, or t
  misc_feature (231)..(231): n is a, c, g, or t
  misc_feature (283)..(283): n is a, c, g, or t
  misc_feature (286)..(286): n is a, c, g, or t
  misc_feature (311)..(311): n is a, c, g, or t
  misc_feature (314)..(314): n is a, c, g, or t
  misc_feature (316)..(319): n is a, c, g, or t
  misc_feature (321)..(321): n is a, c, g, or t
  misc_feature (372)..(372): n is a, c, g, or t
  misc_feature (398)..(398): n is a, c, g, or t
  misc_feature (410)..(410): n is a, c, g, or t
  misc_feature (416)..(416): n is a, c, g, or t
  misc_feature (428)..(428): n is a, c, g, or t
  misc_feature (477)..(477): n is a, c, g, or t
  misc_feature (481)..(481): n is a, c, g, or t
  misc_feature (511)..(511): n is a, c, g, or t
  misc_feature (556)..(556): n is a, c, g, or t
  misc_feature (567)..(567): n is a, c, g, or t
  misc_feature (570)..(570): n is a, c, g, or t
  misc_feature (625)..(625): n is a, c, g, or t
  misc_feature (668)..(668): n is a, c, g, or t
  misc_feature (676)..(676): n is a, c, g, or t
  misc_feature (724)..(724): n is a, c, g, or t
  misc_feature (726)..(726): n is a, c, g, or t
  misc_feature (732)..(732): n is a, c, g, or t
  misc_feature (734)..(734): n is a, c, g, or t
  misc_feature (737)..(737): n is a, c, g, or t
  misc_feature (743)..(743): n is a, c, g, or t
  misc_feature (745)..(745): n is a, c, g, or t
  misc_feature (750)..(750): n is a, c, g, or t
  misc_feature (819)..(819): n is a, c, g, or t
  misc_feature (832)..(832): n is a, c, g, or t
  misc_feature (838)..(838): n is a, c, g, or t
  misc_feature (983)..(983): n is a, c, g, or t
  misc_feature (1071)..(1071): n is a, c, g, or t
  misc_feature (1083)..(1083): n is a, c, g, or t
  misc_feature (1085)..(1085): n is a, c, g, or t
  misc_feature (1090)..(1090): n is a, c, g, or t
  misc_feature (1100)..(1100): n is a, c, g, or t
  misc_feature (1115)..(1115): n is a, c, g, or t
  misc_feature (1149)..(1149): n is a, c, g, or t
  misc_feature (1156)..(1156): n is a, c, g, or t
  misc_feature (1179)..(1179): n is a, c, g, or t
  misc_feature (1185)..(1185): n is a, c, g, or t
  misc_feature (1203)..(1203): n is a, c, g, or t
  misc_feature (1216)..(1216): n is a, c, g, or t
  misc_feature (1281)..(1281): n is a, c, g, or t
  misc_feature (1332)..(1332): n is a, c, g, or t
  misc_feature (1349)..(1349): n is a, c, g, or t
  misc_feature (1351)..(1351): n is a, c, g, or t
  misc_feature (1410)..(1410): n is a, c, g, or t
  misc_feature (1415)..(1416): n is a, c, g, or t
  misc_feature (1462)..(1462): n is a, c, g, or t
  misc_feature (1497)..(1497): n is a, c, g, or t
  misc_feature (1534)..(1534): n is a, c, g, or t
  misc_feature (1572)..(1572): n is a, c, g, or t
  misc_feature (1632)..(1632): n is a, c, g, or t
  misc_feature (1639)..(1639): n is a, c, g, or t
  misc_feature (1665)..(1665): n is a, c, g, or t
  misc_feature (1670)..(1670): n is a, c, g, or t
  misc_feature (1728)..(1728): n is a, c, g, or t
  misc_feature (1740)..(1740): n is a, c, g, or t
  misc_feature (1744)..(1744): n is a, c, g, or t
  misc_feature (1749)..(1749): n is a, c, g, or t
  misc_feature (1827)..(1827): n is a, c, g, or t
  misc_feature (1841)..(1841): n is a, c, g, or t
  Peptide Sequence Number=SeqID_8043
  Probeset Number=SeqID_10270
agaaagggagagcgagacagcacagnanannnnaaannnaaaanacncaaaactacacacaaacaaancgncgnccnncgncngcccncnnccantgcncacntcngtcgcnggggacgcacgatgaggtcgctctgctgcgtagtcgtanagcgcgnatgccangcgatacaatnatctatacagatgctagcgactagtgttactaaagcagangancacgatgagcgnagagcgcacaacagagagaagagtgacaggtatagagaacgatagtgagtanagnacgacgcgagagaggaaacacgaanaanannnncnagagtgagagactactgtcagtacgctgtcacgctgtgagagatcgcaggngatgagaggaggtgtatgcgcggagncatgcaaccagngcactnctacagacggcnacgatgcgcacctgcgtacctagtcgacttagagtcgtattgatttatncttncgcggatcgtacactcgagcagactaccantgcatcgctccgtagcacacctacagacgcaagatcataagcgancgtattacganctnacatacacaactatatgtacgatgtgtatatataatactcatgatatctatagtntatcatactatgatagaaaaagcacgacacaagaaagaggacnactagcanacacacacacactactacatacacacgactatatacacaatcaacgcncnccacancntancaaaananaccancatagtcacgctgatatcacgcacgcacgactcacatactcacataaactaggtactgataggagaggntcgtagatcgagngtcatnactcggtgctgcactgtagtgtgtatgcgtggacgtgctgtgcgtcttcgatctcgcgtgtctcgacagtccgaattgctcgtgagtgatgtatctagactaatcacgtcctatgttgcttagatatcgactgacgaatatagantagcatagatagagaacaactataatcaaatgtactattaaatacaatactgcacaaactatgatcataagtccagcactattctagntatctctagcantncacgncgaaaaccancagagagatagaaantaactataagcaagccatacagcgcgaacgacanagacganacgaccgaacatctgaaacacgnctatanagggcatcgaaagactancatgatataatanacacgagtgcatatagtaatatatactagtcatactgtgagcgcgtgactacctaattgtcgttngtagtactatatgtcatgtgacactgatttagataatatcatatctgatantaactagtagtctcatnanatatagcacaacactacagtctcacgcatgcacactataaggtagatgcgtaagagtgncacgnnttgggcgtgtgtgttgctttagcatgatctcaacgtgccgaatatnattgacatacgtagagtaatatgtgataatatatncaatcatagcataaccgtgccggtcgacgcgctcgtnagtcgaatcgttctgctatcacactctctgacatatgnatttatagcgtgctgagactacagtatacagtgcagtacgaatgactgtgagacacacangaagatnggagagacgctacgatcgctgtcttncactngtatgatgaatatataatttatcattgttacattagtattatagtcgttatgttgatnattgataataanctcntatanactgtgtatactgtgcaagggcatcactctctcactgcttatatggtgtatatgacactattgtattctattactatnactccttcacagantatattatcatatacttatattctatatatata

SEQ ID NO: 492 - DNA, 1500 bp, Glycine max
  misc_feature (10)..(11): n is a, c, g, or t
  misc_feature (13)..(13): n is a, c, g, or t
  misc_feature (38)..(38): n is a, c, g, or t
  misc_feature (55)..(55): n is a, c, g, or t
  misc_feature (57)..(59): n is a, c, g, or t
  misc_feature (68)..(68): n is a, c, g, or t
  misc_feature (72)..(72): n is a, c, g, or t
  misc_feature (80)..(80): n is a, c, g, or t
  misc_feature (93)..(94): n is a, c, g, or t
  misc_feature (218)..(218): n is a, c, g, or t
  misc_feature (283)..(283): n is a, c, g, or t
  misc_feature (290)..(290): n is a, c, g, or t
  misc_feature (301)..(301): n is a, c, g, or t
  misc_feature (349)..(349): n is a, c, g, or t
  misc_feature (354)..(354): n is a, c, g, or t
  misc_feature (397)..(397): n is a, c, g, or t
  misc_feature (399)..(399): n is a, c, g, or t
  misc_feature (433)..(433): n is a, c, g, or t
  misc_feature (465)..(465): n is a, c, g, or t
  misc_feature (514)..(514): n is a, c, g, or t
  misc_feature (576)..(576): n is a, c, g, or t
  misc_feature (726)..(726): n is a, c, g, or t
  misc_feature (975)..(975): n is a, c, g, or t
  misc_feature (1166)..(1166): n is a, c, g, or t
  misc_feature (1470)..(1470): n is a, c, g, or t
  Probeset Number=SeqID_10271
tattatggtnnantatctaactctcctacacctatcanacacactcaataaatcnannnaaataaaanatanatacttantatatatttcgtnncagttcgtccgggtgattgtaatgagatgttggttgtagtggtgtcggtttgtttgtgtatgcatgtggacgcgtgctgcgcgtgtctcgcgcgtgtatagcgtggacgaggagtatggatatngtgtgtgtaggagtgtgactactatatcgagactctaaccgtgatgtgagtgtaatattaatctncgatgangatatatttanataatagccagatctctatatatatatctactgacacatctcacatanctacntagagtacatatctcaaacatataactatcacttaatagtacncnagactcgacgcactcctctcacctatctcctgtncagcctacacagatgaaccacgcgaagctgcnttgggacgtgtgtattgtgagtgtataggtatatgtgataggtgcatgncggacgccctgccgcactgctatcgtctttatcgttcgtctagacacgcgcgcatgctcgcntcgcctcgctgctgcgctctccgcgctgcgcgtctcccgctcgctcgccacgtcccgcgcgcttccgctgactctcgtttgtatgctgcattgtttcgctgtgcgtgagtgcttgactcttgtctatgtgctgtcgtggtgaatggctangctggcgatattttgtctcgtgcgcgtcactcgtgtaacgacactgcgtctgaatgtcgtacatcgccgacttccactcccgctaccacacttcgcgcgagcatccaatgtgcccctcgctgtctagggccgccgcgacgtcgatgattctcgctcgtctgcgtcctcgcgcggtcctacgttggaccacgttgcgactgcggtgtgcacatcgcgccacgggacgcgagcgcctggcgcgtctactcnagggcaatagcctcgcatcgccatacaccaagctacgtagacgacgctctagcgtgcgaccttgatccctgctcttacgcataagaatgtgtgtggacgatctatatgcatctcactttctgatctatgtgtggtatattgtatgctctaagatactgttatattaaatgtgatctctaaccatcatgtantgctacacaaccgccctcacttaccaccgcgtgcctcgtcacgtcaatcagagcaactatctctctcgcacacgcgcgtccgagcgtatatatgtaactccgatatatgaattcattctatatacttacgctcctactatgttcatgtgagtagattaacaatattaatatactcacgtaacttatactgatcactgaatgacgaatagcttacataactatactacacatcatataattacacttagacgcctactacacatgacgcgctcgtacagcaccgccgtcgcctccgacttacacnatcgctactggtatgcgacgccagtcctcc

SEQ ID NO: 493 - DNA, 337 bp, Glycine max
  Peptide Sequence Number=SeqID_8126
  Probeset Number=SeqID_10272
gagctatcgcatctaccactacctccagacctttcatgatggcccacgtaactactggggtttcactccgactcccgcttctagtgagaacaacatcgacgcgatcgtctctccagaggctgcctttagcgactaccaaccggagatccgtgacgaacgtagaggagatgtacgtgaagactcaggcgtgctacgcggcgtgcaagcgaccgactgtggatatagactcggtgatcgacgccacttgaagcggtctctgagatactcttcaagtgctcatccgctcgaggcgctccgccttctcatcgatcggcttcttagaacgactacttgttaa

SEQ ID NO: 494 - DNA, 1653 bp, Glycine max
  misc_feature (10)..(10): n is a, c, g, or t
  misc_feature (14)..(17): n is a, c, g, or t
  misc_feature (30)..(30): n is a, c, g, or t
  misc_feature (88)..(88): n is a, c, g, or t
  misc_feature (899)..(899): n is a, c, g, or t
  misc_feature (1126)..(1126): n is a, c, g, or t
  misc_feature (1444)..(1444): n is a, c, g, or t
  misc_feature (1531)..(1531): n is a, c, g, or t
  misc_feature (1585)..(1585): n is a, c, g, or t
  misc_feature (1608)..(1608): n is a, c, g, or t
  misc_feature (1644)..(1644): n is a, c, g, or t
  Probeset Number=SeqID_10273
tttcttccancttnnnntattttttttttntttttacgtttatttccttaccatttactcctctgtatttatatatccccctctctanttctacttacattccattatagcttattatcgacagcgagggacgtaattaactcttcgtcatagcccttattattcctctagaagtcaatatatacacggcgcgggcatatgttatgtttgaggggagtacatctgatagttagtctacctgtcaatgaggttatcatcagggcctgctgtgagccgactaaggattgctaactattattttgaccgtgcccgcctagcgcggggcgcggtgtgactgctagctctgtttgttgttgtgattagacggatgtatactttatctgtgttctttcctcctttctcatgtttgttagccaggccgtcgcgccacacactcaacgccacgcaagccgcgagtaagctggacacacgaagcggggtacaaagtgaccggagaaatttatgtaggcaagacgttaccaagcacatcatctcctcctcgctctagcgtcactagcactatccgtgcactctgcttgcttatgcgcgactctctctcttagtccaccttcctctcactctctctttacacgcattccgcgtgcgccctcccgaactataatcacgctacactactctgcgcatcgtacgtctcgccctctagcacgccactctttatccctatccctcacctcaaccactccctctctatcttctctgtcttattcctattcatattgtgcaaccgtactccttctcgcgcgtcagtttctgacggtatgcagctcttgtactcctcatcactacgtcgttggtcgcctttgtggtctcctcctcatactaccgcgttccacccgttnactcacatcatgtcctcctcatatcccactatcttgtcgtgaccctaaatgattacaataagacgctcgccgatcgtgctgagcctgagtcctcgcgcgcctgtgctgtgcatatcgatatagttctttgtcgttttctgacagcactacgcgcactatccacaaccgtcatcacatgcctcctctcatcgcgtgcggcttgtcgcgctctcggacgaccagccccncgttgctcgctatatatcattctctatctcattgtgtgagtatgctccgcgccgcactgggcgagtcaatgatgcgcgcagtgcgcgcaataaagcacggcgctgtcctcgtcgacactccgcgcaccacctacgtggagatgattgtgtccgctatctctcgtgtctactcatcacatacccgtccatgatgatcctctgttcggctctcattactccgcactgtatactatgtgttccagattacgtacatttacgacagacatcttatatcattaggcattgcatgaccgacgccgtctgtctcacacatttagngtgttcacgagcgcgctgttctgcagcgtatatagtgctgagtgatactgtcatttctgtcttcatacgactcccacctatctcccnctgaaatccacgcatcatcctcatacttgtctattgctgctaccaactctgctnattggtttctatctcgtttttgntatttggacaacgaatcatcctctcagggacgtccnactcgtcat

SEQ ID NO: 495 - DNA, 379 bp, Glycine max
  misc_feature (185)..(185): n is a, c, g, or t
  Peptide Sequence Number=SeqID_8127
  Probeset Number=SeqID_10274
cccctggcgatttcctcagttgagacacattagaaatcaattaccacctgagcttgttgatgcttacgacaagttccaagagcaggtagaccaacactttgaaccctctaaaagccaggaaggcgactagaggaaagaagaaagaagaagtaaaggaagaaagaggaacaaaattattcaaaagngaaccagttgaggactttgacaaagctcttgtatgaaagttgaggcaccagaaatactcgatgccgatattatcaagtggtatgctggcacagagaagcatgaatccaccaagcgtgaagtgataaagcatttcagcaaagatttgagagtctatgatatgaatggaaatcatgaagtgcattttcctacagaa

SEQ ID NO: 496 - DNA, 361 bp, Glycine max
  Peptide Sequence Number=SeqID_8128
  Probeset Number=SeqID_10275
acctattatatatggacgacctcccccaccttctgggggattacctgaaacattgaactcagatgaacaaaaaatccttaaactgccattgaaagataggttcttccttcaaccattgtctccaattgatgctgcaaaaagggcaaaggaatcacccaaggaaatggttgtttttattaatttgattgaaaagaaggctctgccatatgtttagaatgatctgcttctcagggccgaatatctgggcttagatcttaacactgtcattgctgcaaaccctaaggatgacaagaaatctctcgatgaactcagtggaaatctcttccaatatatcaggtatctagatcttacagaaaaaatt

SEQ ID NO: 497 - DNA, 458 bp, Glycine max
  Peptide Sequence Number=SeqID_8129
  Probeset Number=SeqID_10276
aacgattagctctcgagtgttgttgtgtgttatcaccacctgaagattctctgtctctcccccgatcctcgtcgttctctcgtccaatggcggaagctgtgtctgctcaaactccgtcgctctccgagcaatatcatttggagaatgaagtgaagcaagttaaagaatctcctgaagaaagtagtgaggaggagactactgatgagatcacgcttgagacagctcctgctgatttccgtttcccgaccacaaaccaaacaaggcattgtttcacacgttacatcgagtatcacagatgtgtagctgctaagggtgacgatgctccagaatgcgataagtttgcaaagttttatcgatctctctgccccagcgaatgggttgataggtggaacgagcaaagagagaatggaactttccctggtcctctttaagacaactcctcctgcctcgagaagaat

SEQ ID NO: 498 - DNA, 460 bp, Glycine max
  Peptide Sequence Number=SeqID_8130
  Probeset Number=SeqID_10277
aaaactgaaaatttcctctactctcttgcttctcactctccctctcactcccattctcattctcattagattccatcacgaaccctaaaatcttctttgatcttttcatcttccactctctccatcttcttccttcttttttaaattttgtgtattcacaactatcaccatcgaacagtgacaccctactccaccacacaagttgatcaatcctctcccttgtttattttgcatctccctttccctcttggtctccgacagcaaagggagatgcgaaataaagggcatggtgctggtgtggaaagaggcggtgttaggaaaagagaaaggaagtaggaaaaagagaggcaaatgataggaaagaaaagggacaccatcgcacatacgacggtcgaatatcatcgtgctcgaagaagactgggaagggaaagagacctggaaaaggtgggaaccacttttg

SEQ ID NO: 499 - DNA, 1784 bp, Glycine max
  misc_feature (21)..(21): n is a, c, g, or t
  misc_feature (45)..(45): n is a, c, g, or t
  misc_feature (92)..(92): n is a, c, g, or t
  misc_feature (95)..(97): n is a, c, g, or t
  misc_feature (114)..(114): n is a, c, g, or t
  misc_feature (126)..(126): n is a, c, g, or t
  misc_feature (165)..(165): n is a, c, g, or t
  misc_feature (179)..(179): n is a, c, g, or t
  misc_feature (194)..(195): n is a, c, g, or t
  misc_feature (204)..(204): n is a, c, g, or t
  misc_feature (237)..(237): n is a, c, g, or t
  misc_feature (243)..(243): n is a, c, g, or t
  misc_feature (252)..(252): n is a, c, g, or t
  misc_feature (257)..(257): n is a, c, g, or t
  misc_feature (275)..(275): n is a, c, g, or t
  misc_feature (295)..(296): n is a, c, g, or t
  misc_feature (301)..(301): n is a, c, g, or t
  misc_feature (313)..(313): n is a, c, g, or t
  misc_feature (343)..(343): n is a, c, g, or t
  misc_feature (346)..(346): n is a, c, g, or t
  misc_feature (348)..(348): n is a, c, g, or t
  misc_feature (368)..(368): n is a, c, g, or t
  misc_feature (374)..(374): n is a, c, g, or t
  misc_feature (420)..(420): n is a, c, g, or t
  misc_feature (432)..(432): n is a, c, g, or t
  misc_feature (447)..(447): n is a, c, g, or t
  misc_feature (449)..(450): n is a, c, g, or t
  misc_feature (457)..(457): n is a, c, g, or t
  misc_feature (513)..(513): n is a, c, g, or t
  misc_feature (517)..(517): n is a, c, g, or t
  misc_feature (530)..(530): n is a, c, g, or t
  misc_feature (555)..(555): n is a, c, g, or t
  misc_feature (557)..(557): n is a, c, g, or t
  misc_feature (559)..(559): n is a, c, g, or t
  misc_feature (561)..(561): n is a, c, g, or t
  misc_feature (567)..(567): n is a, c, g, or t
  misc_feature (573)..(573): n is a, c, g, or t
  misc_feature (579)..(579): n is a, c, g, or t
  misc_feature (610)..(610): n is a, c, g, or t
  misc_feature (612)..(612): n is a, c, g, or t
  misc_feature (618)..(618): n is a, c, g, or t
  misc_feature (621)..(621): n is a, c, g, or t
  misc_feature (647)..(647): n is a, c, g, or t
  misc_feature (654)..(654): n is a, c, g, or t
  misc_feature (663)..(663): n is a, c, g, or t
  misc_feature (672)..(672): n is a, c, g, or t
  misc_feature (676)..(676): n is a, c, g, or t
  misc_feature (736)..(736): n is a, c, g, or t
  misc_feature (768)..(768): n is a, c, g, or t
  misc_feature (785)..(785): n is a, c, g, or t
  misc_feature (809)..(809): n is a, c, g, or t
  misc_feature (843)..(843): n is a, c, g, or t
  misc_feature (860)..(860): n is a, c, g, or t
  misc_feature (876)..(877): n is a, c, g, or t
  misc_feature (882)..(883): n is a, c, g, or t
  misc_feature (913)..(913): n is a, c, g, or t
  misc_feature (919)..(919): n is a, c, g, or t
  misc_feature (1006)..(1006): n is a, c, g, or t
  misc_feature (1045)..(1045): n is a, c, g, or t
  misc_feature (1075)..(1075): n is a, c, g, or t
  misc_feature (1090)..(1090): n is a, c, g, or t
  misc_feature (1134)..(1134): n is a, c, g, or t
  misc_feature (1195)..(1195): n is a, c, g, or t
  misc_feature (1249)..(1249): n is a, c, g, or t
  misc_feature (1373)..(1373): n is a, c, g, or t
  misc_feature (1409)..(1409): n is a, c, g, or t
  misc_feature (1472)..(1472): n is a, c, g, or t
  misc_feature (1588)..(1588): n is a, c, g, or t
  misc_feature (1647)..(1649): n is a, c, g, or t
  misc_feature (1665)..(1665): n is a, c, g, or t
  misc_feature (1674)..(1674): n is a, c, g, or t
  misc_feature (1683)..(1685): n is a, c, g, or t
  misc_feature (1701)..(1701): n is a, c, g, or t
  misc_feature (1706)..(1708): n is a, c, g, or t
  misc_feature (1711)..(1712): n is a, c, g, or t
  misc_feature (1714)..(1717): n is a, c, g, or t
  misc_feature (1719)..(1719): n is a, c, g, or t
  misc_feature (1722)..(1722): n is a, c, g, or t
  misc_feature (1724)..(1724): n is a, c, g, or t
  misc_feature (1732)..(1733): n is a, c, g, or t
  misc_feature (1736)..(1742): n is a, c, g, or t
  misc_feature (1744)..(1751): n is a, c, g, or t
  misc_feature (1753)..(1754): n is a, c, g, or t
  misc_feature (1759)..(1760): n is a, c, g, or t
  misc_feature (1766)..(1769): n is a, c, g, or t
  Probeset Number=SeqID_10278
ctactataatgcatcataatngtacagcgacgagactcagtgagnatagcgatatgagagagcataggagaactgagtatcatgacagcacncgnnnaccttatatcattgatntgtgtatactgngagtcgacaactcagctcgctactcctaccatatctcancaattactatcgangtcgtacagggaatnngtgcgatantagaatatctccacagtttaatgcatccatagnctcacnggtctcctncctcntccagagatagtaaagantatgcagaatatgtagtagnngaatntcttgcgatctncagcgtgtactgtacgtcgtacagacgccncanantaagtagataactgctatcncacatnagctcattatagcgcagatgaagagcgcagcagagtgtagcgttgngtatgcgagtgngagatgtgggccgcncnncccctcnctgatagtatatgttctggtacgagccataccgtaatatactgtccttacgcatcncccncacctgtcatcancgagatgaggttgtgatagtaaagngngngnggtganacggcncgcgcntgtgatatgtagagcgatgtgcatatccgtngnctcgtngtntagatatataagcggcagcgagcagngacgagnaatagtcgncacagcgantgangagggaggtggaggagatccaaaaacgacacaatcactactaacatcacttctcatcatntcataagtatagagagtagagaatcacagacnggaagacacactactgntagagagaaggagcgaagcacatngcgcggcgcgagtaagcgcgtacaccaagagcanaggcaacacagtccacnaatcatcgtcacgtcnntttcnnctctatccatcacattcctcgattcatatnaccgantattatatatatatataacgagcacacatatcatcacagtagacaaacacaagactagatatcaggagtatacggcgtaataatatntactagagtagacgatcaaattagatcacacgatagctntcggtcgcgagcgcgtaacgaggctgtggngtgtccagtgatgcngcgaccgaagacagcagagccgcgagagcgcgcgcggcagtagncatgagtcatattgacataggaaacgcgcacagaatgagaaagagagaactcacacacacngctcataacacacatcgtgaacatatatttataatacaccaaactgtattgcgnacgtgacgtcgataagtgttgttggtgcggtaagaagtaagacatctggtagcgagaagtcaggatgcagagtgcatcttctacacaacaccgcggacacaagtcgacgagcagaccgaccacnttaagttttagaggtcagagagagcactcgcgatcnagtcggtacgagcgggcgcgccgcgcgcttccccggcgcggcgttcgcgctgcgcgagctctncacgtggtacggagttagagcagagagagacgaggaataatatatatattaagaagatatagtatttgtcttattgtttctcgtcgcacagtaccacgcgtgtagagtgataccanaatcattatgatattagaagagaagtacttgttctccgactatctgtgctcacagagtnnncatcgaggacgatagnaggtgtacncggtggggnnnggggggttgaccgacnccacnnntanntnnnntntcncnccacgacnnggnnnnnnngnnnnnnnngnnggggnngggggnnnnggggggggggggggg

SEQ ID NO: 500 - DNA, 494 bp, Glycine max
  Peptide Sequence Number=SeqID_8131
  Probeset Number=SeqID_10279
acgcaaacactcacatcgcagcaactccaaactctcaaaaaaactctcgacaaaatggcggaacgtggcggagaacgcggcgccgagcgaggtggagaccgtggtggcttcggtcgtggattcggaggaggtcgcggcgaccgcggtggccgcggcggtccgagaggacgcggcggcagacgcggaggccgtcccaccgaggaggagaaatggactccggtgaccaagctcggccgtctcgtgcaagccggaaagatccagaagctcgagcagatctacctccactcgctccccgtcaaggagtaccagatcatcgacctcctcgttggcccaaccctaaaagacgaggtgatgaagatcatgccggttcagaagcagaccagagccggtcagaggacgaggttcaaggccttcgtcgtcgtcggggacacgaacgggcacgtgggattgggtgtgaagtgctccaaggaggtggcgacggcgatcagaggagg

SEQ ID NO: 501 - DNA, 307 bp, Glycine max
  Peptide Sequence Number=SeqID_8132
  Probeset Number=SeqID_10280
tgttggtggtgggatgcatccaatggctggtcacttcatttccgagcattatgagataaatcctgaccatcaaacttattcttactatagacctcggaattatctcacttggcgtgcggtataccataatgaacaccatgattgcccaagagttcatgcaaacagacttcaccatgggaaggagatacgaccatagtaatatgataattaaccatactacagatcgaaaacccgtatcatttacatgtacattatagatcgaacacactgaccttgtgaccgaatgaagagaacatacagtcaagcc

SEQ ID NO: 502 - DNA, 1344 bp, Glycine max
  misc_feature (26)..(26): n is a, c, g, or t
  misc_feature (28)..(28): n is a, c, g, or t
  misc_feature (48)..(48): n is a, c, g, or t
  misc_feature (276)..(276): n is a, c, g, or t
  misc_feature (479)..(479): n is a, c, g, or t
  misc_feature (838)..(838): n is a, c, g, or t
  misc_feature (856)..(856): n is a, c, g, or t
  misc_feature (1019)..(1019): n is a, c, g, or t
  misc_feature (1232)..(1232): n is a, c, g, or t
  Peptide Sequence Number=SeqID_8133
  Probeset Number=SeqID_10281
ggggttattcccctgattgtgtggtntntatggggggaaaacaaccgncgaccgcgacgaccccccgctaaaaacaaactgaggggtgtgtctgtaaataatggaggggacacgcctcctgtatatcattatggggatctaccacgggagaaagagaagggtagaaaattttgtgcgccacaccaatgtttggcggacgcgcaagataacggtggggggtgtgtctgggtgagcgcggtacaccaatagtgaaaacagaacaggcgggattaaaangtgtgggaaaaaaaacggggggatacaaaccggcgcgaaaaaatctggggctcactcataaagatgggggggcaacacaagagcgggggtaatataacacgcgtcgtgtggctgtggggtcgtgtgaataaatatatgggtggggataaaatggtggtgcgccaaaatatacggcggggatataaaggtggcggcaacacgtngcgcgcgaaacaaatatcgcctacgtcctctctttcatctgctgatatgtgcgcatctaacaaaaaattgggtgttgacataaaatattcgttttcccctctcttccctctcctctacatcttctctctccgcggtcgtgaacacactctgcgcggggtcttaaactctcttgtgggttgtgcgtgtcaatatgtgtgtgcaccccaaaaaaacccccccaccaccaccccaaacatatatgtgtgtgtcgtgtcaataaacaacacccccgtcctgttcggtgcaaataactcattgctctctctcttgagtccttgcgcctgtacataccgccgcctacccgtgcccgtactctaantacggtgtcatagctcanactgtatcaatatatgcgtgatacatccggcgggtcgttgcggttcactctacatacaatactatcgtcaaaacgacgccgtgtgcgccgccgcccgctcctgcgcgccgcctgcaccactctatcgcaacttctcttcctccgtcgtcgtccatacacttcntgtgggtcgttgttattacttcttgcccttcctctgtcttgatctataatatcgcgtgctaccgacgcgtgtggaactatcagctgtccctactctctcttccgtcacatattcaactcgcgctctccctcgggctgcgcggtctgacaactctcgctgcctggtgcggtgtgcatataaatcatggtgcgcgacgacgcacgggtgagaganaacaatagtgtggctgcggagcgcgagatacacacaacaacatatctcgacgctcgtcgaacaagaaacagcgtggcgcgtacaaacaactcctacacgcaccaatacaaaa

SEQ ID NO: 503 - DNA, 1487 bp, Glycine max
  misc_feature (19)..(19): n is a, c, g, or t
  misc_feature (23)..(25): n is a, c, g, or t
  misc_feature (45)..(45): n is a, c, g, or t
  misc_feature (101)..(101): n is a, c, g, or t
  misc_feature (202)..(202): n is a, c, g, or t
  misc_feature (277)..(277): n is a, c, g, or t
  misc_feature (311)..(312): n is a, c, g, or t
  misc_feature (323)..(325): n is a, c, g, or t
  misc_feature (887)..(887): n is a, c, g, or t
  misc_feature (1088)..(1088): n is a, c, g, or t
  misc_feature (1452)..(1452): n is a, c, g, or t
  Probeset Number=SeqID_10282
gttgttgtggccccttccncggnnntctcccctcgcctctgtttnttgctctgccccgccaccgagtgttggggtgtgggtgggtgttatcctctattatnatatccatcgtcgtgtttagtgagatgcaatgtaattatctcccaccactccatctcctcctctcccttgcttatcatgtaacggtgaattcatatatttngccctatcatcacttctcctctccgctcctcctcgtcctctcacctctcgcctatatctccctcctatctgcccntgtgccgggtggctggtcgcagtttacgttcttnntcgttgtttgnnntgtgagtttctttgtttcgtatatttaatatttctattcccgctcgttggggccgctgcccgcgttggcaccgccccctccccaccgaatcttacctacatgcgaccgaccgcgccggcgcgcgcgtacgctgatgcgccgcttctgcccctactctggtgtctcggggcgtggtcggcgtgcgggcggtcgcggcgcggccgggtgcctgttcgatattccttccgtccgtcgtgtacaaggcagtgggccggtgcgacctgcgcagggcgagttcacatgctctacaccgtcttctcaaccccacgtaattattctacccctaccgcgatcgctctgtgctcctggttgagcgactgttgcgtggtcgtgtgccaccgataagagagcaggacagctacgatgtatacaagtaggcaaacagggacgagccgcgtgcaccgtgcgcttgttatctgctctcccgcctctgccgcctacctctcataaatcacctcgtctctcgcctcccatccatatccctatactaccgtactccgccctctcccgtcgaccaccaccnctacgcgcccgtgcctcgatctccggcatgcgtcaccaccgcccacactagcacgtgccctgctatctcgctgtcctattcctacctctctctacctctggtcttctgttcgttggtggagcgcctcctgctctgtcactccgcgctcgtctttacgttgctaactcgatcaattctctcttctgtctgctacccatctcntgcccctctccccgcctcccgcctcccgcatcacactctatccatatccatccggctacgtggtgatatatgctctgttcactacacaactctcctcgtactcgtatacacactctctctcgtctgcctctgtcagtgtctcactactctcttctacaattgtgtgatttcgcgtgatgtccgctcgccgatactcctctccgctgccctacacgcgtgtcgacctcagctcgctcgatctcgacatgaactcgacaacccttcactcacagaacctagtgatagataacctcatcgcaaaccgcccaaaccgcctgcgacggcgtatctccctcgtcgcgtgatgatatgtgtcatctctttngtgtgtcgttctcgatcattcgttcttagcctcgt

SEQ ID NO: 504 - DNA, 1788 bp, Glycine max
  misc_feature (1)..(1): n is a, c, g, or t
  misc_feature (89)..(89): n is a, c, g, or t
  misc_feature (129)..(129): n is a, c, g, or t
  misc_feature (186)..(186): n is a, c, g, or t
  misc_feature (194)..(194): n is a, c, g, or t
  misc_feature (466)..(466): n is a, c, g, or t
  misc_feature (548)..(548): n is a, c, g, or t
  misc_feature (595)..(595): n is a, c, g, or t
  misc_feature (732)..(732): n is a, c, g, or t
  misc_feature (885)..(885): n is a, c, g, or t
  misc_feature (967)..(967): n is a, c, g, or t
  misc_feature (1662)..(1662): n is a, c, g, or t
  Peptide Sequence Number=SeqID_8134
  Probeset Number=SeqID_10283
ncgtgtactgtgacacactcgatatgtatgatttcatctcagatcgtgggcgatcatatgtacgctggcgcgtgtgaggttatcacagncatccgtacactgcacgcgcgtgcgacacgtgcacacctntgcagcgtacatcttcatcctcatctccacgtcatccatctgcgcgagatacgatgngactcagngtgtgtcattagctagtgtcagtgctatcagacttgtacgattcaacgatctctacgacgagttagacgtcgtgtatagacgctgtcgagagtatataactgcgacagatatagttcgcgagatggcatgtatgtgacatattagtcgttacatcgccatctgcgacgcgctcgcgcatggacaagagtgactgctcgcggcagtgagacgtcgcagagacgctcgccatcatgattatatcgtatgatctgccgagatgcacgagatgtgnagagaatgagatgcagtggtaggagaggcggtgagtatagtgctatgtctcagtcaatcgtgagctatcagttcgctctgcnatacataggaccgctgctctgctgttgcgttagtctgtagtgtatantatgtgatatgtttgctgcatcgtcgtgttcaatacgtgcaggcgccgtatatgcactcgctattctatagcaataacagtccgtcgagtatcgcgtgagagagtacgtcgtgcgcagctcggatacgagcgatctnctaattctcacgctcgatcattcggcccttgtgcggaggcgtggctacaaattgtatactctaaccatctaccatgtgggtgatggcgctaggtgcgcgtctaatgttatctttcttgtcagtcagtcctgcgaagcgtcattgagtcgtagnactgtttatctctcggtggcggtgatgcaattgatcatgtgtgtgcggtactataaacggttggcatcatgagcttctgtgnggacgtgacgcccggtcggtgtggaatatgatggacaagatgctccgagcgcgctaaatatgaaacgtattataataaaatacagcaactgcgcgcgtcggcgctgcaggcgagaaacgtgtgtgtcggctcagtctgtaatacatcttctccgcgtcgtatcgctccgtggcgcctcggggcgcgtcgtgacacacacaatatacatgtgtcttcatctagcagggcgcgctcgcaaccgtagagtgatatattatatgtttacgttactactagcgcatcgcattccttgctagagcagattggtgtgcggtgtcgaggtgatgcgtgttaaggtgcaaaataaaataatatattagtgttcgtggttaactataatatatcttacactctaatatatcaaaggtcttgtaacaacgattgagcaggcgcaatacaagcctgagcgcatgtgtcatctcctactaaataaataataacgcgcgctcctctcgagagctcgtacacatatatacacaggcaaacacagagggcgcggttcgcgatataatatgcgtcgtggacgagtattatataggtgtaggtcgcgtatgtatcgtaattatatatatttctacatataataaaatatatgtcgttgtgtatattaatattttttagtttgatttgcgtgtggggagaatgattacttcacncagtcgcggctggcgtggcgtggtacagggcagcagcgacacgactggctatcggcgctggatgactgatatccacagcgaacaacataaataaaaatcacaatcagtgagtgtagtagcgtgcac

SEQ ID NO: 505 - DNA, 453 bp, Glycine max
  Peptide Sequence Number=SeqID_8215
  Probeset Number=SeqID_10284
aaccatttcaagagtttaggttaaaagcatttgtgttggagcaaatatcatcatgaagctaagaagcattcttcttattgtgtgggctttgttgctctcatcagccacacatatggggaaatccgtttttgcccaaaagaaatgacgttggatgggtcatgtccacttgggacttcaggacaaagctgctttcttgaattccttgatagattgggagcaagtgccatgcctatgaattgctcttgtaaagatgatcgtaccaagaataaacgcctatgcacttgtaatgttgtgtgtagaacatgagacaattttgcagcagtccaaattaatcataaaataaaaaatgtgtactgatcttgtatttacacatgttgagaattttgaaaagccatgatcacctactgttcgatccagttattatagttaatgatattttcaatttgktgcccg

SEQ ID NO: 506 - DNA, 1621 bp, Glycine max
  misc_feature (95)..(96): n is a, c, g, or t
  misc_feature (162)..(162): n is a, c, g, or t
  misc_feature (221)..(221): n is a, c, g, or t
  misc_feature (340)..(340): n is a, c, g, or t
  misc_feature (386)..(386): n is a, c, g, or t
  misc_feature (477)..(477): n is a, c, g, or t
  misc_feature (495)..(495): n is a, c, g, or t
  misc_feature (526)..(526): n is a, c, g, or t
  misc_feature (570)..(570): n is a, c, g, or t
  misc_feature (575)..(575): n is a, c, g, or t
  misc_feature (640)..(640): n is a, c, g, or t
  misc_feature (906)..(906): n is a, c, g, or t
  misc_feature (971)..(971): n is a, c, g, or t
  misc_feature (999)..(999): n is a, c, g, or t
  misc_feature (1006)..(1007): n is a, c, g, or t
  misc_feature (1014)..(1014): n is a, c, g, or t
  misc_feature (1016)..(1016): n is a, c, g, or t
  misc_feature (1020)..(1020): n is a, c, g, or t
  misc_feature (1029)..(1029): n is a, c, g, or t
  misc_feature (1038)..(1038): n is a, c, g, or t
  misc_feature (1067)..(1067): n is a, c, g, or t
  misc_feature (1087)..(1087): n is a, c, g, or t
  misc_feature (1102)..(1102): n is a, c, g, or t
  misc_feature (1136)..(1136): n is a, c, g, or t
  misc_feature (1181)..(1181): n is a, c, g, or t
  misc_feature (1224)..(1224): n is a, c, g, or t
  misc_feature (1227)..(1227): n is a, c, g, or t
  misc_feature (1236)..(1236): n is a, c, g, or t
  misc_feature (1330)..(1330): n is a, c, g, or t
  misc_feature (1337)..(1337): n is a, c, g, or t
  misc_feature (1358)..(1358): n is a, c, g, or t
  misc_feature (1368)..(1368): n is a, c, g, or t
  misc_feature (1394)..(1394): n is a, c, g, or t
  misc_feature (1417)..(1417): n is a, c, g, or t
  misc_feature (1419)..(1419): n is a, c, g, or t
  misc_feature (1431)..(1431): n is a, c, g, or t
  misc_feature (1508)..(1508): n is a, c, g, or t
  misc_feature (1510)..(1510): n is a, c, g, or t
  misc_feature (1536)..(1536): n is a, c, g, or t
  misc_feature (1538)..(1538): n is a, c, g, or t
  misc_feature (1597)..(1597): n is a, c, g, or t
  Peptide Sequence Number=SeqID_8216
  Probeset Number=SeqID_10285
atggtaaacacacaccacggacagacgcgcgcgcgacgccgcgaaccaaaagaacccgcgtgctgcgtcgctactcgctgcgtgcgtgtggtganntgcgaaaacaacctgtgtgacgctcggcgattccctcgcttagcgctgcagtcacgcctggtgaanagtgagacacgagcctgactatgcgcagactcactgccgcagtacaactctgcacgctntgccttcgccttttctgtgtcttcgcctttttctagacacacctggctgatctcgtgttcctgtgtgtgatttgacgtgatggagtgctgatgccggaaatggcgtcggagtcgactgnatcgtcatacctgccgccggcgcgttggcgcagaggactgtgtggnccgcaatgcacctcactacactctcaccacacacacgatgtgtcccacacaatcacacgagctctcgcgccccgtcctgtttcgtctgctntgcgtgtcgtgtgtgtgnctcagccatgacacggcgacattcaatgcgnatatctgcactatcgcgtcgcgcgtcgcgctccaccatactaantatanccactgatgatataatatatactccactgcgttaagtcttaagcgagagatcgtgtcttggtctntatatgctcacacactctgtcttctatacataacctatatccgaacacacactgcgtgcggtccgcatcgcgagcacatacacaccacacaccgcgtccgcggtgcggtggaccacaccacacgtggtctctaccccatgacatctactcatcaaactatacatgtgggaagtatgcgtcgctcgacttacaattctaggtgttatgtctgtcatctattttgttgttgcttgatgtagaagtatatataataacaccgaaaagangaccacaacaaaataaaacaacgctctaataagtatattgaatattacgttcattgtgcttgatnattgtaataaaaaataacgccaccgcgngtggtanntccgganangacncgcacgtgncgatgaagngtgctgatcgtgtctgtagttattggttnatttagtgtgtcaacaacanaatgtatgcgcgatngagtttttatgactatggaactgaatacgctccngtctaccctctacaatcatggtgagtcgtccactcaccctcgccntatcacgtcactacctcacagatcgtaccacgcttcacctcgnccncatcactanctacgccctcacgtcatatgatatttgcctgctctcgtgcaccgcggccgcctctcccacacaactgtcgtctcaatctctatatctctctgtnctcctantacgttgcaccgcgtcgctgnagacgtctgntcgctccgtcacgcgtatacttgcanctacactcatgcactattgccancntcattcgcacanatatcgagtgcacgcctctgtcgctacagatacagctcttcaatcgtacacgcgcctaccgccacgtatgtagtacntnctcccgtcccactactcgacatctcncngaactcgcgatctacgatatccgcactattctcttcctcgattaacgcgcgcatcgctntcacacattcatacttccagcact

SEQ ID NO: 507 - DNA, 1645 bp, Glycine max
  misc_feature (74)..(74): n is a, c, g, or t
  misc_feature (192)..(192): n is a, c, g, or t
  misc_feature (617)..(617): n is a, c, g, or t
  misc_feature (702)..(702): n is a, c, g, or t
  misc_feature (742)..(742): n is a, c, g, or t
  misc_feature (1011)..(1011): n is a, c, g, or t
  misc_feature (1200)..(1200): n is a, c, g, or t
  misc_feature (1330)..(1330): n is a, c, g, or t
  misc_feature (1342)..(1342): n is a, c, g, or t
  misc_feature (1437)..(1437): n is a, c, g, or t
  misc_feature (1446)..(1446): n is a, c, g, or t
  misc_feature (1496)..(1496): n is a, c, g, or t
  misc_feature (1500)..(1502): n is a, c, g, or t
  misc_feature (1536)..(1536): n is a, c, g, or t
  misc_feature (1538)..(1540): n is a, c, g, or t
  misc_feature (1561)..(1561): n is a, c, g, or t
  misc_feature (1568)..(1569): n is a, c, g, or t
  misc_feature (1573)..(1577): n is a, c, g, or t
  misc_feature (1592)..(1593): n is a, c, g, or t
  misc_feature (1605)..(1606): n is a, c, g, or t
  misc_feature (1610)..(1610): n is a, c, g, or t
  misc_feature (1613)..(1619): n is a, c, g, or t
  misc_feature (1622)..(1622): n is a, c, g, or t
  Probeset Number=SeqID_10286
acaggatgtgtaggttttagtgctagcaccggcacaccctactgccgacttagagaggctgaaggcagcacgtncgcacagatctcctcggtgagagtgtataataggcgcttagtcgagattaactatatgcaaggagttgtatatatataagtgtagttagatacctgacacgtacgatcaatggcgtgngcaccacagagtgtatgcgagatagggtgcatggacacgagtcgtatcacacgggactcagtgtaatgagaaggatgacaaatatctatgtaatcaatcacatgatagtgttgtttagtgcagatgtcaagagcaatcatatccgagcacacaggcaatgtaatagagatacgtgatatgtgaagagttgatggcgagagtgatggacacacgaagttgagatgagtagtgagacaatgataagattataagacattgtacagtggtcaaataccagtgagcagtgacaaagtagaaagtaatgagaggggcagtcgcgacggacgcgtgcgagtgatatgtcatagcgcagtgatcggcgcaagcaaagcataagagatggcaacacataagtgagaagtcaaaggatagtgacacagtgatgntagggagagactatgagacgtacaatagcgctcaacatggtcataccacggagaggcaatagcagtgacaagggcggtgtacttntgtaggtgatgtaataaatatcatcacacaaggatacganccgtgaacagtcaggcgtcggacacgaccaacgcctctgcagcgccgagatactgatgagagacgagaaagcaacgaaaaatcaatgaaaaggaatataacatatatggattagtctctttatgttactgtatattctatagtatacaatttcacaacatcttcaatgcagtgtgacagcaacaaagttgatatctcactctctacaaaagtcatgatatagaacacgtatgtatggtgatggcgcggtcaggcaattaggatatatanatgtaatggtttacacaatatataaccatgaacggctagtttagtctgtaattttttgcatcatcctaaatatggtaagatgatgttggcgtaagatcgcctactatctcgagtctctagcggggtacgcacacacgtgctgatgtgacatagcgatcgggttcttcacacaacaatccctagctcggncgtgtccatgtctcaactcaaatacaatatatttattcaattgtaagaacaccactcggcgcatgcaatattaatcaccgataaaagtaccgtagataaatctcatccaaaaaaatagatgcgggatgtnagcgcgcgctantcgcgagcataaaactatattcatctacacaatactacagagtgtgcacccaacctacaccacaaacagcctctctatgtgaagaacagcacaantagcaaganaaatcaaaagaagagcacgaagaaagcatcaaacaaacactcacgtagantaannncaggacacccttatcgccacccccacactacctncnnncaagcgcgccccaggtgcccnacagaanngatnnnnncacccccctcctccnnggcgggcggcannaaangannnnnnnaanaccccacacacacacccacccac

SEQ ID NO: 508 - DNA, 1077 bp, Glycine max
  Peptide Sequence Number=SeqID_8217
  Probeset Number=SeqID_10287
cctttttagggttcatctgtgccatgatgcaatgccgaccaccctctattcgaagctgccgcctctaattaatcgtttgacattcttgctactggttctcacaatctaacaccattacataatccagtgcatccaatcgtcgtgattaagcctctcaagtcgtcaccgtagagtatcgcgttttttcgagcgggaagagagctttgcggcgtagtttgtcaaacacttcatcgtcactgagaaggaatatgacagaggagagagatgaaaaggccgatgattgcttttctgatgatcgtaaaagatgcgcttggatcgctccgaaatctgaccaatcttgcattgctttccataatgaagagtggggagttcctgtccatgatgacaattattaagcctccctgttgttctcccggaactatcctggaaatacattcgtttcaaaaggcaatcattcaggaaatttttcaaggagtttgattcaattcctacatctgaactaacaaacaaaaaaagagaacaccccctcagacgttgctaccacccccattactatccatgatccaaggcttaatggtttaaacacagttatagagttgcatattcccatcattttggcttcccacaggagaatctatttgattaatacagagttagccagaagactttgaacgcacatgaggcagaagcagctgcagaacagacagtttcaaaggtagaagctgccatgacagcggctgaagaagctgcaaaggaagcagatgcagcagaagctgctcgagcttatgccgaagaagcttcaaagacactgaaaggaaaaaaacatctgcaaagtgatggtttgtacgtgaggtgacatagaagaataagaagctaaatgtgttacaggtgatgagagagagagaagcgcagaagtagtgtttgttgttgaagattttcgacttagaaactctttttagttatttcgtgacaaaaaaaattctttttagttgtaaagcagtaaatctcagatgctaaagccattgtattattgttcacactttactctacggccaaaataagataaaaactgaaaac

SEQ ID NO: 509 - DNA, 1422 bp, Glycine max
  misc_feature (1)..(1): n is a, c, g, or t
  misc_feature (8)..(8): n is a, c, g, or t
  misc_feature (36)..(36): n is a, c, g, or t
  misc_feature (90)..(90): n is a, c, g, or t
  misc_feature (99)..(99): n is a, c, g, or t
  misc_feature (106)..(106): n is a, c, g, or t
  misc_feature (108)..(108): n is a, c, g, or t
  misc_feature (156)..(156): n is a, c, g, or t
  misc_feature (204)..(204): n is a, c, g, or t
  misc_feature (250)..(250): n is a, c, g, or t
  misc_feature (252)..(252): n is a, c, g, or t
  misc_feature (286)..(286): n is a, c, g, or t
  misc_feature (290)..(290): n is a, c, g, or t
  misc_feature (388)..(388): n is a, c, g, or t
  misc_feature (392)..(392): n is a, c, g, or t
  misc_feature (394)..(394): n is a, c, g, or t
  misc_feature (439)..(440): n is a, c, g, or t
  misc_feature (492)..(492): n is a, c, g, or t
  misc_feature (494)..(494): n is a, c, g, or t
  misc_feature (511)..(511): n is a, c, g, or t
  misc_feature (521)..(521): n is a, c, g, or t
  misc_feature (550)..(550): n is a, c, g, or t
  misc_feature (554)..(554): n is a, c, g, or t
  misc_feature (556)..(556): n is a, c, g, or t
  misc_feature (594)..(594): n is a, c, g, or t
  misc_feature (596)..(596): n is a, c, g, or t
  misc_feature (599)..(599): n is a, c, g, or t
  misc_feature (645)..(646): n is a, c, g, or t
  misc_feature (649)..(649): n is a, c, g, or t
  misc_feature (651)..(652): n is a, c, g, or t
  misc_feature (658)..(658): n is a, c, g, or t
  misc_feature (663)..(663): n is a, c, g, or t
  misc_feature (702)..(702): n is a, c, g, or t
  misc_feature (722)..(722): n is a, c, g, or t
  misc_feature (777)..(777): n is a, c, g, or t
  misc_feature (820)..(820): n is a, c, g, or t
  misc_feature (835)..(835): n is a, c, g, or t
  misc_feature (843)..(843): n is a, c, g, or t
  misc_feature (848)..(848): n is a, c, g, or t
  misc_feature (881)..(881): n is a, c, g, or t
  misc_feature (885)..(885): n is a, c, g, or t
  misc_feature (897)..(897): n is a, c, g, or t
  misc_feature (920)..(920): n is a, c, g, or t
  misc_feature (922)..(922): n is a, c, g, or t
  misc_feature (927)..(927): n is a, c, g, or t
  misc_feature (934)..(934): n is a, c, g, or t
  misc_feature (948)..(948): n is a, c, g, or t
  misc_feature (961)..(961): n is a, c, g, or t
  misc_feature (963)..(963): n is a, c, g, or t
  misc_feature (1004)..(1004): n is a, c, g, or t
  misc_feature (1018)..(1018): n is a, c, g, or t
  misc_feature (1101)..(1101): n is a, c, g, or t
  misc_feature (1113)..(1113): n is a, c, g, or t
  misc_feature (1157)..(1157): n is a, c, g, or t
  misc_feature (1329)..(1330): n is a, c, g, or t
  misc_feature (1342)..(1342): n is a, c, g, or t
  misc_feature (1348)..(1349): n is a, c, g, or t
  misc_feature (1377)..(1377): n is a, c, g, or t
  misc_feature (1391)..(1391): n is a, c, g, or t
  misc_feature (1395)..(1395): n is a, c, g, or t
  misc_feature (1397)..(1398): n is a, c, g, or t
  Peptide Sequence Number=SeqID_8218
  Probeset Number=SeqID_10288
ngtcgagnacgcgacgtagagacgcgcgtcagcctntaccgctagtcgagcttaggagatgatcgcctctcaatcgcacatagaatactntccgaacgngacggcntntcgcgttactgatctccttcagagttcgattacgataagtcgactatntcttatatgctgtgcggggcctcgatccccagaacacgctatgtgctnacccaagcataacatgagctcattctctcacctgagttatcggcantngcgcatagaatagtagctgtcccgactccgtcgncccngagtgagccattgcctctagaggaagatctcgataatccctcagggtcctacaacaataggtatcgtttagtagatggagttctaggcctggagcgtngctngncagaggggagatagctctccacttgtccatattagaagagatcgnncttataagtcgtttgttgttgggctgtttcgtctgcgatctttgtgttgttngnggggcttagggtgctcnggaggagagnggcgcagtgggacgatgagtcttcgtgtntttnantttattctatccctaccacaagaggggtatatatctcnantanctatgtttacgatatttaaacagatactacatatatgtattttttnntantnntttttnatttntttgtggccttactttctttatttttatatataaatctnctcactctatgctatacccnacacagtcggatgctcgtgtgtccgcgagtctgctagcataaatatgactcactngcacgaagactcccctaaccctcctggctcaagtacgcgatgngggtagagaccgagnggactacnatctntcgctgactagctctcgctgtctataggacganaganttgtcgttctangcgcgctgccctagttaaacgtntntatancattagnagaggtacgcctantgatgagcgactncntcgactctactatgcactgccttcgtgatagcgccgattcntgctatgagtgtgnggatgcgatctatgcgcgctcgatacataatctactctactttcgggatacgcaatcactcctatgtacctctggcgctatangctgcttggtanatatgatagagtagggatgttgcaggtaggcaggatatatctcngctgccaggcatatggtttggcaatatacacgtatatatgatggccattaatatcccgcgactccgcgacacacgccgactgaggcggaggagaggcggctgcccattagcgctatgactagatctagagagtgcggagggcgcctctacagctcaccctctatgtccgaanncaccccatctancttttnntcccgccgtgtgtggaggaagagagggnaccgcggcgctcgnccgngnncggaagaggagcgcccgaccacac

SEQ ID NO: 510 - DNA, 1414 bp, Glycine max
  misc_feature (17)..(17): n is a, c, g, or t
  misc_feature (19)..(19): n is a, c, g, or t
  misc_feature (21)..(22): n is a, c, g, or t
  misc_feature (24)..(25): n is a, c, g, or t
  misc_feature (28)..(29): n is a, c, g, or t
  misc_feature (31)..(32): n is a, c, g, or t
  misc_feature (38)..(38): n is a, c, g, or t
  misc_feature (44)..(44): n is a, c, g, or t
  misc_feature (71)..(71): n is a, c, g, or t
  misc_feature (82)..(82): n is a, c, g, or t
  misc_feature (84)..(84): n is a, c, g, or t
  misc_feature (284)..(284): n is a, c, g, or t
  misc_feature (350)..(350): n is a, c, g, or t
  misc_feature (446)..(446): n is a, c, g, or t
  misc_feature (1151)..(1151): n is a, c, g, or t
  misc_feature (1187)..(1187): n is a, c, g, or t
  misc_feature (1192)..(1192): n is a, c, g, or t
  misc_feature (1228)..(1228): n is a, c, g, or t
  misc_feature (1240)..(1241): n is a, c, g, or t
  misc_feature (1248)..(1248): n is a, c, g, or t
  misc_feature (1321)..(1321): n is a, c, g, or t
  misc_feature (1327)..(1327): n is a, c, g, or t
  misc_feature (1368)..(1368): n is a, c, g, or t
  misc_feature (1414)..(1414): n is a, c, g, or t
  Probeset Number=SeqID_10289
atttgtgtccctccccncntnntnnaanntnnttctgnctatangtctgtctatgtatgcttctcaattanataattatatncncctactcgcaggccctcgcacacccccgcacgtctcgcgcgcgctcctcttatcaatatatgtagaagattccaccccgccgagcctgacagtgctaatctaccagactgttgaagctcatactactatcatcataatactcccatacaccacacacaacaataaataaatatcgcactctcactatagttagtgtaaangaaagggatctcgtcgtatccagagtctcctcgtacagacttcttcctacgttatctcatctcacngttgccgcatcgcgctgcactcgaccaccccacgccacactccaccaataggtatcgcagatagcaaaatcaagacgtatatattaccgcactganttacttatgttaccgcttctcgctcgttatgtcacgtctcagcaaacgcaattagtaataaatatgcagacctaacatcacaacgacatcgcaaccttctaaccaacgccccactaaacagacgtatgcacacattataattatctatctctttaccaattactcgggagtgatgcacctatacatccctgtaccgtacctctctctacgcgatcctgctacaggtctctcttgtcgctcgtcacacatcgttctcgccctatcgttcttttcctcgcggactgtatcactcgtccgcaccgtctccccatagtatcaatagacaacacttgtacactacaccccactcgtagttacgcattacaacaacacctccgcatctaagatcgggaaacatctcaacacaccaccacggactgaaactctcacatcacgagtaacatcactaacacctcttatacataacatacagtgaccgcaaacactaacacctcgtctgctcaaccttccacaccactctccgctcactcctctctactcctagtcgatccctctctggttcactcacatctcctctcacgcccacacctcccacaccatcaccacctacacacacgctacatcaacctcacgccgcgccacttccttccctatctccacatctcaccacactcacactcacgccgaataatcacaactagcatncgacgctacgtatactctctctatacaatgaatacnactancacaacgcactactcgcgcacgccaacatgtccccnctacgcccgcannatctctntctcatacttctcggttattacgctctctctctacttcacactgcgcacagatttcatagcgactcgtcgccnccatcncactctcgacactcgacagcggacaaagaatacactattcnacgcgccactctatcatcgactcattcgactctatcaatatatatn

SEQ ID NO: 511 - DNA, 558 bp, Glycine max
  Peptide Sequence Number=SeqID_8219
  Probeset Number=SeqID_10290
cactcaacaacctaattaaaaagcaatagtgaagtatattaaacatattcctgttgagacgcataacaagctattagcaaccaaaatacctgaattttggcaccagaaaaaaccaaactaccttaaccaatggccctggttggatggaatattccaccaagcccatataaaatcctccgatttatcctggaacccaattttttacttttaagatggaaaaggccgaggtcggacctaaaggctttaaagggcaagcaaacagaacatgaatcgatggacgaggaccttcgaagatgtataaaaaattttttcctccagaaaaaaaaaggggggggccgcccagctacggtgtaggggcgtcgaccggagccgctgccggggggctcgaggaggatgttataaccaatggggccggggaccatgaagtaggggcggggaagaaggcggaagccggcccccgggtaggggagggcgcagcaggggagcttgaggcgcaggcgaggagggaggtaggggtagagagaagagcagtgagtttattatgtgtgtgaattggtg

SEQ ID NO: 512 - DNA, 526 bp, Glycine max
  Probeset Number=SeqID_10291
cccgcgtccgaatagctttctactacagcatagaatttgaccgccgtcaaaatgaaacgagaacggtgattcgtagcatgatatctattggtaaaggcgtaaagaccatgcttggcaccacttaatgtatccgaggagtctagatcctgggcgcgactactactgccacggtacccacacgtccagcaccgtcgctggatcagttgtttccggcgcgagcctccttggttacacctccggaacagcgcgtgggatggtcacgcgcgctagagttgctgcatacaaggtatgctggaaaggagggtgtttcagctctgacattcttgccgcacttgaaagggcaatattggacaacgagaatgttctttctttatctctcggggggggcatttctgattattacagagacagtgtcgctattggagctttttcagcgatggagaaagggattttggtttcatgctccggtgggaactggggtccgggtccctacagtctctccaatgtgggtccatggatcactacc

SEQ ID NO: 513 - DNA, 1532 bp, Glycine max
  misc_feature (117)..(117): n is a, c, g, or t
  misc_feature (310)..(310): n is a, c, g, or t
  misc_feature (317)..(317): n is a, c, g, or t
  misc_feature (501)..(501): n is a, c, g, or t
  misc_feature (570)..(570): n is a, c, g, or t
  misc_feature (1469)..(1472): n is a, c, g, or t
  misc_feature (1474)..(1474): n is a, c, g, or t
  misc_feature (1480)..(1480): n is a, c, g, or t
  misc_feature (1482)..(1483): n is a, c, g, or t
  Peptide Sequence Number=SeqID_8220
  Probeset Number=SeqID_10292
atacagtacgggaactagagcgacactagcattcctgatccgagcgatccatcagcgcacagcgggaaatgtagatgcagtatcactcgatgacatgaatcaacagtccatcgtaanacgagtatatcatagctagtgctccatagtacattccatcgaatgatgaggatgcgctatcatcctactcacaatcagcacgctgcagcgtacatgacaggtatccagcaacatccagaaacatgtcgttagggcgcgtccaccacgtatcactagacataatatcacagtcacgcgtgtgatcggccctcantccaccncgcgcggcaatcggctgcgacccacacgaacaccgcctacctatgcagtgctcgtatccactctccacgcggctacgtcgtcgtcattacctgttagcaattcgggtactgcaggcacctcagcgcgtctcacaccacgcgtagcatggccacacgaaattcatgcacacacctgatgcatcancgaatacgacctgtatcgcacgattatctgtgaattccattggctaagtcccgcggtgtatagacttcnacgtgtagttccgacactaaagcagcgagacttaataaacgggatgactggatttcgcacataagcgattataatccctaaataacacggcccatgacacacctctcctcagatcactgccgcgtactccaaaaacccaatttcagtcgtcgcacatcacgcgtatataaatacataacagacgtaaagacatctacgtactcttgaatcggtagccctttattgaactctagccctcacagccataccgtgtaacatgaaggccgtcctactaacgccagaacttatggtgctcccacacgcactacaatcttggatggcacagacgcgcaacacaagtatgttcaacgctattgtgtacagatctcgacgccaccaggagtagtcgacgacctcctccaagcggaccagcttccaccgttcatccagaggcagactagctcagcgtgggccagcgcagaaactaatgaatgcccgccgacgagatcggcagagcactcccccccagtcgctaaacacgcctaatatctcatcacatagccactctggcacgctaactaagaaaatatatagagcgattctgctcgcagtaccatatctaacaaataagagataagttgcatccacatatgaccactcaactcgtaaacataattaacccacggagcgagacctaccaggccaacagcagctcagcagactactcagaccgagcatcgttcggggcgacgcgcactaacatctcctaatcttctatcttctctcgcatgaaaggaatcttcttaggaatacatcctcctccttaggggagaatcccctccacccctcgggagaatcccacatattattatagaaggcgggccgtcgtaattaaaggagtcagctaacaagttattgcnnnncncgcccncnnttttatatatatagcagaagggccaccggacaacaagagttaataataa

SEQ ID NO: 514 - DNA, 1402 bp, Glycine max
  misc_feature (23)..(25): n is a, c, g, or t
  misc_feature (27)..(31): n is a, c, g, or t
  misc_feature (33)..(35): n is a, c, g, or t
  misc_feature (76)..(76): n is a, c, g, or t
  misc_feature (91)..(91): n is a, c, g, or t
  misc_feature (135)..(135): n is a, c, g, or t
  misc_feature (255)..(255): n is a, c, g, or t
  misc_feature (403)..(403): n is a, c, g, or t
  misc_feature (414)..(414): n is a, c, g, or t
  misc_feature (418)..(418): n is a, c, g, or t
  misc_feature (434)..(434): n is a, c, g, or t
  misc_feature (453)..(453): n is a, c, g, or t
  misc_feature (464)..(464): n is a, c, g, or t
  misc_feature (466)..(466): n is a, c, g, or t
  misc_feature (594)..(594): n is a, c, g, or t
  misc_feature (762)..(762): n is a, c, g, or t
  misc_feature (847)..(847): n is a, c, g, or t
  misc_feature (1122)..(1122): n is a, c, g, or t
  misc_feature (1195)..(1195): n is a, c, g, or t
  misc_feature (1239)..(1239): n is a, c, g, or t
  misc_feature (1275)..(1275): n is a, c, g, or t
  misc_feature (1292)..(1292): n is a, c, g, or t
  misc_feature (1363)..(1363): n is a, c, g, or t
  misc_feature (1392)..(1392): n is a, c, g, or t
  misc_feature (1402)..(1402): n is a, c, g, or t
  Probeset Number=SeqID_10293
tgttgtgggtttttgtgtggtgnnntnnnnntnnnttttgttctgatgtcgtggttgttgtctgttatttaatgtntctttgtgtcgcaanccacacccgaaaatggagagtaaccgggagtcacaacaaccatncagtagatcaagacataacgatcagcgacccccaaccccccctccccccatcatcaacatcatcactaacaacactcgggtttagttgtcgtatgtgtctgttgctggagttgtcgaatntagaatagaatgtatggagagagcgtcatacatagtcatagaattattatctactactagcatatagtattgtatactactatcgtagtctgacatcagttgggctagctgtagagggagatacatcaacgatagagagatgtactcnactcgaccacnaaanctgcgatgcgtctctntcgagcaccacatcgctcntcacgcacacnantccacgactcagacggccgcctcaatttgacctctttcctcgactacctatatatccaagatatgacacttacggtcgcgacgcacgcgtcgctcctctctgctccgttctctcgacagagcgagcancgatatcctccgtatactatgataaatatataacaattgtcaccgaatatctcgagcggcagattgtcaaccatacccccttgtatgtatctggcgttattatcagggttatctgtagtcgcaacctccatgacacaacaatgttaccaatacacgaaatacgtatanttgagaataagagtatgctagatacgggcactagcactaaacatgtataaagaaaacggtcgactcgagacaagagtgacataanaaatcccttctgcgcgacctccctacggtaagtcgaaatttgagagcacataatctgcactggacgaaatacgacgcagcacctccaacacatatacctctaaactgctggctctatgtatatcttcgactcagctcggccaatccacgacaaatgatcagtagattatcatcagagagagacaatacaggagtgcagtaccaccttcgcaccaacacactatccatgtcctctccatctcctctcaacacactagctctaactaagtcgactancaatggatcccgctacgcagacgcccatattagaactgtcgtgaatacagaagacacacgagtcgatatattntgtgatgtggtggacacttctctcatgcgcaacccacgcgaaancgaagtcctcaccacgcgccacaacctgactatatnacagcgcgcgcgcaacntccattctaacacgcgagcatatgcacgagcggcgagacacacatccttctgctcggacgcctacaataancaacgagcagtacaaatcagcgagctacngtaactacgn

SEQ ID NO: 515 - DNA, 433 bp, Glycine max
  Peptide Sequence Number=SeqID_8221
  Probeset Number=SeqID_10294
gtagtcagttctactgagtctgcgtttgcatcttctactccttccgtttgcttcttcttcttcttctagatctgatctccaatttcacccccaaggtttgaaaagtctttgtcactttattatacaaaatgggtcgtggaaacagctgtggtggaggtcaaagctcactcaactatctttttggtggaggtgatgctcctcctgctgagccaaccaacaggactgctgcacctgctccggcagctgtgactgcaacagcagctactagtactactgttgagcctgctaagatcaacaaggagatccctgctggtatcaaaactcctgtcaacaactacgcccgtgctgaaggacagaacaccggaaacttcatcactgaccgtccttccaccaaggttcatgcagctcctggaggtggatcatctcttgatta

SEQ ID NO: 516 - DNA, 1525 bp, Glycine max
  misc_feature (54)..(54): n is a, c, g, or t
  misc_feature (56)..(56): n is a, c, g, or t
  misc_feature (963)..(963): n is a, c, g, or t
  misc_feature (1388)..(1388): n is a, c, g, or t
  Peptide Sequence Number=SeqID_8222
  Probeset Number=SeqID_10295
ctcttccctccgcaaccgcatatccaccacctatacttacagatagaatattantnccaacaaaatagaatagagggaggcccccctctagaggggttttctagttgtattagcacgcgcttttatttattctttctttttctgaaagacacaaaaaatacattgatataaatgcaatcctataccacaaccatagctccttcttacccgtgcgatttcttcacccctattctagagacaccaccggccatgccccaccagttctttatcactcttgtagataggtggtatggttgaatcttactatatacattcgtttccttctgtatacggtgattagccttatgtgtactccaatatacaattgagagacgcagctacaaaaaaagtgcacgtagatataaccttcccggctctggccagaccgcgtttcacagtacgtgcgcgcgccggtaatccgacccaaacctgaggcatccactaatttataaatgctagtcgatcgatatttatttagccaaataatcatgatcattacttagttcgtatataacaatatcgataagtgtacttgaaattttagtgcactgcccggctctgcggctatgattacataaaccaacttatccccagagcggtcgtaacgctcgtacttatccatcctgattattacttgcctgtccaaagctcgcacaattcggccggaactcgaacgccgcccctcacactgaggaatattattagtgaccattggtctagtggcaacagcatgtacacggcgaggacacaccaagcggttagggcaatggttctagcaccaacattcgtttaatacttccctaccctaagcgacgatttaaaactcggtatttgtaaatcggacaccgacccagtgcacgtgattatattagatggctgctagtgataggaagttaggatagatgctttctagcgtaatccccnccagccgacatatctgattagcgatatccgcgcgattacacactcgctgtataaccaccctcggtaacaacaaccgtcgcgccgtgcctagaggtagcccctcatcacatcatgacgtctatgatcgcacctcacccaatgtcgcctctgtcgctcactgctgacatccgtatctctctaattaacgtcgtatttgtcgtatataggaagagtgtgttattgtaagatatgatgcgtatactacactctcacgcgagtgcgtgtccttcctacgcctctattcggtacatctagtttagtaagtaactcaaacgccccctctgtgaattgtgtagtacctctcggttgctctctgcttgtagaattcggcggatacgcccatcctgccctgctatgtctaccacacatatccgactgtgtaaaanatagtcttatactccataatatatgtgcagatgcttctacgagagagccccgcacagctagctctgcctattgtgacgccactcgacgatattgcgttacatgtcatagcctccattcagactgatccgcgactcgg

SEQ ID NO: 517 - DNA, 629 bp, Glycine max
  Peptide Sequence Number=SeqID_8308
  Probeset Number=SeqID_10296
aatctataacttaaaaggcagataactgttctaacctcaataaaactaaaataataaaacattcgctacatcccaatgtcatatcccaagaagcaccccgtcaacgtcaaccctaaagccaaggcctctcaaccccaacccaccaattctagactcactgaagaaaagagagaaaagctcctcgctattcaagaaagagagcaactcaagggtctcttagttaacaaattcctcgaaaaatacggtaaggaaaagaaagctaatcaagactacgttaacaaacaagttaatgagttcatgaagaacgaaaagcttactgaggaaaacctcaaaaagcttgaacaaaagattaaagatggtactggtgctaaaggtccagtctctcaaaaggctgatgataccaagagtcaaatctctactcatagcaagcaacaaaatgaatccaatatacatcaagtaggccaaggccaatatgctcatcatcatgaacatgatgatgcagtttccgttacttcatccactaagccaaaatctgtgtatgctcagggtgattctgacratgaatgggctactatgttgaagtatgacaccgaactctacaagaaggaaaagactttagagaaggttag

SEQ ID NO: 518 - DNA, 515 bp, Glycine max
  misc_feature (342)..(342): n is a, c, g, or t
  misc_feature (378)..(378): n is a, c, g, or t
  misc_feature (389)..(389): n is a, c, g, or t
  misc_feature (429)..(429): n is a, c, g, or t
  Peptide Sequence Number=SeqID_8309
  Probeset Number=SeqID_10297
tttttgggaaaaaaaagagacccccgcggggggcatttttttttgcacccaaactctgtttgggcctcttcacttttttcgggtgtttggagaaaaaaaattttttcgccccatttttgtccagcggcccaacctttttaatttttttggaaaaccccggttttcccttttttcacaagaagttcccttttggaaattatgggggcccaatacaaatagtctttttttaaaaattaaaacccccttttggttggatttgttttgaaaatggaaatatcccccaagtcaaagtttgattaaaaacccaagaggatatttgttggcgtttgtttggtggtgaanttaaagacccatcggcgggcgccacgacagttgtgnttatgtaccgnttttcggcggcggagacgacgtgatgagagggggagaagnccgtgatgtacgccgcgatgggtggcgccattgccggtgatgtggtggcgagatgtgttacagtgaatttgtaaattgcgtggtta

SEQ ID NO: 519 - DNA, 1575 bp, Glycine max
  misc_feature (19)..(20): n is a, c, g, or t
  misc_feature (25)..(25): n is a, c, g, or t
  misc_feature (72)..(72): n is a, c, g, or t
  misc_feature (74)..(75): n is a, c, g, or t
  misc_feature (145)..(145): n is a, c, g, or t
  misc_feature (169)..(169): n is a, c, g, or t
  misc_feature (429)..(429): n is a, c, g, or t
  misc_feature (487)..(487): n is a, c, g, or t
  misc_feature (555)..(555): n is a, c, g, or t
  misc_feature (623)..(623): n is a, c, g, or t
  misc_feature (735)..(735): n is a, c, g, or t
  misc_feature (837)..(837): n is a, c, g, or t
  misc_feature (850)..(850): n is a, c, g, or t
  misc_feature (852)..(852): n is a, c, g, or t
  misc_feature (886)..(886): n is a, c, g, or t
  misc_feature (902)..(902): n is a, c, g, or t
  misc_feature (920)..(920): n is a, c, g, or t
  misc_feature (973)..(973): n is a, c, g, or t
  misc_feature (1221)..(1221): n is a, c, g, or t
  misc_feature (1267)..(1267): n is a, c, g, or t
  misc_feature (1340)..(1340): n is a, c, g, or t
  misc_feature (1342)..(1342): n is a, c, g, or t
  misc_feature (1362)..(1362): n is a, c, g, or t
  misc_feature (1364)..(1364): n is a, c, g, or t
  misc_feature (1376)..(1376): n is a, c, g, or t
  misc_feature (1378)..(1378): n is a, c, g, or t
  misc_feature (1395)..(1395): n is a, c, g, or t
  misc_feature (1405)..(1405): n is a, c, g, or t
  misc_feature (1410)..(1410): n is a, c, g, or t
  misc_feature (1436)..(1436): n is a, c, g, or t
  misc_feature (1439)..(1439): n is a, c, g, or t
  misc_feature (1442)..(1442): n is a, c, g, or t
  misc_feature (1495)..(1495): n is a, c, g, or t
  misc_feature (1500)..(1500): n is a, c, g, or t
  misc_feature (1507)..(1507): n is a, c, g, or t
  misc_feature (1526)..(1526): n is a, c, g, or t
  misc_feature (1557)..(1557): n is a, c, g, or t
  misc_feature (1572)..(1572): n is a, c, g, or t
  misc_feature (1574)..(1575): n is a, c, g, or t
  Probeset Number=SeqID_10298
gtgggtgtgtcgcccgggnnggggnggggggggtggtgtttgcgcggcaacaccaccccacacctctaaaanannacaaaaaaagaagttgaaagatctactctgctcctcgattggcggcggaccctgtccccccaccgtggtnccccctcccaccgagtgatgccgntctgggctgtgcttttgtggtgtacccccccgtttctgtttctcgttcctccaccacagtttgaccgagcgaccacacccacctcaacgctcatttaacttgttgctgtttctcatattttttattctatgagagcgtctgttgtttatgggacgtagacagaaaagtcgcgaagaatagtagcgaccttgtgtttctgttctttctttcatcgtgcgttcctctgttgtctctactcctgtggcgaacacggatggcgncggcgtgcgtgggtgtggctcttgctcgtttctctctgatgttttgttgtcgcccacnaaaaaacatcgctgcaacgcgccacaatagcacccatcacccctccacacgccacaccaccccacaanaaataagaatcacttctctatattacatacgagtggctaaaacctcctccgcaatctcgacacaaganatgtaatgttgaacgtactccacaccccgactcgcccaaccccacctcactaatttgttccgtcgcgccatgtttatagatgtgagcgctcgtgcggtcgcgggtgctgagnaggagaaacacaaccacctactcactatatatgtaaaagtatatataattaactatatcacaatgattgaatgatgcggcacgcgccatgtctacatcctcnacaccacacaccncnctctcctgcgtctgtacaacatctcgtgtcacgntgcgcagacaccccanaccacacggcttgaccgngtacatgtagtagacgacctatgcatcaccgcgcacacaccccgacgcacccntcatctactctgtctcttaacagcgtgatgtcatcgtcttggattatgtgtcatatgtatgatagttgtatatgtctgtatcgtgttatcgtgtgatctctccgctggcgcgcgcgctgctctgtcactcgtgcttgtctctgtggtgcgcgcctctatcactctcctgtcatcattctcctcgtctcctaattacatccactccgcatcactcttcatctacgacgtgctgatgctctgtcatcagntacgtacgtgccgtacttacttcctcttaactcattgatcgtgacnatctgtatcgtatagtcgtatatccacttcgtctgtacacactgagacagcctcgattgatgtccgtcgtgangngatgcgcttgagtcacacgncnctatgctgacgngncatgttctctcgcgtcncgctatcatnaccancgtcacacataccccaggactcagtnatnctngtgatgctaccgcgtgctgtgatgacgacgcgtgtcatgcgcgcgtctggtangcganccgcgcnagactgcttacattgctangcatgatgtcgatcgtgtctgctctagctanccatcatgctctctncnn

SEQ ID NO: 520 - DNA, 2044 bp, Glycine max
  misc_feature (29)..(29): n is a, c, g, or t
  misc_feature (80)..(80): n is a, c, g, or t
  misc_feature (85)..(85): n is a, c, g, or t
  misc_feature (89)..(89): n is a, c, g, or t
  misc_feature (95)..(95): n is a, c, g, or t
  misc_feature (112)..(112): n is a, c, g, or t
  misc_feature (139)..(139): n is a, c, g, or t
  misc_feature (179)..(179): n is a, c, g, or t
  misc_feature (238)..(238): n is a, c, g, or t
  misc_feature (287)..(287): n is a, c, g, or t
  misc_feature (299)..(299): n is a, c, g, or t
  misc_feature (324)..(324): n is a, c, g, or t
  misc_feature (365)..(365): n is a, c, g, or t
  misc_feature (381)..(381): n is a, c, g, or t
  misc_feature (385)..(385): n is a, c, g, or t
  misc_feature (402)..(402): n is a, c, g, or t
  misc_feature (552)..(552): n is a, c, g, or t
  misc_feature (567)..(567): n is a, c, g, or t
  misc_feature (582)..(582): n is a, c, g, or t
  misc_feature (644)..(644): n is a, c, g, or t
  misc_feature (693)..(694): n is a, c, g, or t
  misc_feature (705)..(705): n is a, c, g, or t
  misc_feature (749)..(749): n is a, c, g, or t
  misc_feature (800)..(800): n is a, c, g, or t
  misc_feature (825)..(825): n is a, c, g, or t
  misc_feature (871)..(871): n is a, c, g, or t
  misc_feature (900)..(900): n is a, c, g, or t
  misc_feature (934)..(934): n is a, c, g, or t
  misc_feature (953)..(953): n is a, c, g, or t
  misc_feature (994)..(994): n is a, c, g, or t
  misc_feature (996)..(996): n is a, c, g, or t
  misc_feature (999)..(999): n is a, c, g, or t
  misc_feature (1004)..(1004): n is a, c, g, or t
  misc_feature (1010)..(1010): n is a, c, g, or t
  misc_feature (1064)..(1064): n is a, c, g, or t
  misc_feature (1125)..(1125): n is a, c, g, or t
  misc_feature (1150)..(1150): n is a, c, g, or t
  misc_feature (1163)..(1163): n is a, c, g, or t
  misc_feature (1181)..(1181): n is a, c, g, or t
  misc_feature (1259)..(1259): n is a, c, g, or t
  misc_feature (1266)..(1266): n is a, c, g, or t
  misc_feature (1270)..(1270): n is a, c, g, or t
  misc_feature (1293)..(1293): n is a, c, g, or t
  misc_feature (1359)..(1359): n is a, c, g, or t
  misc_feature (1361)..(1361): n is a, c, g, or t
  misc_feature (1363)..(1363): n is a, c, g, or t
  misc_feature (1373)..(1373): n is a, c, g, or t
  misc_feature (1390)..(1392): n is a, c, g, or t
  misc_feature (1400)..(1400): n is a, c, g, or t
  misc_feature (1407)..(1407): n is a, c, g, or t
  misc_feature (1421)..(1421): n is a, c, g, or t
  misc_feature (1423)..(1423): n is a, c, g, or t
  misc_feature (1437)..(1437): n is a, c, g, or t
  misc_feature (1440)..(1440): n is a, c, g, or t
  misc_feature (1470)..(1470): n is a, c, g, or t
  misc_feature (1478)..(1478): n is a, c, g, or t
  misc_feature (1500)..(1500): n is a, c, g, or t
  misc_feature (1505)..(1505): n is a, c, g, or t
  misc_feature (1519)..(1519): n is a, c, g, or t
  misc_feature (1535)..(1535): n is a, c, g, or t
  misc_feature (1546)..(1546): n is a, c, g, or t
  misc_feature (1548)..(1549): n is a, c, g, or t
  misc_feature (1573)..(1573): n is a, c, g, or t
  misc_feature (1586)..(1587): n is a, c, g, or t
  misc_feature (1593)..(1593): n is a, c, g, or t
  misc_feature (1597)..(1597): n is a, c, g, or t
  misc_feature (1621)..(1621): n is a, c, g, or t
  misc_feature (1623)..(1623): n is a, c, g, or t
  misc_feature (1627)..(1627): n is a, c, g, or t
  misc_feature (1629)..(1629): n is a, c, g, or t
  misc_feature (1651)..(1651): n is a, c, g, or t
  misc_feature (1753)..(1755): n is a, c, g, or t
  misc_feature (1763)..(1764): n is a, c, g, or t
  misc_feature (1778)..(1778): n is a, c, g, or t
  misc_feature (1782)..(1782): n is a, c, g, or t
  misc_feature (1784)..(1784): n is a, c, g, or t
  misc_feature (1787)..(1787): n is a, c, g, or t
  misc_feature (1794)..(1794): n is a, c, g, or t
  misc_feature (1838)..(1838): n is a, c, g, or t
  misc_feature (1847)..(1847): n is a, c, g, or t
  misc_feature (1870)..(1870): n is a, c, g, or t
  misc_feature (1882)..(1882): n is a, c, g, or t
  misc_feature (1884)..(1884): n is a, c, g, or t
  misc_feature (1886)..(1886): n is a, c, g, or t
  misc_feature (1891)..(1891): n is a, c, g, or t
  misc_feature (1896)..(1896): n is a, c, g, or t
  misc_feature (1909)..(1909): n is a, c, g, or t
  misc_feature (1921)..(1922): n is a, c, g, or t
  misc_feature (1927)..(1928): n is a, c, g, or t
  misc_feature (1931)..(1933): n is a, c, g, or t
  misc_feature (1937)..(1937): n is a, c, g, or t
  misc_feature (1945)..(1945): n is a, c, g, or t
  misc_feature (1966)..(1969): n is a, c, g, or t
  misc_feature (1979)..(1979): n is a, c, g, or t
  misc_feature (1981)..(1981): n is a, c, g, or t
  misc_feature (1985)..(1985): n is a, c, g, or t
  misc_feature (1988)..(1988): n is a, c, g, or t
  misc_feature (1992)..(1992): n is a, c, g, or t
  misc_feature (2001)..(2020): n is a, c, g, or t
  misc_feature (2022)..(2025): n is a, c, g, or t
  misc_feature (2029)..(2031): n is a, c, g, or t
  misc_feature (2043)..(2044): n is a, c, g, or t
  Peptide Sequence Number=SeqID_8310
  Probeset Number=SeqID_10299
ccgcgcagctcacacgacgcactcaccancggcaggctcgtgctgagacgtcaagcgctagcatgagcgacctgcgcgancggcnaggnagtacnagctcgcatgtcacgcnagcgtgtcggcgtcgatatctaccacntcgtagtcagcgtcactgcgacaaatggacgacgaatcancatgctatcaagcacggagctcgcactcacagcacgtcgctcagacgtcacgaatcagntgcgatcaccgcgcgagagagaggacagtagcgctagagaaattaagtnatcgcgcgtcgntaccagacagagcatcgatgcacancgacggcacacgaggaacgagcacagggctgagtgtgatanattacaatgtgatgtngcangtatagcgtagagagtngattccgtgagtctaggagccgcgaggacgtagagggcagcgagcggagaggagctggggacagcatcgcaagtgtgatcgagagacatgtcgctagcgtgcgagagcagcgatgctacagcggacgatggagcgtagcatcgcgcgagntccagtgcgccgcgncagaagagaccacantcggaacaacaagcgtgagacgctacgagctgagagacgtaaggatagagggtgaagcaganagtcgaggagtgcgcttacctactgccgcgtcacccatgcaccgacctnngcccgcaccgngcgacgacacgaacgcgcacacacatcgactgcgcgacatacancgcaccgacgcgttgcgggtgcgacgcggcgcgactgacacaacacacacncaccatcattacacacagaccgtcnagtcacggatattagagctgagtgtagggggagcgcgcggagacgngtggagcgcgcagcacagagtgatcccgntagacatctcgcatcacacatctacgaccagcgntactcctcacctctcctcncgtcacgcctctcgtgcacgttcttgcgagcgcgccgaagntngtngactngattgnttatcatcatatatatacacatacacacagctatgatgtaatttaataatatancaaccagacacagattataatatatagtaaagacacggaagcattatctacagcgcgcccncagactcactatcattatatcaccncataccgatctanccatgaaatcatatatancgccacgcgcgcgcatagtacctcattctcccgccgacaaagatcgccatgatatatatagtcatatatatatataantaaaacncacncgaatatataatatataaatcantacacaacacgcattgctcgccggcagcgacgacacacagagcttgcgacacgcacacagagtagnanangacaaagacntcagctcagcgtctcgnnncccccctnctctcgnccactctccctatnantcatgactacgtcnctnctcgcagtgctcacgagattgcactatatnaccaccgncgtcacctgcgagaaggcgctnagctnccatcgacacagcnacggcagagagcaacntggtgctcacncnnccccccgccgcactctgcggcggncgcgccgttcgtnngtcagngagngtattacactcactctgcgcccgngncgcntngtgctcctgcagacggcagcancactacaacagaaagacattaaactaacgagatacttctacataccgcgcgcacgacgatcgctcatgcgcgagcacggagcgcgaacacgatagaaagagnnnaccgccannccgcgacctctctncaancntcngcctcgnctcacacagcagccccacgacagtgtaactcggctcggcaggcncgcagtcgncctccatctcgccctcctcgtcnccccccgggcgngngncgccnccctngactatataggtngtgcggtctctnnctttnnttnnnttgntttatatnacaggaattaattataaatannnntataaaaagnangagnaanaagnaacaaacannnnnnnnnnnnnnnnnnnnannnnccannnaacccccccccnn

SEQ ID NO: 521 - DNA, 1415 bp, Glycine max
  misc_feature (1)..(1): n is a, c, g, or t
  misc_feature (35)..(35): n is a, c, g, or t
  misc_feature (305)..(305): n is a, c, g, or t
  misc_feature (478)..(478): n is a, c, g, or t
  misc_feature (1247)..(1247): n is a, c, g, or t
  misc_feature (1372)..(1372): n is a, c, g, or t
  misc_feature (1389)..(1395): n is a, c, g, or t
  misc_feature (1400)..(1404): n is a, c, g, or t
  misc_feature (1409)..(1415): n is a, c, g, or t
  Probeset Number=SeqID_10300
ntacaataggacgtgagggatcgatcaatgtatgngccgccggccccagatcagcgagtcgaatgaatttttatattacccgtgccactccctcactctacataactagtaatcactatagtagagagtatcgtaggtatcttacgtaccgtatgtgtatcgtctactggtggtggatatgtgggcactgggtgcgtgcggtgggcgtcgatggagtggagttgggtgtgtgtgtgagttgtgccgatagcgaggtattcgggtgtagttggtgaggaattgttgatagtatgcgtttatctgtngtggcacgccagcgctcgcgatagtatgctagtatgatggtcgtggagagggaggtatgatgctctgcatatttattctgtaggcgactaggtgagtaaattatatttatatagatggttgcggtgcagtagggtatgagctgtatcatcgatagatatgacgtaggtcatgngtcggttaggtttggttgttgtcgtctggttagcttgagcttggtagcgtgcggataatagtggaataggggtttgaccgtatacgatttaagtatgcgtcacgcttatgtgagttgtatctctgtaacatgcgcggcggttgttgtacgaggcggtgttgagcaattggttgtagtgtgagtatggtaatattggtgttagtggtggtggcaagtacgcagacagactacctggtcgactgaccggtgcgctctgctcgtttccgtggctcgcgacaccgcgcaagtgcacaggcgctggttttgtgcctcgcctcgacgcagtcgaggatgttgtgatacgtggataaggtgtgtgtgcgagtgaggagtaagccgaaagggagggagaggtgttagagtaacagtaattttgtattatagatgcagtcgttgtttgtagtacgatatctagcgataatccctactctcctcgctctaactcaacattaccagaatattatcacttaattaggggaagagaaatgccgcagacccgtgtcatccgcgaagcattagcaacacatcctaccgtatacgtcaactatactcatcgccactctcacaagcgggcgcctgtggtagggcgtttcgcggggttgtcagaagatgtcgcgatcggagggactacgcatatgttacacgtatttcttcccgtcacacacaatcagatggtagcactcgagattgtcacaactaccctttacctgcggtatgacaacgtcttaanaccaattggtggaacggcggagagttgggggcagggtaagggagcatcgcggcattgtaggccagatggggagacggtgcaacgtattaatatacgacgattagtgaagaagggggggatccggngggaggcgaacaaaggnnnnnnnccccnnnnnggggnnnnnnn

SEQ ID NO: 522 - DNA, 1828 bp, Glycine max
  misc_feature (1)..(1): n is a, c, g, or t
  misc_feature (56)..(56): n is a, c, g, or t
  misc_feature (139)..(139): n is a, c, g, or t
  misc_feature (182)..(182): n is a, c, g, or t
  misc_feature (213)..(213): n is a, c, g, or t
  misc_feature (239)..(239): n is a, c, g, or t
  misc_feature (248)..(248): n is a, c, g, or t
  misc_feature (250)..(250): n is a, c, g, or t
  misc_feature (388)..(388): n is a, c, g, or t
  misc_feature (399)..(399): n is a, c, g, or t
  misc_feature (428)..(428): n is a, c, g, or t
  misc_feature (592)..(592): n is a, c, g, or t
  misc_feature (594)..(594): n is a, c, g, or t
  misc_feature (700)..(700): n is a, c, g, or t
  misc_feature (726)..(726): n is a, c, g, or t
  misc_feature (739)..(739): n is a, c, g, or t
  misc_feature (930)..(930): n is a, c, g, or t
  misc_feature (1024)..(1024): n is a, c, g, or t
  misc_feature (1413)..(1413): n is a, c, g, or t
  misc_feature (1535)..(1535): n is a, c, g, or t
  misc_feature (1600)..(1600): n is a, c, g, or t
  misc_feature (1669)..(1669): n is a, c, g, or t
  misc_feature (1693)..(1693): n is a, c, g, or t
  misc_feature (1695)..(1695): n is a, c, g, or t
  misc_feature (1762)..(1765): n is a, c, g, or t
  misc_feature (1794)..(1794): n is a, c, g, or t
  Peptide Sequence Number=SeqID_8311
  Probeset Number=SeqID_10301
nacgagacatgcgtgacgagagagtgaatcagatagcagtatcatagcgagtgtcnctcatgatacagctgtacgacgtcatcggagacggtagacgcagcgtgcgtcgtcgcaaacgaaggtgtctattacatatcanatcgtatcatacagacgtcgttcacctctgctgctgtgctganagatataacatatatacatatgagcgttacntctctgtccatcgtcaagtgtaactnttcacagtngngtcgcgagatggcgtacgttgtgagatgtatatgactcgatatatatggatagcgatagagtagtatgtgataatctcatgtcagcaagtcgcgcttcagccgtgcacatagacgtagatgcgacgctggtaacgtgnagcaaactccngttgagtcatcgacgcatcacgcgctatngtcgccaggttatgtacgtagtgcgaatatagtcatcgcgcgatactcacggttgtggtgcagatcagtactaagtgcggtgatatgactcatactgagactacgtccgtcgagacgctcacacgtatccgttatgtagtgcagtcatattccatcttccacancntatacacatccatgtctggcaatcatagtctatgatctcgtgtgcacctagacagatgatgcgctgcagcacactcatatatgaggtgcgagcgtggtgcatcggngaggcgaccatcgtctcacgctcaantatgtagttgagnctcacttcggatctactgtcgtctaatccatcgcgttgtgtggcgatgcgctgtgagtcatctcgctacatgaatcgatatgtcttagttgatacgtctctcgaagagtctcatccttcgtgccgaatatctcttgcgttgtcgtctctagcattcatcttgcttgcagtgacgcaggaactcctagtagntgagttggagctcctatctagcgttgtgtatgcagtagagtgtgagtcatacgcccagatttacatatctgacggctgtatataataattaatnggtgtggggtcgtagtgcgctacgttgagccgtacgttggagatgcatcacgtacgtagtggtgacgcgggtgcacgcactaggcgggcaggatgcagtacgagtgtagaccacacgtctccgtagcgtaaatggtcacgccagagatgtgtgctgtcgacctctcatatcagtacatatagtatgaattggtgcgatgcctgcgatcttgtagatctatgttcattcttgtagtaagagtggtctgtttattgtagcactagagcagctacgtcgggaggtggtatcacgcaggagagtgaagttcagcgtgcgacgagatctagtgtcgtgctacctagttaatcgcatctaccagctcgaggaagggtattcatacgagatagccntgattgtctgtctgatatacactgtctataagatagcgcggctggacctctttctatccatatactcattgtgttcgtacactgtgctcacgcagatctgctagagatgtagatgatctagncacaatcctaagatacgataatatgcgacgcagcgctgtgtccgacaggcagcttcttcgtgagnagatagctcaccacacacttagtactctctcagtgaacctgcttctagagaatagacaatgaaagactnaggtggcgggttatgcctcgtgcntncccctcctgagcgcgcgtgctgcgcgtaagataaccgacctgtcaccctataattggcgcacccccnnnncctcgtcgcatgtctgagtgacagatagngttggtaggtagtggtgagggaggtgtgaggtgg

SEQ ID NO: 523 - DNA, 2259 bp, Glycine max
  misc_feature (1)..(1): n is a, c, g, or t
  misc_feature (49)..(49): n is a, c, g, or t
  misc_feature (93)..(93): n is a, c, g, or t
  misc_feature (98)..(98): n is a, c, g, or t
  misc_feature (130)..(130): n is a, c, g, or t
  misc_feature (133)..(133): n is a, c, g, or t
  misc_feature (154)..(155): n is a, c, g, or t
  misc_feature (158)..(158): n is a, c, g, or t
  misc_feature (160)..(160): n is a, c, g, or t
  misc_feature (169)..(170): n is a, c, g, or t
  misc_feature (174)..(174): n is a, c, g, or t
  misc_feature (182)..(182): n is a, c, g, or t
  misc_feature (210)..(210): n is a, c, g, or t
  misc_feature (249)..(249): n is a, c, g, or t
  misc_feature (255)..(255): n is a, c, g, or t
  misc_feature (266)..(266): n is a, c, g, or t
  misc_feature (290)..(290): n is a, c, g, or t
  misc_feature (292)..(292): n is a, c, g, or t
  misc_feature (303)..(303): n is a, c, g, or t
  misc_feature (307)..(307): n is a, c, g, or t
  misc_feature (309)..(309): n is a, c, g, or t
  misc_feature (353)..(354): n is a, c, g, or t
  misc_feature (367)..(367): n is a, c, g, or t
  misc_feature (386)..(386): n is a, c, g, or t
  misc_feature (415)..(415): n is a, c, g, or t
  misc_feature (418)..(418): n is a, c, g, or t
  misc_feature (427)..(427): n is a, c, g, or t
  misc_feature (436)..(436): n is a, c, g, or t
  misc_feature (441)..(441): n is a, c, g, or t
  misc_feature (451)..(451): n is a, c, g, or t
  misc_feature (468)..(469): n is a, c, g, or t
  misc_feature (492)..(492): n is a, c, g, or t
  misc_feature (525)..(525): n is a, c, g, or t
  misc_feature (538)..(538): n is a, c, g, or t
  misc_feature (542)..(542): n is a, c, g, or t
  misc_feature (550)..(550): n is a, c, g, or t
  misc_feature (573)..(573): n is a, c, g, or t
  misc_feature (575)..(575): n is a, c, g, or t
  misc_feature (583)..(583): n is a, c, g, or t
  misc_feature (626)..(626): n is a, c, g, or t
  misc_feature (637)..(637): n is a, c, g, or t
  misc_feature (661)..(661): n is a, c, g, or t
  misc_feature (672)..(672): n is a, c, g, or t
  misc_feature (706)..(706): n is a, c, g, or t
  misc_feature (708)..(708): n is a, c, g, or t
  misc_feature (724)..(724): n is a, c, g, or t
  misc_feature (732)..(732): n is a, c, g, or t
  misc_feature (740)..(740): n is a, c, g, or t
  misc_feature (748)..(748): n is a, c, g, or t
  misc_feature (775)..(775): n is a, c, g, or t
  misc_feature (793)..(793): n is a, c, g, or t
  misc_feature (852)..(852): n is a, c, g, or t
  misc_feature (868)..(868): n is a, c, g, or t
  misc_feature (893)..(893): n is a, c, g, or t
  misc_feature (935)..(935): n is a, c, g, or t
  misc_feature (945)..(945): n is a, c, g, or t
  misc_feature (961)..(961): n is a, c, g, or t
  misc_feature (976)..(976): n is a, c, g, or t
  misc_feature (985)..(985): n is a, c, g, or t
  misc_feature (990)..(990): n is a, c, g, or t
  misc_feature (1025)..(1025): n is a, c, g, or t
  misc_feature (1067)..(1067): n is a, c, g, or t
  misc_feature (1082)..(1082): n is a, c, g, or t
  misc_feature (1100)..(1100): n is a, c, g, or t
  misc_feature (1108)..(1108): n is a, c, g, or t
  misc_feature (1178)..(1178): n is a, c, g, or t
  misc_feature (1435)..(1435): n is a, c, g, or t
  misc_feature (1513)..(1513): n is a, c, g, or t
  misc_feature (1517)..(1517): n is a, c, g, or t
  misc_feature (1656)..(1656): n is a, c, g, or t
  misc_feature (1739)..(1739): n is a, c, g, or t
  misc_feature (1765)..(1765): n is a, c, g, or t
  misc_feature (1828)..(1828): n is a, c, g, or t
  misc_feature (1853)..(1853): n is a, c, g, or t
  misc_feature (1859)..(1859): n is a, c, g, or t
  misc_feature (1888)..(1888): n is a, c, g, or t
  misc_feature (1914)..(1914): n is a, c, g, or t
  misc_feature (1944)..(1944): n is a, c, g, or t
  misc_feature (2000)..(2001): n is a, c, g, or t
  misc_feature (2034)..(2034): n is a, c, g, or t
  misc_feature (2069)..(2069): n is a, c, g, or t
  misc_feature (2078)..(2078): n is a, c, g, or t
  misc_feature (2092)..(2092): n is a, c, g, or t
  misc_feature (2120)..(2120): n is a, c, g, or t
  misc_feature (2122)..(2122): n is a, c, g, or t
  misc_feature (2125)..(2126): n is a, c, g, or t
  misc_feature (2135)..(2135): n is a, c, g, or t
  misc_feature (2216)..(2216): n is a, c, g, or t
  misc_feature (2221)..(2221): n is a, c, g, or t
  misc_feature (2225)..(2225): n is a, c, g, or t
  misc_feature (2227)..(2228): n is a, c, g, or t
  misc_feature (2233)..(2233): n is a, c, g, or t
  misc_feature (2236)..(2236): n is a, c, g, or t
  misc_feature (2238)..(2240): n is a, c, g, or t
  misc_feature (2245)..(2245): n is a, c, g, or t
  Probeset Number=SeqID_10302
natacagacattcgatcgtctgaatcaatagaatgctaatcagtatcgnatatgactttaatatcggtgaaactcaacgatgaatgcaaaatnatgcngtcatatgactagtcatcgtaccgtcatacancancaagacgtcatgaccagttgnntgntntgattagtnnatantccgatgntacataagacatcagtactaatgtgtantatctgctgggatgaggggtgtgcagtataagagatagntagatngttgtatgagngttgagaaagtctcaatcattagncnatgtcaaactnaatntnagaggatcgacaggacgatgtatgcttagtatcgtcaaacaatnncgaccggcaccgnagcgacgcctcagtctgcngcgcctagtcaataccgccacctacgttnaangtagtcgtntgcaatgcncgtcnttactatccncctaaacaacacaggtnnatacgatacatccgctgcatcgncactgcacaggaagcattcgcgtagctatcatncagcacatcgaanccgnttggtcancactagtatagcgactagattgngnaggttagnagatcataaggtcagcgaggagtgagttgacgttatctggtanactgctatacntcttccgtactgtcgtagtatctnatactatctgnagtatactattaggatcggcgtcagtagttgatnangagagcagacgggcgntatatagnacgtgtcnagcccatnatagtgacgaccgcttcgtgacgttgncacgccagcacgctcacnagtgagcgacgatgcgtactactcacatcaaaaatcagtattagttctcgagtcagctntacatctcatgacacnaagtgcacactactagtcacacacnctatgacgactcactactcacacacagagcatgtcatgaganaactacaacncacacgactcatatantacgcgtagcatagnagcatagancacanagaagacagcgacaccgcacatggcatactatcangcgaaccgtcgacacaacagacataagccgatcgagtatagntgacgtagagatacntaccagcgcgagccgggnagcgaacncacgcgcgacatccatagacgtactcgctcacacacgcacctcgacaccgcagacgtatccgtgtcgtcnctgcagagtgaggcacgcagtctcggccgtgctgtgtcacaacattacatcatatatgacgtacgcgctggacggactgatatatcttgcgacggtatgacacttgcgtacgcgtcgatgtgactatatcacatacgcgagactagatcaataattatatctgtagtcgtgcgttgtagacgcaacatatatacactctgcagagtcgccgccactgcgcatccatcgctcgacagaaacgacacagcaccgatctnagtatcgtctgatagtctcacttcactatacgcgagtccgctcagtacatagatacagcgcatatgcacatagacacngcancagctcacccgcgaccgtcgtactgtcctccgtctcgcattgttcgtactcatgtccgtcactacttatccatactcgttctacatacgactctactcacacatattatgtacgccgagtcatcgatctcgtgacgcanctgatcgctcgacattcatcatacagtgcactgtatgtatacatatatacatatagctacttgtgatactttcgctcattatnctcgagcgctttgtcgcaatcagaantaatatagtgcgagatgacatcagatagactagtcgagaacatagagtgacgaaatatgcgangcgacgaaatacgcatacgatgtangcgtgngatgaacgactgtgacgatacagctacantctcgatacacatatatttacaactntacactgtcttctataacatacgattatantttataattatataaaagttgatacgatgtggtcagtaggaggagtgtatgagaannaatagtagagagaaggagcgtccaccgacgccngcgcgagcgacaggcacgacgacccacccgaacangatcacgcncccacacgacaacngcacaccgcacccgcacgccacgaccgntngannacacccacncgcccaccagacagcgcaggcatacgccgcacaacacatatgtcagaaagacagcagaggcaagcgcgagacacaacaaanacaanaaanannaacanaanannnacaanaagaaaaaaacgaa

SEQ ID NO: 524 - DNA, 471 bp, Glycine max
  Peptide Sequence Number=SeqID_8320
  Probeset Number=SeqID_10303
gctaaaaaaatggaaaacggcgacgagagcccggtggttctgataatgggatgctcgcaaggaggaatcggccacgcgctggcacgtgagttctcagataagggatgtcgagtggtggcgacgagccgttcgcggagtacgatgacggatctggagcaggatccgaggttgttcgtgcaggagctcgatgtgcaatcggagcagagcgtgagcaaagtcatgtcgaacgttatcgataagttcggacagatcgacgttcttgtcaacaacgcaggcgttcagtgcgttggacctcttgcggagattccaatgtccgccgtggagaatacattcaacaccaatgttttcggttccatgaggatgactcaagcagttgtacctcacatggtgtctaagaagaagggaaagattgtcaacgttgggagtatcactgttatggcaccaggtccatgggcaggtgtctatacagct

SEQ ID NO: 525 - DNA, 1681 bp, Glycine max
  misc_feature (15)..(15): n is a, c, g, or t
  misc_feature (18)..(18): n is a, c, g, or t
  misc_feature (20)..(27): n is a, c, g, or t
  misc_feature (29)..(31): n is a, c, g, or t
  misc_feature (33)..(35): n is a, c, g, or t
  misc_feature (37)..(38): n is a, c, g, or t
  misc_feature (43)..(46): n is a, c, g, or t
  misc_feature (48)..(48): n is a, c, g, or t
  misc_feature (66)..(66): n is a, c, g, or t
  misc_feature (68)..(69): n is a, c, g, or t
  misc_feature (76)..(77): n is a, c, g, or t
  misc_feature (184)..(184): n is a, c, g, or t
  misc_feature (243)..(243): n is a, c, g, or t
  misc_feature (292)..(292): n is a, c, g, or t
  misc_feature (369)..(369): n is a, c, g, or t
  misc_feature (378)..(378): n is a, c, g, or t
  misc_feature (402)..(403): n is a, c, g, or t
  misc_feature (483)..(483): n is a, c, g, or t
  misc_feature (518)..(518): n is a, c, g, or t
  misc_feature (520)..(520): n is a, c, g, or t
  misc_feature (534)..(534): n is a, c, g, or t
  misc_feature (586)..(586): n is a, c, g, or t
  misc_feature (631)..(631): n is a, c, g, or t
  misc_feature (650)..(650): n is a, c, g, or t
  misc_feature (987)..(987): n is a, c, g, or t
  misc_feature (1089)..(1089): n is a, c, g, or t
  misc_feature (1120)..(1120): n is a, c, g, or t
  misc_feature (1143)..(1143): n is a, c, g, or t
  misc_feature (1195)..(1195): n is a, c, g, or t
  misc_feature (1505)..(1505): n is a, c, g, or t
  Peptide Sequence Number=SeqID_8321
  Probeset Number=SeqID_10304
tgtgggtgttttggngtngnnnnnnnngnnntnnnanngggtnnnngngcctatctttctttcttncnncgcgccnnctgcctgggtgcacgggcacgagaagagttctcgtatgtcgtatgtagtatgccttgagtggtgtgagagagagaagagccccgcaccgcacgcacacgactctccnacactacatccaagattatatacacaacttagcttgatcaccgcccatcttcacccacnccacgtaatttgttacaatctcacatgtcgtccgcatcacccgccggancgaccacgccaacagatcatcagagctgtctacccatatagtcactgatgagcgacgagagagtaatgagacgatantagaccgcnagaccggaaagaacaggcaaagannatcagcaagccgtctatatcctactctcacaacaccaccacgccgtctcgctctccgcgccaccgctcggtctgcgggcngaatcggcgcgcccaccccgccggagccactatgngntgtgctccttctcntctattactatcgtggtatcgcactcgcagctcatagaatatagactctacnaccgacagaattaggtgtggattatccggcagcgacaccagtatnatgggcgacctgtagtatntgattcacatagccggtcgtcccgctgacagtgccggtcgccgcgcgtgtagtgggagtttgtggagtggccacgacgccaacgcagcaataacgacacgaatgcgtactaattattataagcgcttgcaacaccctactctagttatcacggagttagttaggaatagcatacgagtgcgcctgctaacgaacactcaggcctttgtccagtaattcagtcgattgtatagtgacgctttaactttagacgactcgctgatgtcacgcgcacgctctttaccgtcgcgttcatttttgttagagctgggcgtgcgtaaacgctgcgcacatctggntacgtgacgggccttagagtcacggatccgcacgttgcaattatgacagaagtaaggagtattagtatagcaaacattatacacgtgacacatgagcgtcgnagtatgaacaagaagaatattacacaagaanatcgacccaccgcgcttgatcanggtgtattagataatgctcgaatcaacaccacattaccattacatatacttncattacgtagctgtttgataagcgaacatcatgctgatttcacgagcaacaccaaagaataataacctaatgtgtatgacacctagagacacactacgtagcaaatacactccactcttcttcgagcattattcttgagagcgcaaatgataccaggcattaagttgctcgtgacgacaatatcacactcatcgcgacactctgagaataaacgccgattaacacatacaatacctctaacacatacacattatatacactagagaccctatcttgcaggcactgcagcgagctatacaatgccgcgggnagatcacgagactgatgtacgatcggcagttagacagcaacagttaatcttctcgatctcaaacaccatcgactcgaagaccacgacctcacttgactccatcgtgcgcctgctccataataagaagacatgtgttatgtaatatatcacataatatccatagaggaaatcagcat

SEQ ID NO: 526 - DNA, 490 bp, Glycine max
  misc_feature (197)..(201): n is a, c, g, or t
  misc_feature (360)..(364): n is a, c, g, or t
  Probeset Number=SeqID_10305
tggcttgtgcagtttgcgaggctgtttaagaatcatgttgggtttgattcggatgcgtatttggatattcatgggattgggatgaagctgtattcggaggcgatggaggatgcggtgacgagtgagggtgctcaggagctgtttgacattgcggcggataggtttcaggagatggcggctttggcattgtttaattnnnnnagtgtgcacatgtcaagggcgaggaagcgggtgagtattccagaggatgggtcgagggagtctgagtttgaatttgttaaggcagggtatgagtgggctcggaaggagtacatgaatgcagagaagaggtttgaagaggctgtgaagattaaatcggannnnnatgaagggctgcttgctcttgggcatcagcagtttgagcaagcaagactctgctggtcttatttgattgcgaacaataaggatttggaagccggcccttccgatgaggttctgcaggtcggctgta

SEQ ID NO: 527 - DNA, 1447 bp, Glycine max
  misc_feature (61)..(61): n is a, c, g, or t
  misc_feature (84)..(84): n is a, c, g, or t
  misc_feature (160)..(160): n is a, c, g, or t
  misc_feature (369)..(369): n is a, c, g, or t
  misc_feature (487)..(487): n is a, c, g, or t
  misc_feature (525)..(525): n is a, c, g, or t
  misc_feature (531)..(531): n is a, c, g, or t
  misc_feature (560)..(560): n is a, c, g, or t
  misc_feature (876)..(876): n is a, c, g, or t
  misc_feature (896)..(896): n is a, c, g, or t
  misc_feature (1061)..(1061): n is a, c, g, or t
  misc_feature (1251)..(1251): n is a, c, g, or t
  misc_feature (1254)..(1254): n is a, c, g, or t
  misc_feature (1447)..(1447): n is a, c, g, or t
  Peptide Sequence Number=SeqID_8322
  Probeset Number=SeqID_10306
tgaacatacacagcacaatgccaccccactcctctagctcctcccacattcgcaacacacnacgacagtacagatattgtgttntgtgtcatggacgagcgcagatctatccgccccacatcatgcgtagatgtattgcaccaagtagagctccacctgnccgcgacgacatatagagcgtgcatctctcaccagagaacaaacggccgcagtcgagtgcttacctctatcctatatatactaccgctggcgctctatctatctgctgacttgtatctgactcctacgcgaacgacgaagcagagtcgtgccatctgtgcgatgcgcgtgcgtgctagttacgatattggtgcgctatctacgctgcanacacgcgacgatgacgatgactggtgatgacgaacctgagagtgactgatagccagcaagcggtacgagaggcgcacgctccgtcgacgcgcgatgtagcgctcgactgccatgcgantagtggtgttgtcgatgattgatgatatgcggtcttgnggcgancgtcaatgtatcgtccagttctctagacncgcggatagacggacatgatagagcaatagaccacacgagcgccgcgtgtcgcgcgacggcgcattgtcatgaccgccgactatagcagactactgttatgcgcgcagcgtgcagccgcacgccgctgcttataccgtgagatgaactgaataacaccgcagatagcgctgctggcggccgcgtcggtcctcgcacgtcgcgtgacgagctgacgagcgcagagacatgacgatctctacgactacgtacgatgtgtcgcgacgtagcgtagtagtagtgaagatagtaagcgtgataccactgacggtcagcacnccacaccgtcctactgaggntaccagttcatatgactcaagaacatactgctgttcactagacgagatgacgacacacagtgtatcgttgtcgtatccgcgatgacgatcgttgagacagcgcgtatcgcgtatggctgctgtcgtcacgcgaacgatcataaataagaactcgatgagtctgangtgctgtcgagtgaacgcatacgtacgctgtacgcgacgtcgctatatactccctgccgtcgttgcgcgtgtgcccgcgattgcatgacgatgcatcaggatcgatgctagatcactcagataatcactcagaattacatccgcgagccgttaccatacggcaggcactggcgtctagagagaaagagantcntgctacctacccgatcgacgtatggcgcatctgaggaccgtcacatgatcaaatcaccggatatgcgtatcttgaggcggcagtgatgggcgacgcagacgcggcgagaagcgccagcgcaaaatatgatgaacaatgtgccgtgtcgccgcctaccgccgccacaaactctgatctacgaacgcagcagggn

SEQ ID NO: 528 - DNA, 409 bp, Glycine max
  misc_feature (296)..(296): n is a, c, g, or t
  Probeset Number=SeqID_10307
aaccgctgcacagtggttcaacctctttgcaacacaacttcatcatgttcaaaaccttactgataaattacatggaaccaagctgcatcatggtgaagactgtcatcacatccatacagtaaatcactggacttataccatagatggtaaggctacaacatgtctggagagtattgaatccattgatgaacagaacaaaacaatcacctacaagctcttcagtggagacattgatcataactataagaaatttaagttcacctttcaagccattgataaggatcaaggctgtgctnttatataatggaccgctgaatatgaaatgctagctgatgatgttgactctcgttatcgatacatcgaatacctgcactaatgcactaaagattatcatgttcatctcttcaag

SEQ ID NO: 529 - DNA, 1918 bp, Glycine max
  misc_feature (37)..(37): n is a, c, g, or t
  misc_feature (48)..(48): n is a, c, g, or t
  misc_feature (61)..(61): n is a, c, g, or t
  misc_feature (72)..(72): n is a, c, g, or t
  misc_feature (77)..(78): n is a, c, g, or t
  misc_feature (81)..(83): n is a, c, g, or t
  misc_feature (89)..(89): n is a, c, g, or t
  misc_feature (115)..(115): n is a, c, g, or t
  misc_feature (121)..(121): n is a, c, g, or t
  misc_feature (125)..(125): n is a, c, g, or t
  misc_feature (134)..(134): n is a, c, g, or t
  misc_feature (141)..(141): n is a, c, g, or t
  misc_feature (143)..(143): n is a, c, g, or t
  misc_feature (145)..(145): n is a, c, g, or t
  misc_feature (165)..(165): n is a, c, g, or t
  misc_feature (178)..(178): n is a, c, g, or t
  misc_feature (223)..(224): n is a, c, g, or t
  misc_feature (310)..(310): n is a, c, g, or t
  misc_feature (330)..(330): n is a, c, g, or t
  misc_feature (425)..(425): n is a, c, g, or t
  misc_feature (443)..(443): n is a, c, g, or t
  misc_feature (578)..(578): n is a, c, g, or t
  misc_feature (601)..(601): n is a, c, g, or t
  misc_feature (642)..(642): n is a, c, g, or t
  misc_feature (759)..(759): n is a, c, g, or t
  misc_feature (774)..(774): n is a, c, g, or t
  misc_feature (913)..(913): n is a, c, g, or t
  misc_feature (957)..(957): n is a, c, g, or t
  misc_feature (976)..(976): n is a, c, g, or t
  misc_feature (995)..(995): n is a, c, g, or t
  misc_feature (997)..(997): n is a, c, g, or t
  misc_feature (1002)..(1002): n is a, c, g, or t
  misc_feature (1022)..(1022): n is a, c, g, or t
  misc_feature (1024)..(1024): n is a, c, g, or t
  misc_feature (1066)..(1066): n is a, c, g, or t
  misc_feature (1074)..(1074): n is a, c, g, or t
  misc_feature (1122)..(1122): n is a, c, g, or t
  misc_feature (1143)..(1143): n is a, c, g, or t
  misc_feature (1151)..(1151): n is a, c, g, or t
  misc_feature (1161)..(1161): n is a, c, g, or t
  misc_feature (1259)..(1259): n is a, c, g, or t
  misc_feature (1266)..(1266): n is a, c, g, or t
  misc_feature (1354)..(1354): n is a, c, g, or t
  misc_feature (1407)..(1407): n is a, c, g, or t
  misc_feature (1548)..(1548): n is a, c, g, or t
  misc_feature (1553)..(1553): n is a, c, g, or t
  misc_feature (1632)..(1632): n is a, c, g, or t
  misc_feature (1637)..(1637): n is a, c, g, or t
  misc_feature (1679)..(1679): n is a, c, g, or t
  misc_feature (1691)..(1691): n is a, c, g, or t
  misc_feature (1790)..(1790): n is a, c, g, or t
  misc_feature (1829)..(1829): n is a, c, g, or t
  misc_feature (1836)..(1836): n is a, c, g, or t
  misc_feature (1853)..(1853): n is a, c, g, or t
  misc_feature (1918)..(1918): n is a, c, g, or t
  Peptide Sequence Number=SeqID_8406
  Probeset Number=SeqID_10308
actcatccccctcctgtgctgtatattgctcattatntctctaatatntatattcacaganagaaactatantgtannccnnnccgcangagagacgaggggaagagaggagagnaaagangaanaatatcggncggaatngnangtattgtaatatgatggcgnggtggggagaagnggtgtgtcgacggataaagagaacagagactaggcgacctacacnnggtaaaagagtatgaagattataaatataacgcatcctctccgcactattattgcacgaatccgcacgctatgctccttatgcgcnctgagtatcgtgtcgtgtancatcctactgctaatcgcatcgatatgagactattatgtcctgtgtgattgggcttgtcgctacgaggtactgatgagtgagtgcgtacagaatngtgtctgtcgcgtgtcgngcgaccgatatgcttgtgtggttacttgctctcttgtgctgtcagcacgacactacacacacttacactcaagcgacgataacacaaacatctaattgagacgcgcacacaaacacccaccactgcgcgcgtcgngcgagctgccccctccgctctantacctcttgtgcgtgccgcgactatctactcgctggtgcanttcttctgtggccgcgcaccgctactctgctgccctctcactctctcttcctcagccgctcgcgcgcagctggacattccatattatatgctaacactatactgcgctatatatcantcgacattctctatncactcatcgtatatacacacaatactcacatcatgtctctctactgcacacatctcgatgctatagctacagctaacgctgcggtcacatccctcacaacactatcgcaacacagtctatacgaaacacaccacccatncacgacaacgctgtgagtgctgctctagtgcaactatgactatngtggcatgaatctctcgangatgagtagtgagatcatncncaccnacacacggcagaccgcctcngntaccagcgatggctcgtgcatcctgcgagagcgcgtcggctngccactanctactcatcatcctcacacactcagtcacagctacgacgacgcgtcangcgactcgctgacagctgacnacatctanctaccacacntcgcgtgctcgtactgtgatacgtctactctatcactctgtctcactcgctcactgatgctatcactcatctctactcatcgctcgctcgatctgcgntctctgnctctatccactcgcctctgactcgactctctccgtgattcgtcactacgtctacgccatacaacgctcgcgcgcagacgcagcgggcnggacgcagagagctatatacacatacgccacacacccactactcggctcaccntagatacatagactaatcggtcattcgtaacaatgtatacatacatcatctacaacaacctcatcctaacgacatctctgcgtgacactgtctctcatctatgctacctccgtccgcgtgttccactcttgtcacgcacgnacctnctcttctctctactactactgacatatccgcacactgctgtatctctgtctatatctgtctctacactcttatgctatnaatancgatacatcgacactacctccactcacgataaacgtatgcangatgtagtgcgntatgcgctgtctgttagtgtatatgatgacgagcgcatactttccatctcatacctatttacttatctcaatcactgtatcattcttacactaacaacnctctgttgtgttgtcgctgctcccacacctactatattncttgatngctctgcacctgtgtgntaccacacagatacgctttgtcgattgtgtgcacgacacactcatacatatctacactctcgtan

SEQ ID NO: 530 - DNA, 1505 bp, Glycine max
  misc_feature (16)..(16): n is a, c, g, or t
  misc_feature (18)..(19): n is a, c, g, or t
  misc_feature (24)..(24): n is a, c, g, or t
  misc_feature (33)..(33): n is a, c, g, or t
  misc_feature (193)..(193): n is a, c, g, or t
  misc_feature (211)..(211): n is a, c, g, or t
  misc_feature (364)..(364): n is a, c, g, or t
  misc_feature (519)..(519): n is a, c, g, or t
  misc_feature (586)..(586): n is a, c, g, or t
  misc_feature (588)..(588): n is a, c, g, or t
  misc_feature (601)..(601): n is a, c, g, or t
  misc_feature (603)..(603): n is a, c, g, or t
  misc_feature (628)..(628): n is a, c, g, or t
  misc_feature (649)..(649): n is a, c, g, or t
  misc_feature (651)..(652): n is a, c, g, or t
  misc_feature (656)..(656): n is a, c, g, or t
  misc_feature (717)..(717): n is a, c, g, or t
  misc_feature (769)..(770): n is a, c, g, or t
  misc_feature (774)..(776): n is a, c, g, or t
  misc_feature (793)..(793): n is a, c, g, or t
  misc_feature (826)..(826): n is a, c, g, or t
  misc_feature (852)..(852): n is a, c, g, or t
  misc_feature (883)..(883): n is a, c, g, or t
  misc_feature (912)..(912): n is a, c, g, or t
  misc_feature (922)..(922): n is a, c, g, or t
  misc_feature (959)..(959): n is a, c, g, or t
  misc_feature (994)..(994): n is a, c, g, or t
  misc_feature (997)..(997): n is a, c, g, or t
  misc_feature (999)..(999): n is a, c, g, or t
  misc_feature (1008)..(1008): n is a, c, g, or t
  misc_feature (1024)..(1025): n is a, c, g, or t
  misc_feature (1058)..(1058): n is a, c, g, or t
  misc_feature (1061)..(1061): n is a, c, g, or t
  misc_feature (1184)..(1184): n is a, c, g, or t
  misc_feature (1190)..(1190): n is a, c, g, or t
  misc_feature (1213)..(1213): n is a, c, g, or t
  misc_feature (1217)..(1218): n is a, c, g, or t
  misc_feature (1244)..(1244): n is a, c, g, or t
  misc_feature (1267)..(1267): n is a, c, g, or t
  misc_feature (1274)..(1274): n is a, c, g, or t
  misc_feature (1276)..(1276): n is a, c, g, or t
  misc_feature (1281)..(1281): n is a, c, g, or t
  misc_feature (1285)..(1285): n is a, c, g, or t
  misc_feature (1290)..(1290): n is a, c, g, or t
  misc_feature (1294)..(1294): n is a, c, g, or t
  misc_feature (1304)..(1305): n is a, c, g, or t
  misc_feature (1337)..(1337): n is a, c, g, or t
  misc_feature (1345)..(1345): n is a, c, g, or t
  misc_feature (1354)..(1354): n is a, c, g, or t
  misc_feature (1356)..(1356): n is a, c, g, or t
  misc_feature (1399)..(1399): n is a, c, g, or t
  misc_feature (1422)..(1422): n is a, c, g, or t
  misc_feature (1424)..(1424): n is a, c, g, or t
  misc_feature (1465)..(1465): n is a, c, g, or t
  misc_feature (1497)..(1497): n is a, c, g, or t
  Probeset Number=SeqID_10309
tttttttttcccgccntnnccttnccctccttnagcacacgccccgagctgccgcgcgtctgctcccgccaacccgcctcgacacacccctgagagtcccccccccccacgatagaggaagagctctctccctccctatacatagcgctgagccgcccaccggtcgagctggctacgggaatataggcgtaancatagtagtcaagtattnttctgtgcgagaccctcacccacaccacctgcaacaatcacgaacaacggaaggctacgcgatcacaacaatataatagataatcaaaaaagatacgattgtgctccgcatatagaaaaatataaatagtaacaaatatcttagctctccacnactatcacaacataatatagtacataatagaatatacatctacctgtatatataacaaaacaacgaacgaatacaaagcacaagaaaggacacaagatagcaatattgtaataaacaaaaaaataattctctcattatatctgacatgtatagtntcgttcgtggttggactggggacagcaaccagtctttttacctatgttgtttggaagtgaagaccanangcggaagcgcggngntgcacgtctcctgctccacgacccncagacacgccgtcaacgtgcncnntaangaacaataaacatattctttgtcgtcgctctttgttgctttgtattatttaagttgttgtnagaaatagaaagaattataataataaaagaagaaaaagaagataataaaganncggnnngatacgtatataataantgtataatatactaggagctcgagcgtgatggngagatcatacagctatactatggtanggcagtgtagtggtgttgttgtcataatatnatgagacgacccacacacacaatacaccnccgcgtacgngctgccgtacagccctgcacgcgcctcctctcacganccacacacgcttatgcgtatcacactccatatatntcncnccccctctntcccacaacaccacannaggattatcacataatataccactaacacacgnatnacactctgcacctatccatatgtatactgatcagttgccttagagctacacaacacaccgctgtgcgacctattaacttcataagatcagacctattataacatttcaataaataataaaaangcaggngggtcctacatgaatgagcacgngtgnngtgttgtcttatatctagtaaaatangcagattacacagtcgcgatacnataatangnactcnaatnccttngccnctctaccaannctcctcagtcactcgtactgcttagccatgtnctctcctnttgcatagntntgtcactcagttagttctgtctcacgacacacacagaaccagntaacacacatatctacgcgtgtnantatgatcatatggcgttgcctgactctctctaacacgacantgcacagcattgacgcatcgtctgaactatgncatgcacg

SEQ ID NO: 531 - DNA, 1354 bp, Glycine max
  misc_feature (1)..(35): n is a, c, g, or t
  misc_feature (40)..(46): n is a, c, g, or t
  misc_feature (66)..(66): n is a, c, g, or t
  misc_feature (232)..(232): n is a, c, g, or t
  misc_feature (253)..(253): n is a, c, g, or t
  misc_feature (544)..(545): n is a, c, g, or t
  misc_feature (554)..(554): n is a, c, g, or t
  misc_feature (556)..(556): n is a, c, g, or t
  misc_feature (561)..(561): n is a, c, g, or t
  misc_feature (563)..(564): n is a, c, g, or t
  misc_feature (573)..(573): n is a, c, g, or t
  misc_feature (614)..(615): n is a, c, g, or t
  misc_feature (626)..(626): n is a, c, g, or t
  misc_feature (640)..(640): n is a, c, g, or t
  misc_feature (647)..(647): n is a, c, g, or t
  misc_feature (663)..(669): n is a, c, g, or t
  misc_feature (671)..(671): n is a, c, g, or t
  misc_feature (675)..(675): n is a, c, g, or t
  misc_feature (679)..(679): n is a, c, g, or t
  misc_feature (689)..(689): n is a, c, g, or t
  misc_feature (720)..(721): n is a, c, g, or t
  misc_feature (740)..(742): n is a, c, g, or t
  misc_feature (746)..(746): n is a, c, g, or t
  misc_feature (763)..(764): n is a, c, g, or t
  misc_feature (766)..(767): n is a, c, g, or t
  misc_feature (773)..(773): n is a, c, g, or t
  misc_feature (775)..(775): n is a, c, g, or t
  misc_feature (795)..(795): n is a, c, g, or t
  misc_feature (805)..(805): n is a, c, g, or t
  misc_feature (814)..(814): n is a, c, g, or t
  misc_feature (819)..(819): n is a, c, g, or t
  misc_feature (830)..(830): n is a, c, g, or t
  misc_feature (851)..(851): n is a, c, g, or t
  misc_feature (886)..(889): n is a, c, g, or t
  misc_feature (895)..(895): n is a, c, g, or t
  misc_feature (911)..(911): n is a, c, g, or t
  misc_feature (930)..(930): n is a, c, g, or t
  misc_feature (949)..(949): n is a, c, g, or t
  misc_feature (951)..(951): n is a, c, g, or t
  misc_feature (983)..(983): n is a, c, g, or t
  misc_feature (1000)..(1000): n is a, c, g, or t
  misc_feature (1028)..(1028): n is a, c, g, or t
  misc_feature (1051)..(1051): n is a, c, g, or t
  misc_feature (1063)..(1063): n is a, c, g, or t
  misc_feature (1088)..(1088): n is a, c, g, or t
  misc_feature (1106)..(1106): n is a, c, g, or t
  misc_feature (1149)..(1149): n is a, c, g, or t
  misc_feature (1151)..(1152): n is a, c, g, or t
  misc_feature (1168)..(1168): n is a, c, g, or t
  misc_feature (1172)..(1172): n is a, c, g, or t
  misc_feature (1205)..(1205): n is a, c, g, or t
  misc_feature (1290)..(1290): n is a, c, g, or t
  misc_feature (1340)..(1340): n is a, c, g, or t
  misc_feature (1354)..(1354): n is a, c, g, or t
  Peptide Sequence Number=SeqID_8407
  Probeset Number=SeqID_10310
nnnnnnnnnnnnnnnnnnnnnnnnnnnnnnnnnnnccccnnnnnnnggggccgggaaagggaaggntggagggtttgcgagaggtgatggcaattgtttgttagaatgtgtgttttgatagttttgtaagttggttgtagtttgtagttaatgtggttattttataagaagaggaaggggcggtttcggaataggtagaaggagtgagatcgcaagtagaatcgttgtaaangggcatcggtcgggagaggcntaaatggtgttggtgttggtgagagtttgtgtgttttgtggtctgtgtttttgttatccggcgcgtgctaatcgttttgtcttgttcggtcttgtctgtcatcctcttacattcatgaccgtcggagtagaaggagaggatttgagaaccgcgaggcaaagagaacaagacgtgaagatcgagggatgatgcctcgttagggtttttttggtttcttctctccccccatcagatatctccatcccaccccaacaataagtcacccttcgctatcaccccagggcacccaanncaaaaaccncncacgnanntaataactnccccgcgccgcggccgcgtgggtgaaatgcagaaaagccannacatcacagtnggcctcgcggccgntcagggngggagtggtgtgtgtnnnnnnncnacgncgancagcgggggngcggaaaaggggggcggcaagcaggaggtcnnacctcggcggcgaagcaannnattntttatgaagcgactggnncnnccggancnggcgcccaccaggcgggggnccatctactnaggggttgntaganacgggcgaccncccaacgccgacacaacgggncgggcctgtgttgggctatgaagccatggtgaaannnngacccnccgcgcgcgcgaccanagattcccctcccgcatgnatacgggagaaggcgatananttgagacaggccagcgactaaccgggtcgagnagcgcagatggattaantattcagttgtgatagagaggtatcggntactgaatactcacatctgatgngagaggtatgangtaagtacatgcagctaggctacgntctcgcttgtgccacggnagtaccttgagtctgaatgtggcaccgagacactcgaacatgnannatgaatatacaggagnatgnactacgccaatacctctactagtatgcgtgctnagctgatacatgtacgtcatctacgtcgagtgcgcgaccgcacacaggaactcgttgctgcaagtatacgtgcatagaggctganaagactctatatacgtgcgatcacagagtagatatatgtgcgtttgctantatatagaccgccn

SEQ ID NO: 532 - DNA, 1672 bp, Glycine max
  misc_feature (14)..(14): n is a, c, g, or t
  misc_feature (75)..(75): n is a, c, g, or t
  misc_feature (243)..(243): n is a, c, g, or t
  misc_feature (310)..(310): n is a, c, g, or t
  misc_feature (460)..(460): n is a, c, g, or t
  misc_feature (530)..(530): n is a, c, g, or t
  misc_feature (607)..(607): n is a, c, g, or t
  misc_feature (633)..(633): n is a, c, g, or t
  misc_feature (637)..(637): n is a, c, g, or t
  misc_feature (654)..(654): n is a, c, g, or t
  misc_feature (689)..(689): n is a, c, g, or t
  misc_feature (735)..(735): n is a, c, g, or t
  misc_feature (773)..(773): n is a, c, g, or t
  misc_feature (803)..(803): n is a, c, g, or t
  misc_feature (999)..(999): n is a, c, g, or t
  misc_feature (1080)..(1080): n is a, c, g, or t
  misc_feature (1223)..(1223): n is a, c, g, or t
  misc_feature (1240)..(1240): n is a, c, g, or t
  misc_feature (1284)..(1284): n is a, c, g, or t
  misc_feature (1287)..(1287): n is a, c, g, or t
  misc_feature (1361)..(1361): n is a, c, g, or t
  misc_feature (1421)..(1421): n is a, c, g, or t
  misc_feature (1443)..(1443): n is a, c, g, or t
  misc_feature (1452)..(1452): n is a, c, g, or t
  misc_feature (1503)..(1503): n is a, c, g, or t
  misc_feature (1539)..(1539): n is a, c, g, or t
  misc_feature (1577)..(1577): n is a, c, g, or t
  misc_feature (1579)..(1579): n is a, c, g, or t
  misc_feature (1601)..(1601): n is a, c, g, or t
  misc_feature (1605)..(1605): n is a, c, g, or t
  misc_feature (1611)..(1611): n is a, c, g, or t
  misc_feature (1621)..(1621): n is a, c, g, or t
  misc_feature (1635)..(1635): n is a, c, g, or t
  misc_feature (1639)..(1639): n is a, c, g, or t
  misc_feature (1644)..(1644): n is a, c, g, or t
  Probeset Number=SeqID_10311
gttattttatcttntttcttcttctcttcccctcttgtattacttcgagcgctgccagcgcataaatcactattngtgcggttcacaattaaataggagctgcgcgcctccctctcctagcgatcgatacgaggtaagggatgggaaggtcactctcctccttcttctcagcttactgcgtctgaggtcgcacgtgtgtgttattacagttaccactcctcgctcagaagtaccctagaactngttgtggtcttagatcgcagtacatgcgtctacataagttgatctatcatctcatccagtctatctncctcatcatcctagattcaccttgtcgtactagctactagagaatatatacagtctatgtctatgtaatcgcagctctcctgtcatcgcagcgcactccccgctcctcgcgtattaggttgaaacagttgtatcacaagactgatcgtgntcgatgaccctcatctcctcggtatactagcatccataccagagtctctaattatcgaactcacagcccnacgtctcgtctagctctagtcgagtcctgcatctctctatagtgcatggcgtctccatctcactgtcacgctagtanatgtgctaggcgacgcgacctaggtntagngttcacatacgaatccncacaatgtcgccgctgggccgataattgatcgacnccgcctgtaggctgtcgcaggacgtcctgtggaggtatccgaactncatctgtagagcagcagcacacgtgctctgctctccgnctagactttgtattctaggtatgttattgnactgagcacctaattactagatatagagccaaccatattattgtgtctctgtgcgacatcatatcctcagtagaggctgatatattgataggagactaatatctattcttgctccttgcactatctatttggcgctgtatgggagtcatcgacctctgcagacgagccttgcgcaccgtacatcggtgtctgagtntccaacacgcgtcgttactatcatgggtttaggcagtctcagatccactacgctgcatacctctagagttagctgacgaanctagatctacctcataccgagtcatctatcgataacctctgatgctgcgccattttccttgatcatcgtctcgttgtctacgtgtgacaatatggctagtggcgcacgcccctgcactaacgtaccacatactactctcgacnggcgcatagctcgtgcntatgatatacaaacacagatgctcatcatctcgtgtgtcggcgncangtgatctgaatctccatgtggcacgcacgtctatgtatgatgctgctgggctgtgtcctgtctgcagctattgntcatctggtatggtaggtcctcggtcattcatggtcatctagtatttctcactcgactanacacgtttatacttcactctcntctcacgtnctctacgactgcgtgtatatatacacacgatatgcgatatgtcacaacatnatcgtatacgatgacattgtgatgactcagcactcntataatgaccactacgatcacgtactacattagcgagncntcctacgtttcgttccgatacncatncgtgtncataatgatnatctagactacttntctnactcnacccagcgattgagacgttctgtcgcag

SEQ ID NO: 533 - DNA, 1147 bp, Glycine max
  misc_feature (1)..(98): n is a, c, g, or t
  Peptide Sequence Number=SeqID_8408
  Probeset Number=SeqID_10312
nnnnnnnnnnnnnnnnnnnnnnnnnnnnnnnnnnnnnnnnnnnnnnnnnnnnnnnnnnnnnnnnnnnnnnnnnnnnnnnnnnnnnnnnnnnnnnnnnnagtaaccaatcatctttagttcttcagtaatttattgtgggattctattctaagattttgagaatgtctagctgtgggtgtggaagcagctgcaactgtgggcagcaactgccggttgcaacaagtactcttttgacttgagttacgttgagaagacaaccacagagactctagttttgggtgttgggcctgtgaaggcccaattgcgagggtgctgaaatgggtgttgcatctgagaacggtggctgcaactgtggatcaagctgcacctgtgacccatgcaactgcaagtaaggtcaagatgtataaccttgaagcagagatagcttggtaatatatgtatcaacaaataataagaagtagaagttgcgtttggagctttagaataaagtgtttgctatgtgttttgttggtcttttataaatatgtaatttgaatcatcaatctctgcttataaatgaatacttttggtgttatatgaataaaaagtttgttgggttatttcattaaaaaaaaaaaaaaaaaaaaaaaaaaacaaaaaaccccacaaaaaccttcccgtcctcatcaccatcaaattgacggccgccccacagttctccgggctcttcctctagactccacgcggttgcgacggtagcgagctgccggggcccgttgaggaaagatgactatgctatgccggctgccatcattacgatggcaaatgtggggcactgcatgtggcaaatatgtacaggtgctgccttagcattattgatcctggtgattcggatatcatcacgacactgcctggcgaacaaaagtttcttgaagcgctttattttctggcctcccaaactctcccccctcagaaagcgaggcagagaggacacgccgagaagcagcagcgctgctggatgcatgtcccatttatttaaatatgggaaaaatcagcgatagcgacaaccacgaggattcacccaaacaaaccttgcctgataggcttatgggaatgaaagctgctattttgaccaacaattcaagcttgccgtcttttagagccacac

SEQ ID NO: 534 - DNA, 1396 bp, Glycine max
  misc_feature (15)..(17): n is a, c, g, or t
  misc_feature (26)..(26): n is a, c, g, or t
  misc_feature (38)..(38): n is a, c, g, or t
  misc_feature (41)..(41): n is a, c, g, or t
  misc_feature (79)..(79): n is a, c, g, or t
  misc_feature (82)..(83): n is a, c, g, or t
  misc_feature (109)..(109): n is a, c, g, or t
  misc_feature (116)..(116): n is a, c, g, or t
  misc_feature (148)..(149): n is a, c, g, or t
  misc_feature (188)..(188): n is a, c, g, or t
  misc_feature (204)..(204): n is a, c, g, or t
  misc_feature (321)..(321): n is a, c, g, or t
  misc_feature (336)..(336): n is a, c, g, or t
  misc_feature (496)..(497): n is a, c, g, or t
  misc_feature (741)..(741): n is a, c, g, or t
  misc_feature (782)..(782): n is a, c, g, or t
  misc_feature (941)..(941): n is a, c, g, or t
  misc_feature (990)..(990): n is a, c, g, or t
  misc_feature (1130)..(1130): n is a, c, g, or t
  misc_feature (1195)..(1195): n is a, c, g, or t
  Peptide Sequence Number=SeqID_8409
  Probeset Number=SeqID_10313
ttttgggggtgtggnnntcccccgtncccggctttctnaantattaaagacacaaattaaaaaaataataccctccctnganngggctaaattatgggctaccaagagngcccccnaataagaggagtgacatgacaggagcgagggnnttcccctcccccccatctcaaaaacgaagcagaaagcanacaagccagtagaatnataacagaattaacaacacataatgatatactacaagcgtcgttaatcgggctcgaaggagaatgacataaagaaactagaaaccatacaagaaacaatatcccatattatcctctntttatttttttgttntatatctcggtctctgtactccatcacacgcgccggcctttgttctatcaggctcttaaaacccctctacccacaaaacagttagtgtagtgtgtgggtccccactgtcgtgcgggaagacactatagtaagttgtttatttagatagtgaggcatagannaaatcagccccacacatactcttggtatctactcgcatacatctcgtggtgtcgtccggattgagggcagcactagaaaacataacagatacaaatttggattgccatataggagaggatgtaataaacaccccaccacctttctctacactaagtttaatacgtcaggcatgttgagtggtgttgaggttattgtagttatattcaaccgacgatgaaattatagtatgacgttaggatgagncacagcaccacacgccaggctagcaaggcataccatacccncctgtcttgtgtgtgtagtgaccccaccgacataacagccccgccccaccacaaaggttcacaccaccccctccccgcgacagctcgtactagattagactgtcctatatggtaaatcaacaccatcacacaaggtatatatagatatgtctatctagntcaatgatcgcagtatgtctgtgttaggacctgtgccaatctcgtgccnggacgctacgcgcaggtgagtgactatcgcggcccgcgcgccagttcttctacattctgtattctttgccttgccatcctcctagctcctgtactcgggtctgcatcctgcgacgcagaccggactactacacatattantggtacgagtgccagagagaactaactagttgcacatgcaagagacactcgttgtgctgtagcgntggctctctctctctctgctctgggaatcgtgttctagggccgcagagataagagatcgaacacacgatttaccatcatagagcaatccgatgaaactatgtgaatatggtgctatacgtaccataatccacgctgatacacatacacgtgtcgcctgcgtcgaggcgtgttgtagacgagtctggaggactctgatctgg

SEQ ID NO: 535 - DNA, 445 bp, Glycine max
  Probeset Number=SeqID_10314
acttcaagcgacggacaccagaaatccagcgcccgctgatgtcctcaccgatcagaacatgctcacttcaaaaacggcgcctcaagtcattctctccagacaataggggggtgacgaagggcgtcactccaaataagattggcgcctattgtacaccggcactaggacatcgtttgtggagcgagagcgggtgcgcgacgcttacctttgggaccgcgccaaggagaacggcgccaacgtcatcaacggcttgttcttgaaaatggatattcctaaggataataactccccctacagtctgcattactctagctacgacgggaaaaccaatggagctggtgagaagggcaccttggacagtgacgctgacattggcgccgatggggccaattctagagtcgccaaggctatcgatgccggcgattatgaggatggcgtcgctttc

SEQ ID NO: 536 - DNA, 1588 bp, Glycine max
  misc_feature (1)..(2): n is a, c, g, or t
  misc_feature (7)..(7): n is a, c, g, or t
  misc_feature (30)..(30): n is a, c, g, or t
  misc_feature (32)..(32): n is a, c, g, or t
  misc_feature (115)..(115): n is a, c, g, or t
  misc_feature (149)..(149): n is a, c, g, or t
  misc_feature (188)..(188): n is a, c, g, or t
  misc_feature (216)..(216): n is a, c, g, or t
  misc_feature (251)..(251): n is a, c, g, or t
  misc_feature (318)..(318): n is a, c, g, or t
  misc_feature (357)..(357): n is a, c, g, or t
  misc_feature (413)..(413): n is a, c, g, or t
  misc_feature (754)..(754): n is a, c, g, or t
  misc_feature (889)..(889): n is a, c, g, or t
  misc_feature (1122)..(1122): n is a, c, g, or t
  misc_feature (1558)..(1558): n is a, c, g, or t
  misc_feature (1563)..(1563): n is a, c, g, or t
  Peptide Sequence Number=SeqID_8410
  Probeset Number=SeqID_10315
nngatantgatgatttagagttcagcgtgntnaacgtacagctgcgatctagttacagaagcgcgcatctgatcatgcgaatcagtatgagaggcagagatacgcgtaggcgcanacagagagagtgagacagtacgtacatcatcatncgctgggaggcgagaagtaatgagtctacatagatgtgngactgcgatagtcacgacgagcagagtnagtcgagtgtatgatcgatcagagctagtactatnatagtattatagtctagatatgtggtagatgagagagaacgagtgagtcgcgagcgattagtagcancggaataatagcgtagtcaacgcgacaagacacgtgtcngcaagatgataatgaatagatcacgcatattacggacacgaacagtacgagagcancttgcaatcatagagctatgaatgacagaattagcatagtaggcggactgtgattcaatcaccgtgctgtcgcatgcacaccatagtatactagacgggtggctgagtgtccacgtacatctagccgtatgctcaatgatcacaatatcatgtatgcgcactctaagtgtaggtacactcttagtgtagtcgtcgcagcgcgggaccagatatggcgtaggagcagagaaagagcagattgtacgtcagctccattgcgccgtcgctcgtatatacacacagaagcgaacgtcgaagaataatgcagcagtagtcgacagagatgcgtcgtagcgcacatntgctactatatgtgcctggtagtaacagtagagatcacgctagcagtgtcgtcagctgtgctaatcgaatacacgattataggcgagtgcggggctgtagagaggatcaagtaggcgtgggataagagatgaganacattagtgtgggcgggacactacatggaagacaacgcgagatagaagtgtagaccaagagaagctgatgacgaggtagtatagtataaatgatatatccagggctgcgcgtagagtgagcgtcgtattataatagatgtcaagaagtgcatgagactagtaaagtcgcggcatcagcttggggcgcctacgcatacacgagtgcggacaccttctagcccctcaccttctgngcacagctatactgtgtcatagttagataaaggcgtcgtggggggccatatcatgacgagatggtgtagttggagtctggcatgacctatattatgatgacgtcttattacatatcgcgcttgcggtggatagcaagacacaagaacgaacaaggagggataagcgtcgattagttgtggcgcgagggtggatgagggcgcgcaatgaaactagatatgaatgcgaatggcgacgagagtagtgcatactatatgagtgcgtacaacagcactcatgtgccgccttcttcgagaggagagatgagtgagagcatagaaaggacaagctacagatatatcttctgcggtgtctgttgagtggggtgtgggcgagaccgtgagtggcgtgcgccggttggggagagtaaggggaatcagtgagtgtaagagagagagngaagngaagaggacggcgcccggacgaggc

SEQ ID NO: 537 - DNA, 464 bp, Glycine max
  Probeset Number=SeqID_10316
gaggggctttacgctttaccgtgttgaggttttacgagtggtctgtgtagaggagcacggttccatttgctaggcccgtcagatgcagtcatggaagatgagatagatgagcccggcaccaagcccatgggggtgcatgctcggccagctacacggcgttcgttacgatcttctacgctctagagctccagctgttgtgatagacggagcagagtcctgacaccgcgggagcaggtctcctgcgccgcgtatgaacgtgcgacatgaggcgacagagcgccgcgtggtaggtgggcagcctcagccagacgctgaagcagatgctcgttccgtctcttgctcacgtcgcggcgaggaacacgcacaagtcgtcgagcgttgcgagcgtagtcgtcatcctcctttctcaccagtcagtagacaccagagaggtgatggtcgcttcgcgtcgagagtcgtgatca

SEQ ID NO: 538 - DNA, 602 bp, Glycine max
  misc_feature (231)..(231): n is a, c, g, or t
  misc_feature (391)..(391): n is a, c, g, or t
  misc_feature (407)..(408): n is a, c, g, or t
  misc_feature (410)..(410): n is a, c, g, or t
  misc_feature (439)..(441): n is a, c, g, or t
  misc_feature (456)..(456): n is a, c, g, or t
  misc_feature (467)..(473): n is a, c, g, or t
  misc_feature (480)..(480): n is a, c, g, or t
  misc_feature (506)..(506): n is a, c, g, or t
  misc_feature (524)..(524): n is a, c, g, or t
  misc_feature (527)..(527): n is a, c, g, or t
  misc_feature (548)..(549): n is a, c, g, or t
  misc_feature (556)..(556): n is a, c, g, or t
  misc_feature (587)..(591): n is a, c, g, or t
  Peptide Sequence Number=SeqID_8411
  Probeset Number=SeqID_10317
aaaaactcattctcttttcttaatctggtcttcactttttttcatgtttgctggaatctgatgtaaaggtgtccaacctgtggtgaaaaacatggttcgattctttagcgcggtgtcgattctaattctggttgccgtgacagcattgatggtagtgctaccactgatgttgtcaccactccctccgccaccgcttgttctcctcttcttccctgtcgggataatggcggngcttatgtttgtttgcggtttgtggttgtcggaggacccctgactaccaaagacatccttttctgaggattgtagaataatagaggaatagaaaggtttgcaagcacacgtgattcttcttgctcgagaacactttttactttttcttgtgataagagangaaaaacaactgtttnngntttagattgtacagcaaaactggctgatnnnacaatacatgatagnatatatatatnnnnnnntagtagngaacccaattattttttttcttctcnaaaaaaaaaaaaaaaatnatncgagtaccgcccgacctctcnnggcaggnggggccgcgtaaccccattttcccccttcannnnnaattgaaaaaa

SEQ ID NO: 539 - DNA, 485 bp, Glycine max
  misc_feature (1)..(1): n is a, c, g, or t
  misc_feature (3)..(4): n is a, c, g, or t
  misc_feature (13)..(13): n is a, c, g, or t
  misc_feature (15)..(15): n is a, c, g, or t
  misc_feature (17)..(17): n is a, c, g, or t
  misc_feature (26)..(27): n is a, c, g, or t
  misc_feature (34)..(34): n is a, c, g, or t
  misc_feature (38)..(38): n is a, c, g, or t
  misc_feature (45)..(45): n is a, c, g, or t
  misc_feature (52)..(52): n is a, c, g, or t
  misc_feature (54)..(54): n is a, c, g, or t
  misc_feature (57)..(57): n is a, c, g, or t
  misc_feature (66)..(68): n is a, c, g, or t
  misc_feature (85)..(85): n is a, c, g, or t
  misc_feature (88)..(88): n is a, c, g, or t
  misc_feature (99)..(99): n is a, c, g, or t
  misc_feature (102)..(102): n is a, c, g, or t
  misc_feature (113)..(113): n is a, c, g, or t
  misc_feature (126)..(126): n is a, c, g, or t
  misc_feature (132)..(132): n is a, c, g, or t
  misc_feature (136)..(136): n is a, c, g, or t
  misc_feature (140)..(140): n is a, c, g, or t
  misc_feature (161)..(161): n is a, c, g, or t
  misc_feature (180)..(180): n is a, c, g, or t
  misc_feature (184)..(185): n is a, c, g, or t
  misc_feature (187)..(188): n is a, c, g, or t
  misc_feature (204)..(204): n is a, c, g, or t
  misc_feature (217)..(217): n is a, c, g, or t
  misc_feature (247)..(247): n is a, c, g, or t
  misc_feature (249)..(249): n is a, c, g, or t
  misc_feature (251)..(253): n is a, c, g, or t
  misc_feature (265)..(265): n is a, c, g, or t
  misc_feature (293)..(293): n is a, c, g, or t
  misc_feature (298)..(298): n is a, c, g, or t
  misc_feature (309)..(309): n is a, c, g, or t
  misc_feature (446)..(446): n is a, c, g, or t
  misc_feature (448)..(449): n is a, c, g, or t
  misc_feature (454)..(454): n is a, c, g, or t
  misc_feature (456)..(456): n is a, c, g, or t
  misc_feature (458)..(458): n is a, c, g, or t
  misc_feature (461)..(461): n is a, c, g, or t
  misc_feature (466)..(466): n is a, c, g, or t
  Probeset Number=SeqID_10318
nannctcatcgantncntcaccaccnnaatcccncgtntcccctntccgagncnccnaggtttccnnnaatctcccggcggcgcnccnagctatcatcnccntcaccatttcncccctcgcgtggncgatcnctcnttcntcgtaaacctcggcgatcgangagttcggacacatgttgncctnngnnccgggggggggggcgnaaaaaaaaaatcnggggatcaacttcgattccggacccagaananannntggcgttcgtgncgttgaaggccgcacggtgatcgggaanttatnttttaccggantcatagctccgatatgttgctccgtcccgatgaactcaacctcgatctcatcagatcggtacgtaaatctcctctctctatccctcatgatcttcaagagatccagatggaagtagagattcatagtctagtttttncnntattntngnggngaaantaagagatgctgtaagtat

SEQ ID NO: 540 - DNA, 1241 bp, Glycine max
  misc_feature (797)..(797): n is a, c, g, or t
  Peptide Sequence Number=SeqID_8412
  Probeset Number=SeqID_10319
aaatcataaatcataaatcataaataaaatttatagatttttctcaattcatgtatttatgttccgaaaaaaaacttatctactaatgtgactccgtgaaactatctttggagaccgcaacggcttcaggaacgaagcgatttggaagactgagtcagagactctgaatgaatcggttggagagataagtcataagagatccttgacagaatcccttgttcattccgaaaccgctacaaaatcatgggtggcaacggcaaacacaggtggaaattcagcttccaccgttcctccacccatcctcccaaggaattcacctgccccatttccggctcactaatgtccgaccctgtcgtcgtagcttcgggccaaaccttcgaacgactcgccgttcaactctgcaaagacctcaacttctcccccaagctagacgacggcacccgacccgacttctcaaccctaatccccaacctcgccatcaaaacgacaatcctccactggtgcgacaacgcccgcacccaacacccgcgccctcccgattacgcctccctccagcgcctcgtcttagaacaaaaagaaaatgaccgcgttagggtttccgaaatggagcttctcaacgccgtcgccgacctccctcccgtcatcttctcccacgccgccaccgagttaggcccccgagtcaaccacttcaactcgggatcctcctccgagcaggaatccgtcatcatcccctcgagtccgggaactccgttaccgttaactattcgcccgacgcgcttctcctcttcctcctcctnctcctgcgagatcgaaatcgaaaaccctaacacaccggcgtcggaggaagaagaaggactattaaagaaattgaagagtaacgaggtgtttgagcaagaagaaggcgtaatcgcgctgagaaagatcacgaggaacaaagaggatgctagggtctcgctctgcacgccgcgggtgttactagcgctgcgtggcgtgatcgcctcgcgatgcggtgttgtccaggccaacgccgtgggcgttcgtggtaaccgtgctatagaaaatcagaaccagatgatgcatcttaagtcgcgcatcgcagcgttaatggcgtagacgtggcgagtagactggttaagttgtcgcattacgtgtatcatcgcgtctgattgggttgatcgatgatcaatagtaggcgattgtgccttcaacaactcgtggtatgacttgtaatacttcggcgc

SEQ ID NO: 541 - DNA, 2158 bp, Glycine max
  misc_feature (79)..(79): n is a, c, g, or t
  misc_feature (381)..(381): n is a, c, g, or t
  misc_feature (444)..(444): n is a, c, g, or t
  misc_feature (461)..(461): n is a, c, g, or t
  misc_feature (523)..(523): n is a, c, g, or t
  misc_feature (582)..(582): n is a, c, g, or t
  misc_feature (616)..(616): n is a, c, g, or t
  misc_feature (630)..(630): n is a, c, g, or t
  misc_feature (652)..(652): n is a, c, g, or t
  misc_feature (720)..(720): n is a, c, g, or t
  misc_feature (822)..(822): n is a, c, g, or t
  misc_feature (878)..(878): n is a, c, g, or t
  misc_feature (937)..(937): n is a, c, g, or t
  misc_feature (1218)..(1218): n is a, c, g, or t
  misc_feature (1283)..(1283): n is a, c, g, or t
  misc_feature (1289)..(1289): n is a, c, g, or t
  misc_feature (1294)..(1294): n is a, c, g, or t
  misc_feature (1359)..(1359): n is a, c, g, or t
  misc_feature (1382)..(1382): n is a, c, g, or t
  misc_feature (1470)..(1470): n is a, c, g, or t
  misc_feature (1642)..(1642): n is a, c, g, or t
  misc_feature (1647)..(1647): n is a, c, g, or t
  misc_feature (1729)..(1729): n is a, c, g, or t
  misc_feature (1732)..(1732): n is a, c, g, or t
  misc_feature (1734)..(1734): n is a, c, g, or t
  misc_feature (1736)..(1736): n is a, c, g, or t
  misc_feature (1759)..(1759): n is a, c, g, or t
  misc_feature (1789)..(1789): n is a, c, g, or t
  misc_feature (1837)..(1837): n is a, c, g, or t
  misc_feature (1872)..(1872): n is a, c, g, or t
  misc_feature (1881)..(1881): n is a, c, g, or t
  misc_feature (1915)..(1915): n is a, c, g, or t
  misc_feature (1925)..(1925): n is a, c, g, or t
  misc_feature (1941)..(1941): n is a, c, g, or t
  misc_feature (1980)..(1980): n is a, c, g, or t
  misc_feature (1982)..(1982): n is a, c, g, or t
  misc_feature (2075)..(2075): n is a, c, g, or t
  misc_feature (2143)..(2143): n is a, c, g, or t
  misc_feature (2148)..(2148): n is a, c, g, or t
  misc_feature (2158)..(2158): n is a, c, g, or t
  Peptide Sequence Number=SeqID_8495
  Probeset Number=SeqID_10320
ctttctctatgttctctctcgcgtgcgcataaacccaccgacgacgcgtgtgccagagtatatggatcgagaatttgtntccaataatcaaaagtggagcgcgcgcgacgccccccttccggatgggtatgaatgctgatagtcaaatcaaggcctaatgttctcgcacccttcccctctccatcacgcagagacacagatatacatatcattatatataactaatatatctctatgactccgggagacgtgcactcacaccttagctaacttacatacgcagcattgctctacgatctccgttatatagcggtgtacactcgagcggagccgtctgtcgagtgagttgacacgcacgccgccggggtgaatattatacantcattagcgttacgatgtagtcggcgcacgctgcgaggtcgccacccgacttacgtgcgcttntgccctcagcgcgtacntactcgatagcgtagagcgtccagcgccgtacgcatcccagttgctacgctctagttacatncataagatagcgtgatgaagcgataggaagcgctatcctcatggcgacacaaaaatcgntctcatcacttaccccgcgtctccggcccgtcgnactacgttgtctcntagtttgtagtaccgctagtgncacccgctgcgttggtctgtagcgtactatcgcgacgcctcacaatttaatcatttatctgctcattntgacacgcctccatcgcgatcacttcataatcgtgcaacaccactctacgaccctaccacatgaccaaccccaatctatctactccatcctctaatatatanatacgcagcagctcagcatacgtctctgtgagcactgcggcgtgtgtcgagattgntgactgtcgtcacttattcggtgtcgccgtcgcgcggatgccgtggcgctcttatatcntatattacttacgtccatctgcttatccatgagatatagacactgcgccgacggcgccgtgtcgccactagtgtgactcacgcatagactataatgtgacaactgtccacatccgcatagccagctcgtcacaccgtgatatagaagtctcgcgatcaacgagacatcagacgcgctcacttatcgtcgctacgcggcgtatctctgtagtgtcagatatagactccgaaagctacccaggcgtgacagtatgatatgacaagcacatctgtgctactgantgcctcagcgatcagagtgtcaccgagagctctatatagcccgcgcaatgacggacctcagaganggagcnagtanatacatctaagatgtgctgcgtggagtcacgcatgcacactcgatctcactgcgcactgctgacnctgccttgatgtgcgctgcatcncagacactccagtcagatgtcttacactcacgcgcttatcgtgctcaccgcgcacgagctcagcactatagcgtaacctcagcgagcnggacatatatatatatgatatctcgcatacacgcgttagtgctacatcactcagatacttcaccctatcgtcatgtgccacgctatcgtatgctgtcggctcgacgtcgctgctcgactctcgcgcgagatatggctaactgatgataccgacagatcatgtctgcttggtntactntggtcacgatcacgaactgcgactctaatgatcttatgagcaatgaatatcctacacgagcatgtagtcccacgcagactanttnangngcacggtatgaactatagcgcgnacaacgagctgcacggtaagtcgagagtantgtgatcacgacacagcagagacgtagacatgacgctgtcccagacgnacgcactggctacagcgcactacgtagacgggatngctgtgatnatatactctatctgcgtcatcatatcacactctngcatgatacntgatgcgcgcactgancgtctcagtacatgccatgccttcacatgtcgcgcgtcncnacgtatgtcaagattatttgcataacctctcgtcgcgcgagcgaccgagcgttgtatgcagaacacagcttactacatcaaaattagtgtgtnatgaggacactataccgttatacgtaccttctgtcatgtcgctactacaagtactctagacacgtctnatcantcgtgcgcgn

SEQ ID NO: 542 - DNA, 1526 bp, Glycine max
  misc_feature (1)..(1): n is a, c, g, or t
  misc_feature (101)..(101): n is a, c, g, or t
  misc_feature (105)..(105): n is a, c, g, or t
  misc_feature (107)..(107): n is a, c, g, or t
  misc_feature (110)..(110): n is a, c, g, or t
  misc_feature (194)..(194): n is a, c, g, or t
  misc_feature (243)..(243): n is a, c, g, or t
  misc_feature (369)..(369): n is a, c, g, or t
  misc_feature (461)..(461): n is a, c, g, or t
  misc_feature (482)..(482): n is a, c, g, or t
  misc_feature (501)..(501): n is a, c, g, or t
  misc_feature (606)..(606): n is a, c, g, or t
  misc_feature (1211)..(1211): n is a, c, g, or t
  misc_feature (1290)..(1290): n is a, c, g, or t
  misc_feature (1339)..(1339): n is a, c, g, or t
  misc_feature (1526)..(1526): n is a, c, g, or t
  Probeset Number=SeqID_10321
naaaaaaaggtagggtattatatatatacaaaaaaaataactaaaacaactcctgacaccaatgataattaaattgtttagaatattttttttattattanccanantantcgtggcactccccccaccacgatcgagcgagtatacgtttcactacgaaaatgatactatgctgcgtgacgggttactcttanctactagcactatagagagagaggtgaatggtaagaaatagtttgaatnatacttttataataatgatactaatataacggagaagaatagagatgaaagacacaacagccagaaccacccagctacttgagaaggagcggaaatccaatcacatagataaatgaaagacgggtntggtgtcgtctcacccttcagactgaaaggcacatccgtacttgcaatctcagaagttgcttgatagtcgtctaataggtgcaatatataanacatatatatataacacacgntaatataagagagaacgangatgggccctgtaagagacaaagcatatacagtaatatcatagaaagaattcacctagcgcggcagtgtactgacgtgtgtgtagttacactttaccacacgtgnaatatatatacaatacacagtattaaatcatataatgtataatataaataatgatagacgaaatcagcagatacaagatatagacgacatgaagatatgtacaagatagacagagaaacacagaataagtaaatgataagacataccgatacacaagattactagaaggagagtctctgttagctcaatatatagaaataaccagagacaacacgataatacatcactctcactagcgagtgaagagatggtactcgatattgactagaggtagagatgagcatggcaatgtatatgattgtccagaccattgaagaggtaacatcagtaggcatgtataacagattatcattcttctgttgattaaatattaacaagcatagatagtaccaaacgcttcgacaataacaagactcatttatactaagatatatagatcagtctgcgagatgtaagagtctatatgacatgtatcagcttaatatacaatccaccgcacacctcctccgccgcgcgcgtacacgatcgagaatcgatatcgatcgcgtcgctgtcatgtctcacaccaacatgatgatcctagcgtctagtcagcaagcagagangcaatagacactagtcatatacgtctcgaatatatatgtgatataaccacaacgtatatacttcactactgcatgctcnctcacatctgagaatactagctagactcgcgtatctacgcgtcacacgntgattgatgctcagagtaaggacgatgaagtgatgcagatgcaatacatctgcaccgtcgtgtaatattgcaatatctcgtgacacgtcatcagacccactcaatcgatacgagcatgaacaatgacgactatatcaccatcgacgtaatatcgctgacatgtagctctgttctcacgctcccgacn

SEQ ID NO: 543 - DNA, 1791 bp, Glycine max
  misc_feature (82)..(82): n is a, c, g, or t
  misc_feature (185)..(185): n is a, c, g, or t
  misc_feature (196)..(196): n is a, c, g, or t
  misc_feature (429)..(429): n is a, c, g, or t
  misc_feature (629)..(629): n is a, c, g, or t
  misc_feature (707)..(707): n is a, c, g, or t
  misc_feature (859)..(859): n is a, c, g, or t
  misc_feature (961)..(961): n is a, c, g, or t
  misc_feature (991)..(991): n is a, c, g, or t
  misc_feature (1231)..(1231): n is a, c, g, or t
  misc_feature (1371)..(1371): n is a, c, g, or t
  misc_feature (1451)..(1451): n is a, c, g, or t
  Peptide Sequence Number=SeqID_8496
  Probeset Number=SeqID_10322
cctcgttcgcgtcgtacgacatttgacggtcttatatgttcgcgtgggcgatatcgacgatagtgtatcactgacatttgcntgctcgggcgcacggcgcgcttgcagctctgtcacacatcatcaatttctccgcgcgccgcgcggccgctagcgagtttatgcgcggtactatgtatattatncggcggtcgcntcggcgacgagagtgcacctacgtcattcatgtctgtatgtccgcttatcgccgcagcgcgcgcgtcggcgccgtgtatatattcgtgtcgtctctcgtccgcgtgtccgcgacagtgctgtattgtattacacaccatcatttatgtgccttgtgattcttgcggccgcggcgcgcgatgtcggacgatatattgtcacgctatctattgtgtcgcgcgcggaccgagccgntgttatgtatgtggcgagcggcggtattatttaatttgtgcaatatctaccgcgcgacgtcccaacaatatgcgtgaggtagatatgaaacgggtagtggagtagctcatcaactaatgtggcgctgcacgcacatacatgcgggaatattatccaacacccaccgagcgttttggtacgaatacacgcagttgcatcantcatagttgatgcgcgtcacacagcgagtgtcgcggagacaataagacgagtggagtgtgcgtgaatatgacgtcggncgcggcgttgtcgggcgtacaaacatcaccgttcagagcgagggttgcatagcacgatgtagtatgatcagatgaatgtgctatatcatagtatcacgcgccaccgcctatgtcgctggtcgtttattatgcgtcagcagcacgctgcgtgntagagtgtacgacgagcttgtgtatgaccgcagtattttatcgcccgcgcggttattattcacgttgccgccgacaccgacagacgtatgtttatttttacncccgcggcggcgtccacattctttttctcnatatcaactccgacaatataattaaatacgcgccgcgggggtggagaaaatggaagagcacgaatggggttggtgctcggggttcgactgcgttactttttcattcgcagaggtcgtatatatgtgtataatcttaccaccggcgcgcgcgccgatatatctaggcgtcgttgatagttgtcgccgtgagagcggggacggtgtgtataaaacacgttgctaggtttttagttatgtgtnggcgcgggggggtgcacccaacgccccgcccgggcggttgtttatattcgcggcgggcggatagtcactaatcaaaataagtgatagcgggcgatcgggacatttatataatataaagagggggcgggtgagatgttgtnattatatgtatatatagattgcgggggttttattaaaatgcggcactcctatccgggaacgataatattataatattttnaggcggcgcgtgtagataaatgctgtgggcgccgcgggaagtgagagtgtgtataagaagtgtgatgagtgttggaaaactattccgcatagtcgtagtttgagtgcgcgcgaccctcgacactaccactattcgtattaacaaaaccagtgctcgcgccgccttcagagtataatgggtataaaataagcatgggtgaaactgcacaggcgcgatagtggtgtgtgcgtataaccgatgcggatgaacagcgtgaaaggcgtggaattacagcgcgcgcggaaaatagataggcggtgggaaaaatagtattgcgtggagcgggatgctgggcaccaca

SEQ ID NO: 544 - DNA, 1387 bp, Glycine max
  misc_feature (19)..(19): n is a, c, g, or t
  misc_feature (25)..(25): n is a, c, g, or t
  misc_feature (32)..(32): n is a, c, g, or t
  misc_feature (52)..(52): n is a, c, g, or t
  misc_feature (60)..(60): n is a, c, g, or t
  misc_feature (70)..(70): n is a, c, g, or t
  misc_feature (129)..(129): n is a, c, g, or t
  misc_feature (195)..(196): n is a, c, g, or t
  misc_feature (205)..(205): n is a, c, g, or t
  misc_feature (277)..(277): n is a, c, g, or t
  misc_feature (404)..(404): n is a, c, g, or t
  misc_feature (409)..(409): n is a, c, g, or t
  misc_feature (506)..(506): n is a, c, g, or t
  misc_feature (718)..(718): n is a, c, g, or t
  misc_feature (1138)..(1138): n is a, c, g, or t
  misc_feature (1210)..(1210): n is a, c, g, or t
  misc_feature (1387)..(1387): n is a, c, g, or t
  Probeset Number=SeqID_10323
gtggtggtttgctcccccntctttntgtgttncctcccgggtcttgtttttntttatttntgtatgtatngatagtcttttatgtagtatggatgtggttgttctctccagccacgcgaggaggagggnatcgcagaatagtgatgagacatcacccgactgaggatgctagggagaccgtcccgcatggagtanncacctacgncagagagagtgatatgtttatcacgctacatagtattgtggtctttagatctgggtgcgccgcccgagactnatagatggggcgcaaagacatgacgtcttatgatcatcatctgtacacatacattacgacttagacactaacgagcgacatattagaactcctcattcctcgagacgtgtctctatggaatgatcangaggnacatccgtgatgtgcggaatcctcctctcctatattattctcatcatagtaagtaggtacagagtaacactcactaccatcccgcgccagcactgcngcccatctcagaccgacccaacacatctcagcccacgcacgcacggacgcaccgcagttcagcggggatgaggtgcgagaagcaccagcccatatcattatactatctacctcaaccacacgtcacccatgtcagctattatatggcggtgcacgttatgctccgaagtctatcgccacgctcgcgaggcatgtacgagagtagacagggtngatcgtgtgtagactggcacgcccacgctcctcgcaactccactctgacatcctcgcccctcaattgtaaagtagtacttcgttgttcctgcgacgtacaccaagaactcggcagtctgggcgcacagcagtgcgatacagctacactgagcgcgacgacagctcgtaaggctatcttctagatctgcacacatcatcgcatctgataccgttcctgacgtcattcatgtcgcatcatcccctaccacgatactctgaatctcgcaatgatgtgcgcatgagaacgagagcatgagagaaaactcacgcttggctcgcggctttatctagtgagaactgctctgcgcaggtacctatatcgcgacacgtaccaggacatatacagccatccagctaacgcgcatgtcacacagacaggtnctagtacgcacatacgtacgcagaaccagcacacacaacacaagcaatcagcctatgccagtagctcacganagtagcttagatgcgtgtgagcgtagcatcatctcgctctatcagctcacgatctacgtatcactctcacgcgctcttgcgtgtctacgcgtcgggtctctcgccacgacactcttgtggagtgctactcgcaatgtgtgtcctatgagttctctctactgattgcacctatgtaan

SEQ ID NO: 545 - DNA, 1811 bp, Glycine max
  misc_feature (357)..(357): n is a, c, g, or t
  misc_feature (492)..(492): n is a, c, g, or t
  misc_feature (740)..(740): n is a, c, g, or t
  misc_feature (1254)..(1254): n is a, c, g, or t
  misc_feature (1490)..(1490): n is a, c, g, or t
  misc_feature (1596)..(1596): n is a, c, g, or t
  misc_feature (1616)..(1616): n is a, c, g, or t
  misc_feature (1684)..(1684): n is a, c, g, or t
  misc_feature (1723)..(1723): n is a, c, g, or t
  misc_feature (1771)..(1771): n is a, c, g, or t
  misc_feature (1811)..(1811): n is a, c, g, or t
  Peptide Sequence Number=SeqID_8497
  Probeset Number=SeqID_10324
agggagagaaggagggggaaaggaagaaaagtgacagtagagggagaggtaagaggagtgaagagaaaaagacgagagcaggttggggccgggaccttgaggggggggggcgcggccgcggaggagggcgaagaagagaagaagagccggcttgaatcctcacaaaaaggagggaggggcgagggagggagaacgagaaaaaattatacgcaccagaagaaggaagaaggcgcggagaagaggagagcggaagcagaaaatcgacagagaggcgaaagaaggggcgagaggaaggagacggggtgttgaaccgcccgcaaagcaaagacaggagagagggagaagaggagaaatgangaaagcagaagcgaaacggagaaaggcgaggggagagagaagaaggaagacgagggaggccggaaggaaaggcgagcaggaagaagagcgggaggagaacgaagaaaagaacgagagaagcagagcgacagatanaaggagaaaagaaaaaggagtagcggcgaagaagagaagaaggaagaaagaacggagaaggagaaaagaaaggaggggaggggcgagcagcggcggaggaagaaccgacaggggagagaaagaaaaatgagagagaaaacggaaccacacggaaacaaacagagaaaagagaatgaaaggcaaaagaaacgaagaagaaagaaaggaagacgagcgaggggcggggcggacaagaagaggcggcggangacagaagaaaaaaggagaaggcggaaaggaaccgcgccggcggcgagaaagagagaacagggagaggagagaagagcagccggggaagaggaacgcaagtaggcgaagagagtgaaggaaggggacgggagagaggaaggcgagagggacgagggagaacggagagacacgcaaggagaagagagagacgaggagaggaacgagacgaggaggagagcgcgggaagaccggcacgacacgcgacggagagcacgcgaggcacgagacaagaaagagaagggcgagagaagcgaggcaagagaagaagagaggtaggaggaagaagagagagaaaggacgagacagaggaggcgaggaagaaacgatcgcgagagaaatgcgagcgggacaaaacaactgagaagacacgacgagaaaacacaacagcgagaaaagagttgcagacgagagagcgagaggatagataaacgaagagagaggacgggaagagcgaggagagagaagagaagatantatagagggaggagaaataagtaaagaggaaaggaactcagcacgcgaacgcgcggatgacgcaaagagacaaagaaagagcgcgaggagaagaaaggatgagagagaggaagacgagaggcacagaggagagcagagaagaactaacgagagcacagtagagtttacacacatgatagacgtcagcaggtaaatgcgtggtagacgcggcgacggcgatccgtgagagaggacgnggaggcaacaggaagcgcacgcgagaggcaggaagcgagcgggagacacaaaatcgacagataggaaacgcgcgcacacgacagacgcaagacagacggaggaggnagcacacacacggtgagaancacaatgaaatgagaaacaaggcgaggaagagagacaacagagtgtggaaaagacgaggacgggacgngacccatgcaagcaagggaggagggtgatagacggaaanggtcacatacaggggatgaagtgaggtgaggcggagatggcggggggngacgggagagtgacagaggacggagagagcacgaagagan

SEQ ID NO: 546 - DNA, 662 bp, Glycine max
  misc_feature (553)..(553): n is a, c, g, or t
  misc_feature (577)..(577): n is a, c, g, or t
  misc_feature (625)..(625): n is a, c, g, or t
  misc_feature (633)..(633): n is a, c, g, or t
  misc_feature (639)..(639): n is a, c, g, or t
  misc_feature (643)..(643): n is a, c, g, or t
  misc_feature (649)..(650): n is a, c, g, or t
  Probeset Number=SeqID_10325
ggaaggtttcccttgaagcaggtaccggtttatgtagtagctcaggttgttggatccacacttgcaagtgcgactctcagactattatttagtggcaaggaaacccagttttcaggaacactcccatctgggtctaacctgcaagcttttgtgattgaattcttaatcacctttttccttatgtttgtcatatccggggttgccactgatgacagagcgatcggtgagttggccgtgattgccgttgggtccactgtgctgttgaatgtgatgtttgcagggccaatcacaggagcatcaatgaacccagcaagaaacatagggccagccattttacacaatgaatacagaggaatatggatatatatagtgtctacaactcttgaggccgtggctggaacatgggtataccacaccatttaggtcacaggacagccccttggtgagatcaccaagagtaccttctttctttaaggaataggagcgtgtagtagctctagggtgatttatttaccaaattattgctcaattgagagtgtatcatgtgtcatgnccagaggagtacataatcgggaanagttgtatgtccaaattgatagtttcgagatcatgtgacgggctgaantagaggangaattnactntgtttnngtcggaaccatc

SEQ ID NO: 547 - DNA, 594 bp, Glycine max
  Peptide Sequence Number=SeqID_8498
  Probeset Number=SeqID_10326
cccacaatgagacacagtatatagagacgctgtcgcgctctctcggggtgtcacacacatactcacaagagaaacactccgcgtaggagattttgtgacacagggagggtgtccactcttcttcttccacagtgaggtctcccactatttttgggggagggggcgctttatacacaaggggttttctcgcaaataaaatggtggcgagtccccaggaagaggggggggctcatgtcacaggtatatctcgcgcaaagagaaggggtttctcgagtatttgggggtttgatatgaagaggagtttttatttttttatttacacccgtgatttttgtcacagtcactcacctcggggggcacagtttgtgtcgagaatatttttctgcgcgggtcacacacaaggggtaaaatcttctctgggaaagtgagacgctcgcaagagggggtacactgtttttctttctctgttcccaatatttgtttttccgccagagacccaccacacacatttctcgtggagcgccgtgtactcataaaatttatatagtgatattgtgaaaagatatacacatttgtgaaaaaaaaaaaaaaaaa

SEQ ID NO: 548 - DNA, 2389 bp, Glycine max
  misc_feature (1)..(7): n is a, c, g, or t
  misc_feature (1893)..(1893): n is a, c, g, or t
  misc_feature (2389)..(2389): n is a, c, g, or t
  Probeset Number=SeqID_10327
nnnnnnnggtttttcagcggggacttgcgtcgcactcgcaggcaacaatttactgcgaggtacggaatccgtgaattttccggcgaggtaagattccgttgaaattttgctttggtccgagggggagggtggaactttgtggaattaggatcgatttggctccagatctgggaattagggtttagttttggttgcgggtgatgttaattttgggggagaggctttggtagatggaatccggcttgagatcgggtggttctggggttgtggtgaagagcagaaactcatctggttgtttaattgtgcgaaagaaaggggatgggttgggtgctactgcttccacctctcgcaagctctatgaatccaagaaaaggccaaacatcaacgtgtcattgagtgattctggatcaagcgaggggtcactaatacctcctggtagaaggcttggtcccgagactattcgagtttgcaatggtttggctgcctctgagcggggtgggactgaaattagtcgaaagagggatagagtacaacgaattaaaggtaatggggagggtattgctgcggagaaagggttggagcagtgggaaagaaagcgtagtaagttgggtgtgtacgattttgatgattacgatggcatggatttggagaacatgaggaggaggcatttggatggtcatggaggaggaagctttatgggatcagtgcatgctgctagaagtggcattgatagggaattcataacaggttcaagtgtacgaattcttgataagagaaagaactcttacggtgacagacctagtggcttgtatctgggagataatgttgatcacagtaggtacaagataaacagggatggagtctgggtacctctacgcttgcagagggaaaagtttaattcagatgagtcgattagggttcaggggaagaatggtgttttgaaggtaatggttaataagaagaaggtgggtggtccatcagaacaggattatgatcatcacaaacctgtggaaggcaggcaaaggttgaagactgaagagactgctaagaggttgatgactgaagagactgccaagaggttgatgactgaagagactgccaagaggttgaagactgaagaggctgccaagaggaatgttccaattcgtcctttgtcatacttggaaacaaaacctgttgagaaaccaggattactcaagaggccagagaataaaagggtagcatcaagaaaatcgttgtcaagcaaggacagtaagggcgatgagggggattcagataacagtgacacatcattgaatttgggaataagaaatactgaagcacggaagccagcaaaaaatgtaatgtctgaggatgagcagactcctgtgcatgaaaaactcccaaccacaagaacaaaagaaggaaaaatcaagcgtggaagtggtacagaaaaacagaaactgcgggaacgaataagggagatgctgctgaattcaggttggaccatagactatcgacctagaaggaacagggactatctggatgcagtttacattaatccagcaggtacagcttattggtctatcatcaaggcctacgaagcacttcaaaagcaattgaatgaagatgctaatgaggccaagcccaaaggggatagttcttcttttgctcctattgcagatgaggtgctcaatcagctaacaaggaaaactaggaagaaaatggagaaagaattgaaaaagaagaaaaaatactgatagtgaaagtgataatgaaaaagagcctcaaataagatctgccagcaacaagcgtgatttgaatagcacagatggtgataacaatgaggagaaattaagctcctttataaagcaggggaagtaagtcaatgaaaaataaaatggtttgaagatnaccattatgagtgctcgctctaaaatccagaatgctaccaatcactcaagtgatggaatagaaaaatcattatttgaaatgtgatcctcatatacatggacagaagagcaatgactttaagtatgacatatttggatggattattcttgcagtgggtatagtagcatgggtgggaatggccaaatctaacattcccccgccacctccaagataaacatatttctttgatgaatcattaccaaattattggtgattagttattcactttagattggaagttgtgaactaggtattgcacatgtggttggtttctacttactgagttcatttatcatttacagtttaccgtaaaaaagattggttttaagaattagcatttttaacatatgttgcccactatttgtagccttactggttttaagaattagtttttttgcaactttaggaaaaataaaaaaaaaaaaaaaaaaactcgagactagttctctctctctcn

SEQ ID NO: 549 - DNA, 1583 bp, Glycine max
  misc_feature (162)..(162): n is a, c, g, or t
  misc_feature (305)..(305): n is a, c, g, or t
  misc_feature (330)..(330): n is a, c, g, or t
  misc_feature (360)..(360): n is a, c, g, or t
  misc_feature (369)..(369): n is a, c, g, or t
  misc_feature (529)..(529): n is a, c, g, or t
  misc_feature (587)..(587): n is a, c, g, or t
  misc_feature (614)..(614): n is a, c, g, or t
  misc_feature (643)..(643): n is a, c, g, or t
  misc_feature (645)..(645): n is a, c, g, or t
  misc_feature (737)..(737): n is a, c, g, or t
  misc_feature (790)..(790): n is a, c, g, or t
  misc_feature (827)..(827): n is a, c, g, or t
  misc_feature (897)..(897): n is a, c, g, or t
  misc_feature (1105)..(1105): n is a, c, g, or t
  misc_feature (1111)..(1111): n is a, c, g, or t
  misc_feature (1173)..(1173): n is a, c, g, or t
  misc_feature (1188)..(1188): n is a, c, g, or t
  misc_feature (1340)..(1340): n is a, c, g, or t
  misc_feature (1418)..(1418): n is a, c, g, or t
  misc_feature (1420)..(1420): n is a, c, g, or t
  misc_feature (1425)..(1425): n is a, c, g, or t
  misc_feature (1452)..(1452): n is a, c, g, or t
  misc_feature (1467)..(1467): n is a, c, g, or t
  misc_feature (1469)..(1469): n is a, c, g, or t
  misc_feature (1504)..(1504): n is a, c, g, or t
  misc_feature (1524)..(1524): n is a, c, g, or t
  misc_feature (1538)..(1538): n is a, c, g, or t
  misc_feature (1544)..(1544): n is a, c, g, or t
  misc_feature (1553)..(1553): n is a, c, g, or t
  misc_feature (1565)..(1565): n is a, c, g, or t
  misc_feature (1568)..(1568): n is a, c, g, or t
  misc_feature (1575)..(1575): n is a, c, g, or t
  misc_feature (1583)..(1583): n is a, c, g, or t
  Peptide Sequence Number=SeqID_8499
  Probeset Number=SeqID_10328
ggcgagtgccactacctctcacacacccgcgatcacctgtatacgcgtgctcctatctacatctgctcgtatccctacacataacctatataccacactacatcctcactcccactctgcacgtcgatgcgcgctcgttcggagctgctgtaacacaactanagacgcataatctcgccactgcgtcgtatagtgacgagaaggagtgacagcatctgtctgtacccacgatctctagatacaccaaccactactctcaatatgcacgacatatatagagtacatcactaatatctccgctggtncgtagtgcatgacgcgcgcgcaganagacacctcgaagcagagaaggtcgtatanttatgcgangcatgatagacgatagcgcccacgtccatagcagagtcgatcgctatacataagccgagacagacatgtccgatgtgtaacgcaatgtcgattggataagacatccgtctcatacactcccagtccagtgacggtcagataccatacgctaattctgttnattattatcggtccaccaactgttgtcggcacagtgctgttctatactctcctatgcntgttcagccacttaactcggagtagcnacgtagtagatcagtagtggtgaatagtngnactgtagtacgtgtctcgcaacaccagaacgacgtaggataaccatacacgtgcgctcgccacgcatccccacactacgtatcaatacttancgatacactccgtatgaacagtaagaagttcgtcacgagctagaccttaccgntctcttatatgtaaattttgtggataaacgcgcaccnatcgttgctgcatatacattctctgttctctacagagtatatatatagagatatctgacccgggctagcnacacgccacccccctcccgcgacatgcagtatgagtccgtgtgcaaattcggtcagcgctcacgcgacatcattgtctttatactatctcataactcccaccactctctcgctaacacagctgtacatcgcacaccgcactatctctcctatagacacccgcaatagtaaatctcctactgacacatcactctccacataccgccacnccactntagagattgtacatctccctctctctctcccacgcgttcacacgcagactcagatacctgantgtgcgcgtccacanatacgacgactccacctcatccccctcgcctctccgactcgggtatatttatcacgtacagtaatcacaacatcgtctcacggctcactcacacgctacaatctcgcggatacaatatagctactcgtcgacgatgatcataagcacagctnctgactctcagtctacttcgccgtcacgtctgcgcaacactacactctcgtcagttatctacaatgaaactcacgagnancagtnactatcatcattatcatctgatgctcngcgatcaatcatgcntnctatgatctacattattgacgtatctgctactagncgccccgcgcactatctacntacttactattctntcttcnctactccantcaccgacgacngcnacgatcnatgcgcan

SEQ ID NO: 550 - DNA, 1694 bp, Glycine max
  misc_feature (1)..(1): n is a, c, g, or t
  misc_feature (13)..(13): n is a, c, g, or t
  misc_feature (15)..(15): n is a, c, g, or t
  misc_feature (57)..(57): n is a, c, g, or t
  misc_feature (101)..(101): n is a, c, g, or t
  misc_feature (117)..(117): n is a, c, g, or t
  misc_feature (152)..(153): n is a, c, g, or t
  misc_feature (171)..(171): n is a, c, g, or t
  misc_feature (175)..(175): n is a, c, g, or t
  misc_feature (261)..(261): n is a, c, g, or t
  misc_feature (263)..(263): n is a, c, g, or t
  misc_feature (328)..(328): n is a, c, g, or t
  misc_feature (427)..(427): n is a, c, g, or t
  misc_feature (459)..(459): n is a, c, g, or t
  misc_feature (519)..(519): n is a, c, g, or t
  misc_feature (526)..(526): n is a, c, g, or t
  misc_feature (601)..(601): n is a, c, g, or t
  misc_feature (603)..(603): n is a, c, g, or t
  misc_feature (645)..(645): n is a, c, g, or t
  misc_feature (727)..(727): n is a, c, g, or t
  misc_feature (737)..(737): n is a, c, g, or t
  misc_feature (747)..(747): n is a, c, g, or t
  misc_feature (794)..(794): n is a, c, g, or t
  misc_feature (826)..(826): n is a, c, g, or t
  misc_feature (848)..(848): n is a, c, g, or t
  misc_feature (966)..(966): n is a, c, g, or t
  misc_feature (989)..(989): n is a, c, g, or t
  misc_feature (1252)..(1252): n is a, c, g, or t
  misc_feature (1266)..(1266): n is a, c, g, or t
  misc_feature (1280)..(1280): n is a, c, g, or t
  misc_feature (1656)..(1656): n is a, c, g, or t
  misc_feature (1672)..(1672): n is a, c, g, or t
  misc_feature (1674)..(1675): n is a, c, g, or t
  Probeset Number=SeqID_10329
natgatagcttantncgagtgcggacgagtactgacatgagtgacttaggtctcgtncgtctgagtactcgtacttatgagctgagtacatagacgactancatacagccgacggcngacggagacagcacatagcgggtgagtcgcagcannacagcagctcgtatgctnatcngtggctgccgatgttcagctacgtcgctgcagtcgacttcggtatctgctagcgactacacacgacgcaagctcgccatgtagatncnaccatcatcacgtgtcgaccatagacagtgttcagtcagcgtggcacagtgcagacgcgtgcacncagcgtactcactcatctatacatataggactgaatatgtatatgtaacgcagatgtcgatttcactgaatgcagtcatcataagacatgcatactcancacgtgcgcgtgcgactgcgatgacgcgagancatgtagaggtaagcatctgacgaggacgagcgtcgcgcgtctacgcacatagtctacancattcancgcgagtgctaggacaatgagtgtatgactgagcagcgtatcagacgctgcagtagtcatcgaagaagtaggcantngtcgttcgatcgtagtatccatggtatgtatagatcggtatnaaggcgactcaacgcaagtcagaagatgcggaggcaggggatacgatgtagataataaggacgatggctgcagctgccgtancactagcttngtatattcantgtctgaggtcagatatcagagtggtatggagcgcgcgcacatgtancaactcatacaagtagcaagagcgcaccgtgntcgtcatgcatgtcaatcttanataggatagagagattgtcagtcaaacgacagaggagaaccataccggcgcgcgcagatcgcgcgtgacgatgagatcataatcagacagtcgaacgtggaagacgatcagcgagagntcgcagcaggatgagatacgggnggcagtcgcataagagtatgtagtaacagtagcgaatgccggcgcatctcgctatcacgagtcacatcgtaacgtcacgcctacacgctcgaggtgcgacacatacgaagtgtgacaggtctagcaaggagattatcgccgtatagacggagtagtagaggaggtgagaggtcgacacagaagactatcgatgacatagagagcagatgtcgtgcgcagacagcggcgagagtagacgcgagtgatagactatctcatacttncatgctggtagagncatgatagatgtgngtcgtgatgattgatattgtcaataagtcgatgagagctatcagtgatactagtggccgctaagatttctgctacgccagcgcaacagtaaagagactaccgcgcggcagtgacactaagcggcgagcatgactatgtgcgagtcgaaacagagaacaagatatgagcagaagcgatgaagagtcgtgtgtaggaagagaactatggacagcgtggatcactccgcgtacagtgaggaaggtgagaggggagtggaatctttatctcatataatctataactgctgtggagagggtcgctgcgtctgcgacatatctatactcgtgtcgcgcgtctggtgctgtggggcgcacgttgtaggtgctgtgcgtgtgtngtcaggagacggcggnanngcccccgcgcgcgcaaccc

SEQ ID NO: 551 - DNA, 1721 bp, Glycine max
  misc_feature (661)..(661): n is a, c, g, or t
  misc_feature (702)..(702): n is a, c, g, or t
  misc_feature (913)..(913): n is a, c, g, or t
  misc_feature (1054)..(1054): n is a, c, g, or t
  misc_feature (1091)..(1091): n is a, c, g, or t
  misc_feature (1148)..(1148): n is a, c, g, or t
  misc_feature (1369)..(1370): n is a, c, g, or t
  misc_feature (1398)..(1398): n is a, c, g, or t
  misc_feature (1413)..(1413): n is a, c, g, or t
  misc_feature (1521)..(1521): n is a, c, g, or t
  misc_feature (1535)..(1535): n is a, c, g, or t
  misc_feature (1615)..(1615): n is a, c, g, or t
  misc_feature (1644)..(1644): n is a, c, g, or t
  misc_feature (1663)..(1663): n is a, c, g, or t
  misc_feature (1670)..(1670): n is a, c, g, or t
  misc_feature (1688)..(1689): n is a, c, g, or t
  misc_feature (1704)..(1704): n is a, c, g, or t
  Peptide Sequence Number=SeqID_8500
  Probeset Number=SeqID_10330
tgcttacgcttgccgcccggcggtctttgggtctgcgcatctccgatgatattacacgataatattcccaataaattgtaatatttgaggtgttctctcccctcctggatgggtgagaagagagggattgtgcaataaggagattatatggcgcttgtctgactaatggtggtaggtggctacagaggcttaaggattagcctgctcacgtctgatcacgatatcttatacattgttacttgaatattatctttgttgtctgaatagagaaacagcgctccgcgtatatatgctggtgttcttcgtagacccgcgctcatccacttatgtggcttatgagcgttgtctatataagtgagaatagaggcggtgtaatgcagtctacattcttaggccaacaccttgtatgctctgatgccgtgaatcgctgtaaacatgtctgacctccactccccgcccacgacgtgcatccagcccctcgtcgtctggagacgcgtgccgcctacttacttcatcgcgccaacggaaaaactaacaatagtatacaatggatctagagacccaccacactgcaactatatatgcgccccgctacacaacagccctcctagtcgatagttagattatgtgttaaatgttccccgaggcgcgttttcgtgcnctcgtggtgatctggaatgtgtgagtccgttggccttgctnctaatctctctcccgactgactcagcacttccatctcttgactactctactcaccccaactataacaatatctaccgccctatgttcataactcgtcataatatgtaaacagtgcgtcttatctccgcaccgccctccgactagtggctctgatcttactaataccataatactttattattagtattttcctaccttctccgttgcgccntcttctcctacatttccgcacttcgcactcagttctttcgtttatacctccgcatatttctatcttacattcaaagacactcttagtaccaaactgtctaagcagatcatacagtaccctcaagatcttttccgcactctncctcaccagctaaatacttgcatgttcacgtttaganactcccttgctgctcctacgtatcttatctgcagttctacgccgccgactgcacaanatcagagtctctgtagatatgtaaatattcgagtatctgttcttgcacaattctagtaccgcatccttgtccccctccgcaccacagctagctatttctatgtaaagtatgtgcacgtatgatataaccacattcatcttacaggccgcgacgcctccacagaatcagtacggtctctctgtcatctctgtgcctacgttcaaattacatcgacatgaagnntgatgacgtaactgaatagagcgactcntgccgtggtagcacnttacagctacactagatgaagtacactatgcgtgcacacagactgctacttcgtgctaagctgttgtgaagtagtaaacaatatcaacttgcatactagcgcgcgacnttagagtatatatnctgcgtatatagtaagtaataacgagctagacgagatggtgtgacgttacgacagtccatgagcatctcatgttcgttgntagactcgcacgactacgatatagagcantatgataggcaatgctacntgagtancagttgatggagcgttcnntagcactgaccgacntcacgtctacctatttt

SEQ ID NO: 552 - DNA, 386 bp, Glycine max
  misc_feature (279)..(279): n is a, c, g, or t
  Probeset Number=SeqID_10331
aacgagaatctcaggaaccacttccatggagtctactacactcgctgctttctcaatcgtctcggcaacaacgacggccagaaccactggtccttcattgcctctcatcactagtcacaattctggcgtccaccctctattgctcgctcgctcctctccggccgttcgcggtcttggtggcttgggagctgctgttttgccggtgaaccgacgccgtttgcagtgtttgtccagctcatctccgtccttcagtggcggcggtgctggattcggcgggtnttgcggcggaagcggcggtggaggtggaggaggatcggatagtggtgattcaaagtcgaaattgggtgctggagcaggtgatggcggcgtctctgttccatcttcag

SEQ ID NO: 553 - DNA, 1537 bp, Glycine max
  misc_feature (11)..(12): n is a, c, g, or t
  misc_feature (15)..(15): n is a, c, g, or t
  misc_feature (17)..(18): n is a, c, g, or t
  misc_feature (21)..(22): n is a, c, g, or t
  misc_feature (25)..(26): n is a, c, g, or t
  misc_feature (70)..(70): n is a, c, g, or t
  misc_feature (76)..(76): n is a, c, g, or t
  misc_feature (82)..(82): n is a, c, g, or t
  misc_feature (478)..(478): n is a, c, g, or t
  misc_feature (911)..(911): n is a, c, g, or t
  misc_feature (1157)..(1157): n is a, c, g, or t
  misc_feature (1246)..(1246): n is a, c, g, or t
  misc_feature (1419)..(1419): n is a, c, g, or t
  Peptide Sequence Number=SeqID_8593
  Probeset Number=SeqID_10332
tctcgggtttnnttngnnttnnccnnttttttttacttcaataagagtagactataataatcttcttagnatgtantacctncttattgctcccgacgattgacgcccgggagcggccccacgcaccgccgcgtggggaggcgcgcctctcacactacacagaagaggagatcacccaccccgccacgcgaggaaggagagagaactctattattcttgttctctttctcgtgagagccgtgtcggtgctctcggtagtgtatttattctcttgttctttgtctatagctaccccgcaccgatcaaacctaggccgagtcattacgagagtgtggcgcacggccgcggctgcgcctattaaccacacctcaccaccgagagtagagtaagaaaaccccccagacacgccccaccacatagcacaagaatcatcatccagcgcgaaaactaccccgcccctatgcgactcgatttagcntcttacttatgtactacaatggagttctccattgagtatggatgctgcctctagtccgaagaatgagtctccctttctccgccgctcgtactgtgttgcttatctggctgccactcccgctcctcgccaattgtcggtaattcgttcgactctctcacgcacgcgcgcaacgatgactttatatagtctcgcggtcccgtgctatgcgagttcgtattcagattctgagctgtctcaccggaagtgctcatgtgggaagacgggcacctccgtgtgagcggggtgacgatagagcctgtatcgtcattctaatacaagctacgttatcagtatacagcttcggaatgctgtgctactgtgtctccgtcgaattacgccacgaagtacccacttactctatattcatacacgctatacgagacggcgcgcggcntcgcgctgtaacatttctctagttacgcggagagtacagaagattcccctggctcctatatcgtcccgaggacgcaccaagtcgcgcacgcccatagtacacatacttgtcttagcccagcgctacgttcctcgcgacgcgccacgagatgttgtatactagagcctctgacgatctcttatcaaaccagccgtcactgagttagatatagttccatgacctcctcactatcacactccctacacncacgcgcacgacgccacgagctagcttaggctatatgtcgtgtcgcctagctacatcgcggccgtcgaagtagcacgcgtcggggagantgcgaaaatatactatgaatgtcacgctgacgcgtatgtttagatgactctacaaacttcgtctctaacaatcgcaactctctggtgtatccgtgtctcaacagaaccacgtactacatagacagaaatactccgtgctcgagcgctactcgataagcaacgcacccggcagncgtcccccgatatcgactacgctatcccagtagtatacccatctcacctctatactgcggttctacttactctgcatgtctgtcactagatcaatgtctgaatatcgacgcctaatct

SEQ ID NO: 554 - DNA, 216 bp, Glycine max
  Probeset Number=SeqID_10333
ttaatattcatgtattgtgtatatttgaaccctccccctccccccacaacaaggtataggttctgtcattagtgatagattaagagatataaagagctgggtaacatcattcatgtagcggctgctccaaatagtttgcttcagtatgtttccaaatttgatagttgataataatttcatgctagaattttgtgtaaaaaaaaaaaaaaaaaaaaa

SEQ ID NO: 555 - DNA, 2124 bp, Glycine max
  misc_feature (25)..(25): n is a, c, g, or t
  misc_feature (33)..(33): n is a, c, g, or t
  misc_feature (52)..(52): n is a, c, g, or t
  misc_feature (66)..(66): n is a, c, g, or t
  misc_feature (192)..(192): n is a, c, g, or t
  misc_feature (202)..(202): n is a, c, g, or t
  misc_feature (208)..(208): n is a, c, g, or t
  misc_feature (220)..(220): n is a, c, g, or t
  misc_feature (223)..(223): n is a, c, g, or t
  misc_feature (229)..(229): n is a, c, g, or t
  misc_feature (232)..(232): n is a, c, g, or t
  misc_feature (236)..(236): n is a, c, g, or t
  misc_feature (255)..(255): n is a, c, g, or t
  misc_feature (258)..(258): n is a, c, g, or t
  misc_feature (295)..(295): n is a, c, g, or t
  misc_feature (301)..(301): n is a, c, g, or t
  misc_feature (351)..(351): n is a, c, g, or t
  misc_feature (363)..(363): n is a, c, g, or t
  misc_feature (382)..(382): n is a, c, g, or t
  misc_feature (452)..(452): n is a, c, g, or t
  misc_feature (482)..(482): n is a, c, g, or t
  misc_feature (496)..(496): n is a, c, g, or t
  misc_feature (564)..(564): n is a, c, g, or t
  misc_feature (591)..(591): n is a, c, g, or t
  misc_feature (617)..(617): n is a, c, g, or t
  misc_feature (645)..(645): n is a, c, g, or t
  misc_feature (727)..(727): n is a, c, g, or t
  misc_feature (749)..(749): n is a, c, g, or t
  misc_feature (755)..(755): n is a, c, g, or t
  misc_feature (765)..(765): n is a, c, g, or t
  misc_feature (767)..(767): n is a, c, g, or t
  misc_feature (833)..(833): n is a, c, g, or t
  misc_feature (849)..(849): n is a, c, g, or t
  misc_feature (901)..(901): n is a, c, g, or t
  misc_feature (943)..(943): n is a, c, g, or t
  misc_feature (980)..(980): n is a, c, g, or t
  misc_feature (1034)..(1034): n is a, c, g, or t
  misc_feature (1039)..(1039): n is a, c, g, or t
  misc_feature (1188)..(1188): n is a, c, g, or t
  misc_feature (1190)..(1190): n is a, c, g, or t
  misc_feature (1275)..(1275): n is a, c, g, or t
  misc_feature (1724)..(1724): n is a, c, g, or t
  misc_feature (1842)..(1842): n is a, c, g, or t
  misc_feature (2069)..(2069): n is a, c, g, or t
  Peptide Sequence Number=SeqID_8594
  Probeset Number=SeqID_10334
cgtgcgctgcgatctacacgtactntcacttgncatacatctattatgatgntaatacgtctgctngctgttagatcgtcgctgagcatcatgtcgcgacggtgagcaagcatatacgatagtgccatcgcgtcgtcagcagtagatgagcgcgtcgcatgcctctcgaccagtatactgcgtagtagctancatactgttngatctncttatgacactntcnagactnggnagtnagatagtacatcgccagtntgnaaacttgatcagactgatattcatcatgtcaagctgncatcgntagcatacgaggtatactgcggactatcgcacgtcgcatactactatcanactatcagctcntgcttagctttgaagatanagacaacgatgcatctcgtctactcctcatacatccgcgagcatcttcgtcacgtcacagtctgaccacngcgcgcgcgtgacgtcctctatatagtcanttcacagtcgaganggagcgcgtgctcgcgcgactgtcgatcactatacagataattacatacagcactcacacatgttatntacatcataacgtcagttgtgatggangtggcgtcttctatattcatgcttcnacagacactcgcatcatagacgtagagncgtgagtattatggataagggctctgtctgcgcgcggcgcgtgctcgtgatcactatcaacatacatacagatatcgtgcgntgttatatcgcaatatagcatncacgangagcgcggangngcgatcacgatcacgaagatatatcgcgtcgtgtggtcgagcgcggtcatatccatttatacgatntcacacttctcgcctnatacaagttcttcgatgagcactcaggttgttattatgcgtgtcactgacantagaagtctatctcgacgatcgctcgccgctaacgcggcatnttctacgcgacgctaagtcagacactcatacaaatanttcgcgtgtgtcgtcggatatcagagtgatgatgatgaggaggtgcgcttgtcnggtgncgacgacgaacacacatatctctcgcgcgtgttaataatattgactgaggcatgtctcattgcgcgacggtgtcacgacattatatattctgcgctatggccggttaccacatcataagacacgtatctaacgttagtggcgacgtggnangctagtgtcacatttctatatgatcgcctgtgaggagcgtgcgtacgtgtgcgaccgcggctctacgccacagcagctgcgtagnccgggtagtgacgtagcgctcattaacgcgatcacgcgtcgctccgtccatatacgacgcgacgagcctcctggtccttgtctctcccatcgccgttggcgtctgtagcggcaatatactgcgctcattgcaggcgcacacaataaatggcggacaaggatataacaactctacacgcgtcacgtttctcctctacaatagagatgatcgtagcgtcaatcttctgagcactcatctagagctacacactaagtgtgatttcttagtgtacttaagtgtttctgtatgtgtggtactcgcagcacgagggtgtatccgcgtgatgtgttgagataatattctataataaagtgaatagaggatccgtgcgatggcgtagggagcaaacgacagtcgcgcacagtgaggcgaggggtcggcgtaatattaaacatcactataccgcgagngttgacgagtgtagcgttcaggtgagacagatcaatgctctcgcttctgccgcctttctccctgtccatctcgcctcgctccctcactcctgtctagtcgccgagacttatcggtgcngcggggtggcggataactaaagataatcattcgtccttcgttcatcactagacttataccacacatacaagtcggtcaaataataactgcgactgcatccaacaacacatcctccatcgatttgtctgatgtcattttttactgattaatgatattgtcgtaatatagttatttatagtgctgtattactaatagattgtctgttgcggactcaccttaggctagancacattcattaatctcgcttctctccgcgcgatccgcgctctctcgctcttgttt

SEQ ID NO: 556 - DNA, 418 bp, Glycine max
  misc_feature (18)..(18): n is a, c, g, or t
  misc_feature (27)..(27): n is a, c, g, or t
  misc_feature (32)..(32): n is a, c, g, or t
  misc_feature (36)..(36): n is a, c, g, or t
  misc_feature (38)..(38): n is a, c, g, or t
  misc_feature (42)..(42): n is a, c, g, or t
  misc_feature (60)..(60): n is a, c, g, or t
  misc_feature (62)..(62): n is a, c, g, or t
  misc_feature (77)..(77): n is a, c, g, or t
  misc_feature (80)..(80): n is a, c, g, or t
  misc_feature (103)..(104): n is a, c, g, or t
  misc_feature (106)..(106): n is a, c, g, or t
  misc_feature (123)..(123): n is a, c, g, or t
  misc_feature (159)..(159): n is a, c, g, or t
  misc_feature (185)..(185): n is a, c, g, or t
  misc_feature (187)..(187): n is a, c, g, or t
  misc_feature (215)..(215): n is a, c, g, or t
  misc_feature (289)..(289): n is a, c, g, or t
  misc_feature (291)..(291): n is a, c, g, or t
  misc_feature (372)..(372): n is a, c, g, or t
  misc_feature (387)..(387): n is a, c, g, or t
  Probeset Number=SeqID_10335
tagggaagaaagagatanttttggagngattnaagntnggtnggagaaatgatggggagnanaaagtaaaagatggntgnagaagttagatatggggggggcnngngaaaggatgggggaaanaattattggggaatttgggggttagaagaaatgagntggtaaggggaaaatggaaaatgggntngatgggaaaggaggagaaggaataatgnaaggaggagaagaaggaagggagggaaaagtaaaaggacagtgtcgtctaggtgaatggaaaaatgggaggggnantcaaaagaagatgaatggtaacgagggtattggaaaacgagcagaagagattcatggaaataaaagaggggagaagaaggngcaccaaaagaacanggaaagagaagacagggggcaaaagaaaaat

SEQ ID NO: 557 - DNA, 1382 bp, Glycine max
  misc_feature (1)..(8): n is a, c, g, or t
  misc_feature (13)..(21): n is a, c, g, or t
  misc_feature (258)..(258): n is a, c, g, or t
  misc_feature (836)..(836): n is a, c, g, or t
  misc_feature (1245)..(1245): n is a, c, g, or t
  misc_feature (1266)..(1266): n is a, c, g, or t
  misc_feature (1284)..(1284): n is a, c, g, or t
  Peptide Sequence Number=SeqID_8595
  Probeset Number=SeqID_10336
nnnnnnnnaaaannnnnnnnntttttttttttcttatttattatttattctaaatcatcccccccatcctttaacccctcacctgcacagatatttcacctacttaatttcttccgataccagcctataccttgatcacttttgttttatcctatattattcataacgacaaaacacagggctacgaggaaacgaaccccccctatctattctaatcaactctggtgtgccctcttctcctatgccccactatcatcntatctagacaaacatttcaatcctatcactaccaatcatagagtctttcaccaccctttttttgtgtttatttgtaactcttctataatgtttagttgtattttctttattgttgttgtatggtctagctctttttattttgttcttattattgtgatctctaatgacaatgcacacacacgatactaataaaccacctattctcatgcatatctcatccctcacccgtacaccatcactcacacccctgcgcaaacaaccagcatgtcatgccacactattcacattccatactttccctcatacccttatctatctaccctcatccccgttctatcttcgaattctagcttgtccatctaatgaatttttcttgatttggatgaccgtaaattgccaaacaccacctccctccctacccactgttcctcctaccgccccgcgccacccactcacccagccccgatccgctctctcatccgcaccctcccttcctcccctctttatatttttcccttattcccaccattactagagacacttttaataataacacaaacccgaataaccagtacggnatttattaaatacgcaatactctcgcacgtcgttctcggtccccaccccatctgcgatataacatccacttcctctccttctcactattggttttaatggacctcgggatcctctcacattcctatctccactctctttattctcttttttctactcgctattatcttttctcccctcgcacaccgccctcgtctcctcacctctccccactccccccacccccccccgcccccctctacacctttataccctccccactcgccctcactccacatactatctacaccacacaaccctctcctcaccctactcacaaacatactatctcccccacctccatcccacttatctatatcacaccacacactctacaacaatacatcacaaaccgattacttacacgttctnacatctctttccgtcctcgantgtcccatgcctcgctancctatcactccttttctagtttattctctgatcctccaacccctctcgtgatatactatgttctatacacagactagttatacctactcatcttctcg

SEQ ID NO: 558 - DNA, 1184 bp, Glycine max
  Probeset Number=SeqID_10337
aaagtaaaagtcttatagatctctacagatcccaccactgaaaggaccattttgattcttccatcaaatttctctcgacgtccggcggattttgaggaagtggagagcaaaagcttgattttagcaactatggagagcttctggcaactgggtgatgagctccgaggtcagtcaagagcatcagaggatcacaagtggtccactgttgctacaaagttagctgagcagactaggatgaaaggggagaggacgaacaaccttgatctctccaaaagctactctgagttcagaccaagcgacaagtttagtttccaggagaacaacaacctcaacttcaacatgaatctgatgcagggcaatgtttacaacaacatgaatggatttaaaagtggaggcaacatgaaagttaacaagtacattggcaatgttgttgctaacaaagagatgagcaatgatagtgttgttgacaagaggtttaaaacgctgcctgcatcagagacgcttccgaggaatgaagttcttggcgggtacatctttgtttgcaacaatgataccatgcaggacgacttgaaacgtcacctatttggtttacctccgagatatagggactctgtaagggctataacacctgggttgcctctgtttctttacaattacactactcaccagttgcatggtatcttcgaggcaacaacttttggaggtactaacattgatgccactgcttgggaagacaaaaagtgcaaaggagagtctagatttccagctcaggtaaggatcagagtgaggaaaatatgcaaagccttggaagaggattctttcaggcctgttcttcaccattatgatggtccaaagttccgccttgagctcactgttcccgagacattggatctgctagatctctgtgaacaagctggctctccataagccggggatcaacctttgcaataccacgttgctaagtttgtctgaaacggcgaaacctatctaaatatatatatgcatattaccataagagcgtaagcttttggggtttagttaagagtctagttcaaatgtatggtttactaagaagcgactattctcagttcttgttgtgtctagtgtgtgagtttgtctgtgtctgtaagagtcttgataacccttttgagacgatgatttatgtagagagaaagtaaaagatc

SEQ ID NO: 559 - DNA, 542 bp, Glycine max
  misc_feature (93)..(93): n is a, c, g, or t
  misc_feature (179)..(179): n is a, c, g, or t
  Peptide Sequence Number=SeqID_8596
  Probeset Number=SeqID_10338
attcttattgtctccccgcatcgtacgccgccgacacagcttcgaatcgctgccaagtgctaacaaacgcctctgagtctctgacaccaacgncactctctctgctcacattttggaagagatgggtgacgtgatggagtggcaaaagcagcgttggccaacgaatgggaacgcggaantgatgtacgtgtaaagtgatgaccgacgaaaagctcgagactctgcggcaacagaattgcaggttagcccaccctctgtggacaactctcccggaatgggcaaaaacatcttcctcgcaaccagatcctggaagggattaggctgggggaaaaggaatgtggatcccttggtggggggctggggggggcccaaataaactctaggggggcgggggggatccctgccccccatgtaggctttctaattctttgggggaataatttttttccagggggggtgtggaccccccccccggggaaaaaacacggggggttacctaatgggggctcttcccgccatggggcccaattttttgagaccca

SEQ ID NO: 560 - DNA, 1645 bp, Glycine max
  misc_feature (27)..(27): n is a, c, g, or t
  misc_feature (107)..(107): n is a, c, g, or t
  misc_feature (117)..(117): n is a, c, g, or t
  misc_feature (126)..(126): n is a, c, g, or t
  misc_feature (448)..(448): n is a, c, g, or t
  misc_feature (514)..(514): n is a, c, g, or t
  misc_feature (562)..(562): n is a, c, g, or t
  misc_feature (762)..(762): n is a, c, g, or t
  misc_feature (835)..(835): n is a, c, g, or t
  misc_feature (1002)..(1002): n is a, c, g, or t
  misc_feature (1013)..(1013): n is a, c, g, or t
  misc_feature (1020)..(1020): n is a, c, g, or t
  misc_feature (1131)..(1131): n is a, c, g, or t
  misc_feature (1147)..(1147): n is a, c, g, or t
  misc_feature (1234)..(1234): n is a, c, g, or t
  misc_feature (1240)..(1240): n is a, c, g, or t
  misc_feature (1246)..(1246): n is a, c, g, or t
  misc_feature (1311)..(1311): n is a, c, g, or t
  misc_feature (1322)..(1322): n is a, c, g, or t
  misc_feature (1325)..(1325): n is a, c, g, or t
  misc_feature (1329)..(1329): n is a, c, g, or t
  misc_feature (1372)..(1372): n is a, c, g, or t
  misc_feature (1459)..(1459): n is a, c, g, or t
  misc_feature (1494)..(1494): n is a, c, g, or t
  misc_feature (1516)..(1516): n is a, c, g, or t
  misc_feature (1529)..(1529): n is a, c, g, or t
  misc_feature (1540)..(1540): n is a, c, g, or t
  misc_feature (1550)..(1550): n is a, c, g, or t
  misc_feature (1575)..(1575): n is a, c, g, or t
  misc_feature (1578)..(1578): n is a, c, g, or t
  misc_feature (1630)..(1630): n is a, c, g, or t
  misc_feature (1639)..(1639): n is a, c, g, or t
  Probeset Number=SeqID_10339
gtcccttccacccgctctctcacaacntctcttcacagctcatcgtgcgcagatgcgtcaccagactagcgtggttgcgctcctcctaactagttgtatcgcagatntctctacccntcgctgcgnactcgcactcaccgccgtacctccacagagtagcgtcacacgtcttcctccttatttacattagtaggggcctcgacgatagcagaagtagtaacttctcatagtgttcagctctctattttctatatacagttcgagattgtaatcattactcgtacgtaactaactcataatgtatgtctctctgtcattcaatttgtaaacaatgtactatcatggtgatgtcgtgacgatgccatagcgagtaacgacgtaatactgattgtatcgtcgtcctctacacgcactcatcatacaccacctatctcacgaccatgtctantgtcttagcagcagatatgatctagcagtgcagtagacatcgcgcgcgccgcgcacgttcgtgttnagtcatgacgtcgtactgacattccgcgcgacccattctatctaactnccgctcgctattgatgtcttgctactcagatatacgacgtatctacaatcgatgctctgagtgcgcgaggccatgcttagttagtatgctcgctatatcagcatactccatatacttactcacacatcgacagagatttattctgaatgcatcatcctctgtgtcactgcgactgtagagattgtgagttggaagagcanacgtagtattatatgatgtgcagtcgctgtgtcgtgctgttgttagtagttgcgagcagtggtgcgctgcganacggcgccgaatcatactactagatcacgaatacgatgctgcactgtatacgtactgacactctgagtctccgtagtcaccagtgcactcgcgtctagcatggctacgactcatcggctcgcgtgtgagaagatgataatgcagtgcacttgtagtcatcgcttatnggtcagaacanggcgatncacacgtgctcgtacatctctcggcgttgctgtcgccagacgtgtatagttagctggacgtaatattccctatcatcttgtatcgcgtcacgcgctaatctccgacgctgntcgtagccagctattngactgacgtatgatcacagacgatcgtccaccgttctaatacacatgtactgaactactcgtatgctgtattgacgtatcgtcatcntacttngctcanactgcatgtgtcttgaatctatcttccgtgctcattgcacgtcgtagtcgtcagacagtacactnacatcggtcanagnagtnttgacatcgcgatccgatcatacaggctatccgctacagagcngctcgcgcgcgtcgctttgactgtatcggttgacgtgatattgtcgatggacgatcatagcggtgacggcaatcgtatgtgcatgantgactatcaacgcgtcgtcccaactcgatcgaatnagatgtaactgatcgctcgtantctcaagtccganagtcgactgtncagatctgangtgtatgttgatcagatgtacactncanattacgaacatcattactgtacagtactatgactcagtagttacatcgcgancatcgatgnctcctg

SEQ ID NO: 561 - DNA, 1384 bp, Glycine max
  misc_feature (1)..(122): n is a, c, g, or t
  misc_feature (1384)..(1384): n is a, c, g, or t
  Peptide Sequence Number=SeqID_8597
  Probeset Number=SeqID_10340
nnnnnnnnnnnnnnnnnnnnnnnnnnnnnnnnnnnnnnnnnnnnnnnnnnnnnnnnnnnnnnnnnnnnnnnnnnnnnnnnnnnnnnnnnnnnnnnnnnnnnnnnnnnnnnnnnnnnnnnnnngacatgttcaatgttcttatcctttcgtctctgttaatcatgcgtgtctgtctcccactatcatcagtgcacgtaccttgtgatcttccacacacacgtgatcacacgccaatcattctctcaagcctccccaacacacttccatgattcattcactgttgcctccttttttgcctatatagcttaaggctggatctttacttgatttggtgcttgattgtctaattatcttcagctaaacttcgatggggttgtgaatattaaaatatctagccggtgggtatttcacatctcacttatattatagtccgagtttgaggtgtgtttttttaggctagatttgaagaactttccagttagttatctcttattttcaaggattattttattatataacatattgagtggtttgtggatattgttctttaattttatatatacttctttgcaaccttattattcttcagtcgcttttgtttgctcgattgaaaaatttcctctttttctttgtgattttaactggtggtctttaaattggtgagtgagacatgtggggatgggttctctttgagtaggatttaggttgatacctcacataaaagcaaagtggcatccaagttggacttcatgataagctacttgtttgttggtcgactttggtagcgatttgaggctcttatacccccatgctgctatagatatctttatattttccccaaaaatccagatccaatctttgcatctaatatctgggatatcaatcttcatatattttcttttgataaggatcttgattaggagaactcggtgtttttttttttattgggtgtgtcagaaacttgttttaaggagaagctactgagagagctgttatatgaggttcgaagctttggctatgccatgaaaattttgaattgtacaatatgggtagcaacaggactattgtttggtttagaagggaccttagaattgaggacaatcctgcattaactgctgctgcaaaggagggttctgtactccctgagtatgtatggtgccctaaagaggaaggacaattttatcctgtaagagtgtcaaggtggtggctgaagctctctcttgctcacttggatcaatcgctgatctctgtcggacccggacttgtgctgagtaaaaccctcagtactgctatcgctgctgtagttgtgcgtaaggcgcttaaagcaggctaaataggccgaatccatcgctatgatccagtcacgcttgtgctagatccgagn

SEQ ID NO: 562 - DNA, 2134 bp, Glycine max
  misc_feature (12)..(13): n is a, c, g, or t
  misc_feature (20)..(20): n is a, c, g, or t
  misc_feature (37)..(37): n is a, c, g, or t
  misc_feature (48)..(48): n is a, c, g, or t
  misc_feature (50)..(50): n is a, c, g, or t
  misc_feature (59)..(59): n is a, c, g, or t
  misc_feature (61)..(63): n is a, c, g, or t
  misc_feature (65)..(65): n is a, c, g, or t
  misc_feature (67)..(68): n is a, c, g, or t
  misc_feature (76)..(76): n is a, c, g, or t
  misc_feature (87)..(87): n is a, c, g, or t
  misc_feature (91)..(91): n is a, c, g, or t
  misc_feature (107)..(107): n is a, c, g, or t
  misc_feature (109)..(109): n is a, c, g, or t
  misc_feature (121)..(123): n is a, c, g, or t
  misc_feature (125)..(125): n is a, c, g, or t
  misc_feature (127)..(127): n is a, c, g, or t
  misc_feature (135)..(137): n is a, c, g, or t
  misc_feature (140)..(140): n is a, c, g, or t
  misc_feature (142)..(143): n is a, c, g, or t
  misc_feature (146)..(147): n is a, c, g, or t
  misc_feature (149)..(150): n is a, c, g, or t
  misc_feature (153)..(153): n is a, c, g, or t
  misc_feature (199)..(199): n is a, c, g, or t
  misc_feature (205)..(205): n is a, c, g, or t
  misc_feature (214)..(214): n is a, c, g, or t
  misc_feature (222)..(222): n is a, c, g, or t
  misc_feature (224)..(224): n is a, c, g, or t
  misc_feature (226)..(226): n is a, c, g, or t
  misc_feature (230)..(230): n is a, c, g, or t
  misc_feature (263)..(263): n is a, c, g, or t
  misc_feature (270)..(270): n is a, c, g, or t
  misc_feature (299)..(299): n is a, c, g, or t
  misc_feature (333)..(333): n is a, c, g, or t
  misc_feature (337)..(337): n is a, c, g, or t
  misc_feature (339)..(339): n is a, c, g, or t
  misc_feature (347)..(347): n is a, c, g, or t
  misc_feature (352)..(356): n is a, c, g, or t
  misc_feature (360)..(362): n is a, c, g, or t
  misc_feature (364)..(364): n is a, c, g, or t
  misc_feature (366)..(366): n is a, c, g, or t
  misc_feature (405)..(405): n is a, c, g, or t
  misc_feature (428)..(428): n is a, c, g, or t
  misc_feature (439)..(439): n is a, c, g, or t
  misc_feature (454)..(454): n is a, c, g, or t
  misc_feature (478)..(478): n is a, c, g, or t
  misc_feature (484)..(484): n is a, c, g, or t
  misc_feature (487)..(487): n is a, c, g, or t
  misc_feature (489)..(489): n is a, c, g, or t
  misc_feature (493)..(493): n is a, c, g, or t
  misc_feature (499)..(499): n is a, c, g, or t
  misc_feature (528)..(528): n is a, c, g, or t
  misc_feature (531)..(532): n is a, c, g, or t
  misc_feature (559)..(559): n is a, c, g, or t
  misc_feature (561)..(561): n is a, c, g, or t
  misc_feature (572)..(572): n is a, c, g, or t
  misc_feature (580)..(580): n is a, c, g, or t
  misc_feature (583)..(585): n is a, c, g, or t
  misc_feature (597)..(597): n is a, c, g, or t
  misc_feature (604)..(604): n is a, c, g, or t
  misc_feature (619)..(619): n is a, c, g, or t
  misc_feature (634)..(634): n is a, c, g, or t
  misc_feature (646)..(646): n is a, c, g, or t
  misc_feature (650)..(650): n is a, c, g, or t
  misc_feature (659)..(659): n is a, c, g, or t
  misc_feature (663)..(663): n is a, c, g, or t
  misc_feature (680)..(680): n is a, c, g, or t
  misc_feature (697)..(697): n is a, c, g, or t
  misc_feature (726)..(726): n is a, c, g, or t
  misc_feature (751)..(751): n is a, c, g, or t
  misc_feature (756)..(757): n is a, c, g, or t
  misc_feature (759)..(759): n is a, c, g, or t
  misc_feature (776)..(776): n is a, c, g, or t
  misc_feature (977)..(977): n is a, c, g, or t
  misc_feature (1007)..(1007): n is a, c, g, or t
  misc_feature (1014)..(1014): n is a, c, g, or t
  misc_feature (1046)..(1046): n is a, c, g, or t
  misc_feature (1049)..(1049): n is a, c, g, or t
  misc_feature (1136)..(1136): n is a, c, g, or t
  misc_feature (1204)..(1204): n is a, c, g, or t
  misc_feature (1207)..(1207): n is a, c, g, or t
  misc_feature (1226)..(1226): n is a, c, g, or t
  misc_feature (1249)..(1249): n is a, c, g, or t
  misc_feature (1254)..(1254): n is a, c, g, or t
  misc_feature (1269)..(1269): n is a, c, g, or t
  misc_feature (1296)..(1296): n is a, c, g, or t
  misc_feature (1302)..(1302): n is a, c, g, or t
  misc_feature (1315)..(1315): n is a, c, g, or t
  misc_feature (1343)..(1343): n is a, c, g, or t
  misc_feature (1346)..(1346): n is a, c, g, or t
  misc_feature (1348)..(1348): n is a, c, g, or t
  misc_feature (1351)..(1351): n is a, c, g, or t
  misc_feature (1357)..(1357): n is a, c, g, or t
  misc_feature (1360)..(1360): n is a, c, g, or t
  misc_feature (1374)..(1374): n is a, c, g, or t
  misc_feature (1376)..(1377): n is a, c, g, or t
  misc_feature (1381)..(1381): n is a, c, g, or t
  misc_feature (1392)..(1392): n is a, c, g, or t
  misc_feature (1394)..(1394): n is a, c, g, or t
  misc_feature (1411)..(1411): n is a, c, g, or t
  misc_feature (1421)..(1421): n is a, c, g, or t
  misc_feature (1425)..(1425): n is a, c, g, or t
  misc_feature (1434)..(1435): n is a, c, g, or t
  misc_feature (1440)..(1440): n is a, c, g, or t
  misc_feature (1496)..(1496): n is a, c, g, or t
  misc_feature (1498)..(1498): n is a, c, g, or t
  misc_feature (1502)..(1502): n is a, c, g, or t
  misc_feature (1522)..(1522): n is a, c, g, or t
  misc_feature (1524)..(1524): n is a, c, g, or t
  misc_feature (1531)..(1531): n is a, c, g, or t
  misc_feature (1562)..(1562): n is a, c, g, or t
  misc_feature (1578)..(1578): n is a, c, g, or t
  misc_feature (1603)..(1603): n is a, c, g, or t
  misc_feature (1619)..(1619): n is a, c, g, or t
  misc_feature (1633)..(1633): n is a, c, g, or t
  misc_feature (1640)..(1640): n is a, c, g, or t
  misc_feature (1656)..(1656): n is a, c, g, or t
  misc_feature (1666)..(1666): n is a, c, g, or t
  misc_feature (1679)..(1679): n is a, c, g, or t
  misc_feature (1709)..(1709): n is a, c, g, or t
  misc_feature (1713)..(1713): n is a, c, g, or t
  misc_feature (1767)..(1767): n is a, c, g, or t
  misc_feature (1769)..(1769): n is a, c, g, or t
  misc_feature (1774)..(1774): n is a, c, g, or t
  misc_feature (1779)..(1779): n is a, c, g, or t
  misc_feature (1784)..(1784): n is a, c, g, or t
  misc_feature (1824)..(1824): n is a, c, g, or t
  misc_feature (1830)..(1830): n is a, c, g, or t
  misc_feature (1833)..(1833): n is a, c, g, or t
  misc_feature (1843)..(1843): n is a, c, g, or t
  misc_feature (1873)..(1873): n is a, c, g, or t
  misc_feature (1921)..(1921): n is a, c, g, or t
  misc_feature (1924)..(1924): n is a, c, g, or t
  misc_feature (1933)..(1933): n is a, c, g, or t
  misc_feature (1939)..(1939): n is a, c, g, or t
  misc_feature (1955)..(1955): n is a, c, g, or t
  misc_feature (1985)..(1985): n is a, c, g, or t
  misc_feature (1991)..(1991): n is a, c, g, or t
  misc_feature (1999)..(2000): n is a, c, g, or t
  misc_feature (2053)..(2053): n is a, c, g, or t
  misc_feature (2067)..(2067): n is a, c, g, or t
  misc_feature (2121)..(2121): n is a, c, g, or t
  Peptide Sequence Number=SeqID_8598
  Probeset Number=SeqID_10341
ggttcctcttcnnctctccnctgcgcttcgtctctcncgtccgtctcntngcttctctngnnnancnncttcgtcncgcgctgtcgngcgnctccgcgtcctcctcncngcgcgggcgcgnnngngnggggaccnnnacncnncgnncnnccncagtcgtcgctgcgctaacggtttactcgctgctgtgatcgcgcgncgctcntgggggttngtgagacngngnctcncggtcagtgatggtgttgtgtggttgtttggtngtggttngtaggtgcgtcactctgcatctcgctttntgatagagtgagtaggggcgactgtgttgatgtntcangntgcatgtngctgnnnnntacnnnancnaactgcgcatgagtataccgatatcgaagagacgacgtnaccgacacacaagaacacgacancgctacgcggntgctgacgttccctncgccccgctcgcgctcgtgcgtgncgcacncgncngctnctcatnaccgtgtctcttctgtctcgtactaggcncannctcttctttttctctctctgtatcgangngactcgcttcntcgatgtnacnnnctgcggcgctcntctgttngctgttgtctcctgnttatagctgcgtttntagcgacgcagngcgncgtcactcnctangactgtgctgctcgcancataacgatagaccccnacacggtctgaaagcactggtgccgagcngacgcgacacagcgagccacagcangccannanactatcatacatctctntcattcatcatacaataccctcatcatctctacactacatcttcgactacatctcgtctactcagtatctagctcgttcacaggcgcgacagcacgtacgcagcacgcactgaagctgctatcggagcgcatggtgtgtgacgaaggaatagcaacagcccgactagcagcacgcatcgacgacggctacggcgacgaacnacggaagcgtatagatatagatgaacagangagaatnactgatatacgcaacataagacggagagaaanganagacgcaagagatatatgaacgcactcgatcgcgatgagaggatgaagaatacagcacaagagactatgagatagctactaccttantactgtgcaggcgtcatgacgcgtactgcgagtagcacgtcgatagtacgtcgcgcgatcgacactgntcntcgctcacgctactgatgnatgtgcactagcttactctatcntctcntactcactctgttcngtagcgacaattgacccgactgctctnagcgcnagctgtcgacagncagatgcagtatagctgtagatgaatgnagncncantacacncancaaccccacacacnanncaantgatgtagtancntagagcgtgagtaatcntactcgtcgncccngacgtcacnnctcancacaccgcacagactacacatatagtcacacttcctacactgactactgcagtcanancgangacgactcatgcgcgaccantntacatangactctgatatgtgactgatgtcatgtaaanagtttcgcatgatcanacgcacttacgactctactcgtcgnacgacagcgctgcatnacttagagaagtanacagcgngtatgcgacatatgtnagtgatgacnactacgacctgtncttacggcgtgacgcgctcaccgacgagtngatngactacgaatcgagtgatggtgcggaagcggcttgacgcatactacacataaanantatcnacgtntatcnttgacagcacacagtacgcaacgttcttgatactataaanaatccnganatatggacgnaaccatacacagcactcgcgtagatataantcatcctggacaactcatcaacatacgcgacgactatcgtaatgctgntcntctcatatncatcancacaactctatctcancgtatcatctttccttctgctactatcttnttcatnctgcgatnntctactatacgttcgtagcacgtactaggacgtacatacagacacgtaagatnaagtatacaataantaatgcgctaagatacgctctgcagcccatcatgcatctatcatcacatagcantatctcagccatg

SEQ ID NO: 563 - DNA, 1607 bp, Glycine max
  misc_feature (1)..(1): n is a, c, g, or t
  misc_feature (103)..(103): n is a, c, g, or t
  misc_feature (253)..(253): n is a, c, g, or t
  misc_feature (255)..(255): n is a, c, g, or t
  misc_feature (719)..(719): n is a, c, g, or t
  misc_feature (790)..(790): n is a, c, g, or t
  misc_feature (1210)..(1210): n is a, c, g, or t
  misc_feature (1357)..(1357): n is a, c, g, or t
  misc_feature (1439)..(1439): n is a, c, g, or t
  misc_feature (1441)..(1441): n is a, c, g, or t
  misc_feature (1559)..(1559): n is a, c, g, or t
  misc_feature (1566)..(1567): n is a, c, g, or t
  misc_feature (1570)..(1573): n is a, c, g, or t
  misc_feature (1575)..(1575): n is a, c, g, or t
  misc_feature (1580)..(1580): n is a, c, g, or t
  misc_feature (1582)..(1582): n is a, c, g, or t
  misc_feature (1593)..(1593): n is a, c, g, or t
  Probeset Number=SeqID_10342
ncttcagatacacctagtatgatcgagagagagagagtgaatgcagtagagagagacagatctgatataatgtatgacaggcaggtatatagcgctagtgcgnagcaccgcagatacatagtaacgatgacaacagttcgggtcgcaatagtggattcgagagtatagatgtaggtggcacagatgtttctgtcgttgtatattatcgtgtcgatgaatacgatgcatatcctcaaatgtattcgtcatgtcncncgcaactgctcgcgacgagactcgacagttgtatgcctgatctctctagtatactaatctcagatatgtaactcatctctcattcagctgtacacgaattaagatatacaaacagactagagtgctcaccgtgttacatgagttcaggtcgtaacattgctgctgtcacgtatgtgatgtgatgtgtaggtactatagaagagaggaggcgccgagtgtggattgagagagcgtgagtgtgcatgatcgagtcaccagagcacgcagtacggcggtgaggtaacactcatctccactccaccgacgtcgcgtcgcgcacggcttcaccgtcgtatatctcacatcgtcatatacactctagcgacacatgtcctccacactcgcctcgtctgacgcgtattatcacactgccatctgatcacctctcatacatacgacgtcgcgtgtacagatcgatatatgcncggtcgtgcacggcggagatatagagagagtacgatagtgagcaacgtgtgcgtgacgagtcgacatcagngaacgcgagtagaagagagcaatctattatcacattactccatgataatctagttagaggcggacgcggaaactacatcttggcgcgtcatctgcgcgcgctcgacatacgaacgcgtatgcccgctgcgcgtctgacgtatatatataacgaacagtagagagacacgacagacaatacatagtgaggagctcgcgagataggacgtcgtcggcacgcctagatatatagatataagaaacgattttgcgcatacgtgagatactataagaagcatcgtgtcgcatatcagaccgccacccgtcatccgatatccatagcgtccttctaacaacgatcataacgagacacgaacgacaacacgaagacgagcagattagttgatacgcatcgaaaaagcaaacgaaaaacacgaagtcnacaaataaggcaaacccctctcatcgaaatagccacataccccacaccagctcgtccacgttcaccacttccatctcccacaacctcaccactcgccaccacaccacccgccgccatgccatccgcctcatcactaaaccatccccnccaacccaccacctcgcagcaacccccccaccagcacccccccacttctctccgcacttacttcgcatcacttatatcttantntttttcattgtggtatgttcggaagttggactgtgctcgtccgcgtaaggagtattctttgaagatgtagagacgcccctcccttccgccggtgtcttgtgtttatggtaagatgatngaggttnnttnnnntncaagnanaaaaaaaaaanaaaaaaaaaaaaaa

SEQ ID NO: 564 - DNA, 630 bp, Glycine max
  misc_feature (47)..(47): n is a, c, g, or t
  misc_feature (54)..(54): n is a, c, g, or t
  misc_feature (136)..(136): n is a, c, g, or t
  misc_feature (143)..(143): n is a, c, g, or t
  misc_feature (146)..(146): n is a, c, g, or t
  misc_feature (325)..(325): n is a, c, g, or t
  misc_feature (630)..(630): n is a, c, g, or t
  Peptide Sequence Number=SeqID_8599
  Probeset Number=SeqID_10343
tgcagggaacttgggattggaattgtagcttatagccctttaggaanaggcttnttggcagcaggacctaagcttgctgagaatttggaggacgatgattatcgaaagggtctaccgagattccaagaggagaatntaaaccncancaagattctttatgagaaggttcaggcgatggcgacaaagaaaggctgcactcctgcacaacttgctcttgcatgggttcaccaccagggagatgatgtctgtcccattccaggaacctccaagattgaaaacttgaaccagaacataggagctttatctgtgaagcttactcctgaanagatggctgagctggaagccatcgcccgaccggattttgtgaaaggagaacgatacgacagcaacatggctacttacaaggactcggagactccactactgtcttcttggaaagcagcataaaccgcatctttggactgcagtttatgatcggtttgaggggtaaatgggatgaaggcgttggacgaatgccgttttattgtgcttttggttgtgtgtgtgtgtgtgtttgaataagtttagtttaatggatgggtctgcgagtttgcaataagaaaaattcaatgcctaaaaaaaaaaaaaaan

SEQ ID NO: 565 - DNA, 1508 bp, Glycine max
  misc_feature (61)..(61): n is a, c, g, or t
  misc_feature (635)..(635): n is a, c, g, or t
  misc_feature (794)..(794): n is a, c, g, or t
  misc_feature (997)..(997): n is a, c, g, or t
  misc_feature (1118)..(1118): n is a, c, g, or t
  misc_feature (1127)..(1127): n is a, c, g, or t
  misc_feature (1151)..(1151): n is a, c, g, or t
  misc_feature (1297)..(1297): n is a, c, g, or t
  misc_feature (1325)..(1325): n is a, c, g, or t
  misc_feature (1336)..(1336): n is a, c, g, or t
  misc_feature (1425)..(1425): n is a, c, g, or t
  misc_feature (1489)..(1489): n is a, c, g, or t
  misc_feature (1508)..(1508): n is a, c, g, or t
  Peptide Sequence Number=SeqID_8686
  Probeset Number=SeqID_10344
taaactcctacactataagcgcttcttgtactcctactcgatttatcttaaatcacacgtnactcagagaggaggtctccccggcgtgtgcgcgcgccggctgctaagaactagtagggatcccatcgcggtgtggcaggcagattcttatcgtactacgcgttatcctcacaaacaggcttgcaatactgagatagggtggagcagaaaatcgagatcgttgtttaccgccgtagacgtagaagtactcttctcatacctatgctaaatatcacttgtaatcgtagttccgtccataccaacatgtaacactgcagcggtcgaagtagtactccatctcttcgggcatgaaaggtatagtaggacgctaattagtaattagacgttccgatgcggcggacagagtcagctcactaggatttattttgtaatcatcgcgcggctacaggatatatgccttgccatagagactctactctatattatgagtgaaccaaactaatcagagtcaccagcaaagacaaccatactccacactctcacatctccctctttcgggagctgagaaaaaggccacatgcttcgttagcaatctcctcgtatgtctccgcagtctcggcctcggcggatggcangctcgcgtatcttcagcatgatagcgcgtggagcgaaaccacttctctagatgacgcatctgaacaactgtagtcattctctcggcatctgatctacgaacaacccgtccgtgtcctgattgacgaggatagttgtttacgcggtcgttactcaagatncactaagatgcgcgcatagaccatgatgtcaatcatctaggacgaatattctacgtatgatccacatgagtgttggacttgtcaacactctatcgtatatatgtgttgagcattatgactaactgtttcatcttacctcatcgatatcgctctaaacagtacagctcatgttgatgtcggtttcttgatacaaatattatgtngatcattttactatacgttggtatgagatatctgcgctaaacaagcgctagagtggggtcccagataatcgactgctcgcgtgatatcagttacaacgtgtctgcgactcatcatcgtgangtctgatcngttcattcttactccatattattnacacgatatacatgcgcgacaatatcaatccttgatagttgccatcctagcttactacctgtaacctcctgctacacattatgtgagcgcactgcactcgcccccgtctctgttctgcagtatatacactcgatcgaacgctatgnaagttatctactattgcgatgtaagtcncgccgctccangagagtctcagcactctcgttcctccttatagaatgtgcgactggtcatgacatcgtgagtatatggcgtcgcgaacatatatgcatgnatagtgtctgtgtatctgtgtgcgtctactctcatcgtgtcctgcagacctcatcgtctcttcntaccgctatataaagttcn

SEQ ID NO: 566 - DNA, 2220 bp, Glycine max
  misc_feature (3)..(3): n is a, c, g, or t
  misc_feature (5)..(5): n is a, c, g, or t
  misc_feature (18)..(18): n is a, c, g, or t
  misc_feature (29)..(30): n is a, c, g, or t
  misc_feature (33)..(33): n is a, c, g, or t
  misc_feature (40)..(40): n is a, c, g, or t
  misc_feature (43)..(43): n is a, c, g, or t
  misc_feature (54)..(54): n is a, c, g, or t
  misc_feature (76)..(76): n is a, c, g, or t
  misc_feature (89)..(89): n is a, c, g, or t
  misc_feature (107)..(107): n is a, c, g, or t
  misc_feature (112)..(112): n is a, c, g, or t
  misc_feature (115)..(115): n is a, c, g, or t
  misc_feature (128)..(128): n is a, c, g, or t
  misc_feature (146)..(146): n is a, c, g, or t
  misc_feature (154)..(154): n is a, c, g, or t
  misc_feature (158)..(158): n is a, c, g, or t
  misc_feature (174)..(174): n is a, c, g, or t
  misc_feature (191)..(191): n is a, c, g, or t
  misc_feature (197)..(197): n is a, c, g, or t
  misc_feature (210)..(210): n is a, c, g, or t
  misc_feature (228)..(228): n is a, c, g, or t
  misc_feature (237)..(237): n is a, c, g, or t
  misc_feature (250)..(250): n is a, c, g, or t
  misc_feature (256)..(256): n is a, c, g, or t
  misc_feature (268)..(268): n is a, c, g, or t
  misc_feature (284)..(284): n is a, c, g, or t
  misc_feature (294)..(294): n is a, c, g, or t
  misc_feature (299)..(299): n is a, c, g, or t
  misc_feature (329)..(329): n is a, c, g, or t
  misc_feature (331)..(331): n is a, c, g, or t
  misc_feature (334)..(335): n is a, c, g, or t
  misc_feature (349)..(349): n is a, c, g, or t
  misc_feature (384)..(384): n is a, c, g, or t
  misc_feature (415)..(415): n is a, c, g, or t
  misc_feature (417)..(417): n is a, c, g, or t
  misc_feature (444)..(444): n is a, c, g, or t
  misc_feature (472)..(472): n is a, c, g, or t
  misc_feature (479)..(479): n is a, c, g, or t
  misc_feature (507)..(507): n is a, c, g, or t
  misc_feature (526)..(527): n is a, c, g, or t
  misc_feature (530)..(530): n is a, c, g, or t
  misc_feature (532)..(532): n is a, c, g, or t
  misc_feature (567)..(567): n is a, c, g, or t
  misc_feature (569)..(569): n is a, c, g, or t
  misc_feature (571)..(571): n is a, c, g, or t
  misc_feature (575)..(575): n is a, c, g, or t
  misc_feature (607)..(607): n is a, c, g, or t
  misc_feature (610)..(610): n is a, c, g, or t
  misc_feature (614)..(614): n is a, c, g, or t
  misc_feature (621)..(621): n is a, c, g, or t
  misc_feature (626)..(626): n is a, c, g, or t
  misc_feature (629)..(629): n is a, c, g, or t
  misc_feature (631)..(631): n is a, c, g, or t
  misc_feature (633)..(633): n is a, c, g, or t
  misc_feature (638)..(638): n is a, c, g, or t
  misc_feature (663)..(663): n is a, c, g, or t
  misc_feature (665)..(665): n is a, c, g, or t
  misc_feature (673)..(673): n is a, c, g, or t
  misc_feature (692)..(692): n is a, c, g, or t
  misc_feature (706)..(706): n is a, c, g, or t
  misc_feature (711)..(711): n is a, c, g, or t
  misc_feature (729)..(729): n is a, c, g, or t
  misc_feature (743)..(743): n is a, c, g, or t
  misc_feature (750)..(750): n is a, c, g, or t
  misc_feature (795)..(795): n is a, c, g, or t
  misc_feature (806)..(806): n is a, c, g, or t
  misc_feature (834)..(834): n is a, c, g, or t
  misc_feature (844)..(844): n is a, c, g, or t
  misc_feature (885)..(885): n is a, c, g, or t
  misc_feature (888)..(888): n is a, c, g, or t
  misc_feature (898)..(898): n is a, c, g, or t
  misc_feature (910)..(910): n is a, c, g, or t
  misc_feature (955)..(955): n is a, c, g, or t
  misc_feature (1006)..(1006): n is a, c, g, or t
  misc_feature (1011)..(1011): n is a, c, g, or t
  misc_feature (1025)..(1025): n is a, c, g, or t
  misc_feature (1033)..(1033): n is a, c, g, or t
  misc_feature (1035)..(1035): n is a, c, g, or t
  misc_feature (1053)..(1053): n is a, c, g, or t
  misc_feature (1063)..(1063): n is a, c, g, or t
  misc_feature (1066)..(1066): n is a, c, g, or t
  misc_feature (1075)..(1075): n is a, c, g, or t
  misc_feature (1097)..(1097): n is a, c, g, or t
  misc_feature (1099)..(1099): n is a, c, g, or t
  misc_feature (1178)..(1178): n is a, c, g, or t
  misc_feature (1195)..(1195): n is a, c, g, or t
  misc_feature (1246)..(1246): n is a, c, g, or t
  misc_feature (1252)..(1252): n is a, c, g, or t
  misc_feature (1257)..(1257): n is a, c, g, or t
  misc_feature (1260)..(1260): n is a, c, g, or t
  misc_feature (1293)..(1293): n is a, c, g, or t
  misc_feature (1302)..(1302): n is a, c, g, or t
  misc_feature (1334)..(1334): n is a, c, g, or t
  misc_feature (1374)..(1374): n is a, c, g, or t
  misc_feature (1385)..(1385): n is a, c, g, or t
  misc_feature (1490)..(1490): n is a, c, g, or t
  misc_feature (1578)..(1578): n is a, c, g, or t
  misc_feature (1611)..(1611): n is a, c, g, or t
  misc_feature (1613)..(1613): n is a, c, g, or t
  misc_feature (1660)..(1660): n is a, c, g, or t
  misc_feature (1804)..(1804): n is a, c, g, or t
  misc_feature (1809)..(1809): n is a, c, g, or t
  misc_feature (1813)..(1813): n is a, c, g, or t
  misc_feature (1902)..(1902): n is a, c, g, or t
  misc_feature (1917)..(1917): n is a, c, g, or t
  misc_feature (1932)..(1932): n is a, c, g, or t
  misc_feature (1974)..(1974): n is a, c, g, or t
  misc_feature (1986)..(1986): n is a, c, g, or t
  misc_feature (1994)..(1994): n is a, c, g, or t
  misc_feature (2013)..(2013): n is a, c, g, or t
  misc_feature (2017)..(2017): n is a, c, g, or t
  misc_feature (2019)..(2019): n is a, c, g, or t
  misc_feature (2033)..(2034): n is a, c, g, or t
  misc_feature (2077)..(2077): n is a, c, g, or t
  misc_feature (2101)..(2101): n is a, c, g, or t
  misc_feature (2116)..(2116): n is a, c, g, or t
  misc_feature (2125)..(2125): n is a, c, g, or t
  misc_feature (2163)..(2163): n is a, c, g, or t
  misc_feature (2187)..(2187): n is a, c, g, or t
  misc_feature (2198)..(2198): n is a, c, g, or t
  misc_feature (2201)..(2201): n is a, c, g, or t
  Probeset Number=SeqID_10345
cantnatagtacgactancagtagtatanngcntagtagntgnaataggactantatacttcgtatagcgtcactnctgtgtagtagtntacgaaagggtgtcgtgnctagntanatagcggactgangatgctccgtcgcatcgncgattccngtgnatcgcgtccggcgtanagtgtagtaagtaagtntagtantcgtagtagcgtncgagtcaggtgatcagtntgtacgagnctaatcgggtgtnatagtntcgagagcagangcgtgcgcagtggatngacagttaancgatnacatgagtatgagcgctgagtacgtcgatngntanntctctctggtattnctgctacggtatacacgagtatcggtcggagcagntacacgtcaccgacgtaactcactctgcgtngnagcgaatctcgatagacgaggagtctngtcgtttgtcatgcatgagatcgtacangcagtgncatcgagcagcgggatctagtttcgtangcatagtatcatgtagcannctngntatatgtgctgcactctcgcgtgcatctgtgatgntngnacancattatgcgtgatgacttaacgtagcgtagangtntgantgttcangtcancantngnacgtnccgtagtgtatgtccagcgtaccangnacgtcgtngcagctggtaaatcgttgncgagatctagtctntggangtgcgtgcagttgcgcgntgtcatggcgaatnctgtatnggggtcgtcgatgagaatgcacagcacggtagatgatggacgagncagagcatagncgcgtcggtgtgtcgtgcgtttgagacnagtacctacntcagctgtcgcgctgcgcagcagacgacatgtactgctcgngcntgttgatcgngtccatccaacntcatacatgctcagcgtcatatatcactgcgtgttgatgatagtnagattcatagcgcagtatctcagagtagactcagtagactgatacatccantacgnagctagcgcatcgntgatggcnangattgatactgatgctangctatgtacnatntctgctagnatacatcgatctacgtgatatnangtatagactactactatacacagtactagtgtcgtatcagcagcagactagtcagcgagtgatatagtcatcaccgggntagacagtgcgtgcgtncgcgtctgcttcgcgcagtcgagttctgacagagacagtacgagaacgatnagtgtncgttntanagagtagctagacgcatgagtgatagatcagcnagtcatgantagctctgtacacggttgcgagatagatagantcgtaccatataattgtaatgatgtatccgagcatcgcgntatgagatgtncagcgtctgatgtatatgatgtcgacggtacgctcacatagtccgatgtacagtagcagtatgactcgtacgagcgttcgtcagcggagtgatccagtctcgtcnacgagtcatacgcgactcgtagtctcgtcaagtgcagcgacactcatcgtgccgctgctctgctcttgagtgcactcaacagacagcntgactcgatcagctgtcgtgactatagtatatntngtgctgtcgtggctctagtcgcatatgactatacatcagtgagcagncgcggtgcgacgcgacaggctagatcgtagtatcgagtgtgactacttcaggtcgatgatcctgcgccagatctcgtaagcgtagcagatacgcgtcgatacactactatatacactagatcggcagcgcgtgctgcggcagcngtagnagcngagagacatgatgcacgtgagcaacagtgagcatgaagacgtcagatgcacggagatgatgagtagagtagagagatcaatagtatatnagaatagatacgacntctctagtctatatnaatatagtgaggatcgactacatggagagagatgtatatgantagatgatctanactcacangatatcagaatctctaaanatantnaatctactatgatnnaatggttctatgacgagtcgcgatcactcactagctacactgntggctccgtctcatatcgacgccngcgcgtcgtgcgtcngcacagccncatcgatacaggtcaatccacacagacccgacgtacgncactcagcacgtacttcagcatgnctacgtgctantancgtagcactgatatgggat

SEQ ID NO: 567 - DNA, 1726 bp, Glycine max
  misc_feature (175)..(175): n is a, c, g, or t
  misc_feature (192)..(192): n is a, c, g, or t
  misc_feature (512)..(512): n is a, c, g, or t
  misc_feature (588)..(588): n is a, c, g, or t
  misc_feature (1095)..(1095): n is a, c, g, or t
  misc_feature (1150)..(1150): n is a, c, g, or t
  misc_feature (1205)..(1205): n is a, c, g, or t
  misc_feature (1217)..(1217): n is a, c, g, or t
  misc_feature (1329)..(1329): n is a, c, g, or t
  misc_feature (1360)..(1360): n is a, c, g, or t
  misc_feature (1576)..(1576): n is a, c, g, or t
  misc_feature (1619)..(1619): n is a, c, g, or t
  misc_feature (1628)..(1628): n is a, c, g, or t
  misc_feature (1642)..(1642): n is a, c, g, or t
  misc_feature (1680)..(1680): n is a, c, g, or t
  misc_feature (1696)..(1696): n is a, c, g, or t
  misc_feature (1699)..(1699): n is a, c, g, or t
  misc_feature (1726)..(1726): n is a, c, g, or t
  Peptide Sequence Number=SeqID_8687
  Probeset Number=SeqID_10346
gtagttggtcgcccctcgcggactacgaggtagcgtccctgcgatattttgccgcccttatccagcccctgcggctctcgtgcgggccgtgtttgctgcacgatacccgggtaagtatttcctatagttgttatatgagttacgcctctcgcgggcaccttttgtatgttatatnttattggtgtgccggtnttgcgcccgctcccgcccattattatcctcctttgcccaccgcaccttcttttatacaacaaattatctcttccgcgaagactgtttaacgtcgaccttaatattatatatgtattctaccggagctctccgcgtcgtatatcggcctcagtatattgatgtgttccgagactcactcccctctattacttttatattgcgcacgcgtgtgtgtgatatttgtgtggcggttagcgcgcgcggtaatattaatagcgcgcgggtggtggggacggccccgcgcccccgagcgacaaacgcggcgaatccggaatattacnactcgccgcgcgtggttaatatctattaccacgttgtgaatagccgcgcgccgcgggcagagatttattgtatttngaactgcgcggtggagagtgaggcggagttgcggggcgaggatggtgtcttgtgccgtgtgttcctccgcgccgggcgcttatttttggcggcgggctattcgcgaataacgggcgcgcgcgcggggtggataagaactctctcgttggcgcggcgctttataataaaatacgggcgggtatattcgccgatgaagaatgtgggaggcacgcgcagaacgggcgggccggcgcatataataaaatgtggaagcggctgggtgtcggtgagttgagtcgagatatgtttgagaatattagagccggtgtgtcaatcgctccccgcacggttttctctaactacattatacgtcgactgttgttatgggtttaatgactaacaattgtgtagatcgcagagtacacggctgcttgtgggcaataatgtatgatatgtgtgtgtggtgtagacggctaaagcaaaggagcggctcgcgtctcatacatgaccgcgtaactaatgtatggnacgcgcagtgagttgtgtgcgccgcgtcgtcctcgccgcgattattatattaacntctgctgacgcagcgtgtgcgcgcgctggatgatgtatgtgtgagtaatatatantatatccgcggngcgtgcgtatatatataatagcggcggcgagggtgtgcggatggagacgttgacgagtcatatattaggcgtcgcgatcgtcgctcgacgcgcgcgccgattattttgtatnacatattgtatatgtattatatgaaatacgnggtgcggttcgtggtcagtcgttgcgctgagttgctgggatatcatataagcacgcgtcgctgtgtgctctgcgtcgcgcgcgatcgggagaatatcgcatgatgagacacactcggctacggcggcgtgtcggtgtacgtgtgtgcgcgcgcgacgactgatagcggcgtcagcgtactatatcgtcacacgcggcgcgggcgcgcgcgcgcganatagagagtcgagtctacagagcgcagtgactgcgcgcgtcgncgcgcagcncgggcgtattgatnggatagtgtattcgtcgctcgatgcatgctcgcagcgnattatatacacacatnctntatctcgcgatcgtcgccgcgacgcgn

SEQ ID NO: 568 - DNA, 1362 bp, Glycine max
  misc_feature (22)..(22): n is a, c, g, or t
  misc_feature (39)..(39): n is a, c, g, or t
  misc_feature (43)..(44): n is a, c, g, or t
  misc_feature (243)..(243): n is a, c, g, or t
  misc_feature (320)..(320): n is a, c, g, or t
  misc_feature (876)..(876): n is a, c, g, or t
  misc_feature (975)..(975): n is a, c, g, or t
  misc_feature (1109)..(1109): n is a, c, g, or t
  misc_feature (1239)..(1239): n is a, c, g, or t
  misc_feature (1243)..(1243): n is a, c, g, or t
  misc_feature (1350)..(1350): n is a, c, g, or t
  Probeset Number=SeqID_10347
ggacaccaccaagcccgccctntcgtccttgcggccaanaaannaaaaaaaaaaactgcaactcacttgcgtacggggggagcgcgcggcgcctatatgcgctgcgccagcgaggggggggtacgatggaggggcgatgggtgagaaaagcgagttggcgcaccgtattactcatttgatggtgtgttagtgtcttgttgtaataatgtcggcaggagctgggtgtattatgttatttacaancagagaaaatacacatcgacccaaaaccaaacccacaccgaccttactactataccacttcacatagagacagtatngtgtataggaggtagctatactccgttgtctcattttgtgtggtttcggcgcgcgcggctcagccgaggatggtgagatgtagagaagaatagacgaaccacaccaggcacccaactctactcatgcccagtaattattatttatatgtgttttgcgttagtgtaaccgccgcgggccgccgcgcggggccgttctttgcgactaactaatattcaaacgagacggaccggcaaatatagttattggtacggaagggtcaatagtgcttgtatagtggagaggtcaacagcacacaaagtgcacgccacatgaatcgttcgttacaatgtacggtcggccggggacggacggcggaggggggcgcgatatggcgatgactcatcggcgtagtgttgggtctgtgtctgcggcgtgtctttccgctggttgaaagtcgtcacagttcacgccgcgcagagaccattctgacgtgatataacataattctaatatctactagtattatataaacaccctccaccgcctgatacagcgtacatgggctcaatataattntgatgtgagctcactattgtctcgtagtgtgtgatcttgtatattgtaatattatggcgcggtcgtcgactatctacacacgccgacgcgcggtgaggngaagtgagagggcacaagatgagaggagagagagaaggaacatagagaaaagtagcggcgaatacgcgcgctcctcgcacgctgcgcggcacacaccagcgacccggctccacactatatcattctgtactcancacgatgcgcaggtaccaatatgtctgatgtgttctgtatagcacgtcgagtacgcgatgatctaactctagtgtcgctctcatacatcacttcaacgatacacgcattgaagccgcgcgaccactgcangtancaacgcgatatactatatgtgagtgatgtgatttattgtgctgatccgcggacacctgcgcgtagctctatgtgatgtattgtggagactgtgtccacagctgcctngaacgactcgcg

SEQ ID NO: 569 - DNA, 517 bp, Glycine max
  misc_feature (1)..(1): n is a, c, g, or t
  misc_feature (5)..(5): n is a, c, g, or t
  misc_feature (9)..(10): n is a, c, g, or t
  misc_feature (15)..(15): n is a, c, g, or t
  misc_feature (22)..(22): n is a, c, g, or t
  misc_feature (27)..(27): n is a, c, g, or t
  misc_feature (214)..(214): n is a, c, g, or t
  misc_feature (225)..(225): n is a, c, g, or t
  misc_feature (228)..(228): n is a, c, g, or t
  Peptide Sequence Number=SeqID_8688
  Probeset Number=SeqID_10348
ncagngcgnngaaanagcacgngcgcntgaagactccgggcacgactttatctggcccgcgaggaaaaacgatgggggtgaaggagataactctccggaggagcctgagaagagaatgaaggaaagtaacaaaggatatttaatatgggggagggccccacagttgccgataccggagaatcctgcgattggaggcgcggttactcactgcggncggaacacggnggnggaaagcgagaacgcggggtcgccgacggcgacgtggccccagattgctgagcatcctctcaacgagaagccggcggtggatgtgtcgaagataggggcgccggcgggggcgaaagagcggaggaactggaacgagcctgggagcgaggcggcgaaacgggaagagattggaaacgccattgcctccccgaggagcgaggaacaacaagacggaggaacgaggaagaaagcccaggagccaagcggcgccggcaaacaacgccacaaagggtgggggaccctcccacaa

SEQ ID NO: 570 - DNA, 2064 bp, Glycine max
  misc_feature (1)..(1): n is a, c, g, or t
  misc_feature (4)..(4): n is a, c, g, or t
  misc_feature (26)..(26): n is a, c, g, or t
  misc_feature (63)..(63): n is a, c, g, or t
  misc_feature (75)..(75): n is a, c, g, or t
  misc_feature (95)..(95): n is a, c, g, or t
  misc_feature (101)..(101): n is a, c, g, or t
  misc_feature (115)..(116): n is a, c, g, or t
  misc_feature (133)..(133): n is a, c, g, or t
  misc_feature (153)..(153): n is a, c, g, or t
  misc_feature (162)..(162): n is a, c, g, or t
  misc_feature (177)..(177): n is a, c, g, or t
  misc_feature (195)..(195): n is a, c, g, or t
  misc_feature (206)..(206): n is a, c, g, or t
  misc_feature (209)..(209): n is a, c, g, or t
  misc_feature (214)..(214): n is a, c, g, or t
  misc_feature (217)..(217): n is a, c, g, or t
  misc_feature (232)..(233): n is a, c, g, or t
  misc_feature (240)..(240): n is a, c, g, or t
  misc_feature (267)..(267): n is a, c, g, or t
  misc_feature (272)..(272): n is a, c, g, or t
  misc_feature (290)..(290): n is a, c, g, or t
  misc_feature (311)..(311): n is a, c, g, or t
  misc_feature (339)..(339): n is a, c, g, or t
  misc_feature (341)..(341): n is a, c, g, or t
  misc_feature (345)..(345): n is a, c, g, or t
  misc_feature (349)..(349): n is a, c, g, or t
  misc_feature (355)..(355): n is a, c, g, or t
  misc_feature (372)..(372): n is a, c, g, or t
  misc_feature (378)..(378): n is a, c, g, or t
  misc_feature (380)..(380): n is a, c, g, or t
  misc_feature (396)..(396): n is a, c, g, or t
  misc_feature (399)..(399): n is a, c, g, or t
  misc_feature (402)..(402): n is a, c, g, or t
  misc_feature (409)..(409): n is a, c, g, or t
  misc_feature (412)..(412): n is a, c, g, or t
  misc_feature (425)..(425): n is a, c, g, or t
  misc_feature (459)..(459): n is a, c, g, or t
  misc_feature (490)..(490): n is a, c, g, or t
  misc_feature (541)..(541): n is a, c, g, or t
  misc_feature (544)..(544): n is a, c, g, or t
  misc_feature (553)..(553): n is a, c, g, or t
  misc_feature (557)..(557): n is a, c, g, or t
  misc_feature (609)..(609): n is a, c, g, or t
  misc_feature (614)..(614): n is a, c, g, or t
  misc_feature (635)..(635): n is a, c, g, or t
  misc_feature (689)..(689): n is a, c, g, or t
  misc_feature (702)..(702): n is a, c, g, or t
  misc_feature (704)..(704): n is a, c, g, or t
  misc_feature (726)..(727): n is a, c, g, or t
  misc_feature (866)..(866): n is a, c, g, or t
  misc_feature (1020)..(1020): n is a, c, g, or t
  misc_feature (1029)..(1029): n is a, c, g, or t
  misc_feature (1042)..(1042): n is a, c, g, or t
  misc_feature (1083)..(1084): n is a, c, g, or t
  misc_feature (1091)..(1091): n is a, c, g, or t
  misc_feature (1158)..(1158): n is a, c, g, or t
  misc_feature (1198)..(1198): n is a, c, g, or t
  misc_feature (1277)..(1277): n is a, c, g, or t
  misc_feature (1411)..(1411): n is a, c, g, or t
  misc_feature (1486)..(1486): n is a, c, g, or t
  misc_feature (1551)..(1551): n is a, c, g, or t
  misc_feature (1711)..(1711): n is a, c, g, or t
  misc_feature (1813)..(1813): n is a, c, g, or t
  misc_feature (1939)..(1939): n is a, c, g, or t
  misc_feature (2000)..(2000): n is a, c, g, or t
  misc_feature (2003)..(2003): n is a, c, g, or t
  misc_feature (2005)..(2005): n is a, c, g, or t
  misc_feature (2007)..(2007): n is a, c, g, or t
  misc_feature (2033)..(2034): n is a, c, g, or t
  misc_feature (2036)..(2036): n is a, c, g, or t
  misc_feature (2054)..(2054): n is a, c, g, or t
  misc_feature (2064)..(2064): n is a, c, g, or t
  Peptide Sequence Number=SeqID_8689
  Probeset Number=SeqID_10349
nctnattctcgtatggtctacgatgnagtcgtagtatacgacgttgttgcaggtgtgaacttngtagtacgtcancatgagtagggcctcgtagnatgctnctggatagagttgnngacgtgatggatcatcngctgtcgtagtacgatgcgnacttcgtgngtgtcgtgggtagtngatggtcgacgagagtantatcagcagtntgncggantangtacagctgcgacanntcgtcancgatgaacgctagtatgatgatgcgangcgtnagatgagatactcagtcngtacagtaaagctgatgggtnagacgagtaggcttgacgacgacgacanangtancgtngcggtngtgtagagacgtcgtcncttacngnaccagatagcatttangcntangtgagtnacngaatactggtagngatattgagcacgtgtatagtacatcatcatgtncgcatgctacaattgatcgcgagggcgttangattcagctcagacagcggtcgcggtaggacgagcgtcagtcagatacgcnacnctagatgangganctgtcactggtggctggggtttagtgtgtcgatgatatagacatacggtcgngctanctgtgcatgatgagtgtgtgnaggatgtatatatagcgtgtcagcatcgatgtacacgtatatcgttactactcntgcataactatangnatgtccgtacgatgagacggcnngtacacatagagtcatcaagcatacgtgctgcgcgcgatacgctgagtacacagcgacaggtatcagtatctgcagtgtgtatgctgctgtcaagacacgtactacagatagatcaatctgcaattacgctgcgtgagntgaatcgctatagacgtgagtatggagtattagcgagacatcagcctgatggacgtacatcgcagcagcaggtgacctcttatatcagatgcaggtgttgcgatgatgctacgctagcgtccacatgcgcgtatgcagtactagtcgtatgagnttgtctgancacggagtgtganacgctgtgagcatatcgatgattagcagagaggagagagcnntcaatancagcgtgtcgatgttcgcgtttatgctgctactagtgtgactgcacattcacgcatacgcgagtagntatgtctgcagtccgctgcgtaacaggcggcgtcagaacncgctgattgaccacactttacagatatgtagcgtacgtatgtaggtgtgtgtgtacgctgcagatcacttatttatacncatcagtagtgttgttggagtgtcggagctggttaagttatagtgcagagagatgaggaatgaagcggcgccagagtcagagcataatgccgcgcgtgctatagtgaggtcaagtgaggcgtgacggtcgaggnggatctcgctattcgtactcggtggagtacgacgcggggcgatattatgagtctagttaacagcttacttgagtncgctcatatcgagtagatcactgcacgtgtgatagatgatgcgtgtatgatagtgcgtgagcaanagtggtcacgacgtcatacgtgatatgtggctgcatgacagggtggtcggcggacggagacggagtgcagtgatagagaggaatcgtacggataacatagaattgtagactttgctatgtgtgacagtgtcatgtgcactacacacattatcacgtcgtngctgtcgtgtgtagtagcgagagcgtcaagaatgactgatgatggctagtacgtggtgtgcgcggtgtaggaggagtataggcgcgtaaagcgatgtaatanagagcgcagcggaggcgtgatatgtgttgctgtgctgttcgtagattacgtgtgagatgtaggtgcagaggatgagagtggtgaacagagtagaacagtatagagattgacgctgatagcgtgagnaaagtcgtacgtaggcgcgcgcgtcatcttacatatatcctcacattttggccgagggggnggntngngctctgtgtgtctgtgcgcgtacctnngnacacattagttacgtggncggtattggn

SEQ ID NO: 571 - DNA, 1698 bp, Glycine max
  misc_feature (21)..(31): n is a, c, g, or t
  misc_feature (33)..(33): n is a, c, g, or t
  misc_feature (35)..(35): n is a, c, g, or t
  misc_feature (37)..(41): n is a, c, g, or t
  misc_feature (60)..(60): n is a, c, g, or t
  misc_feature (72)..(73): n is a, c, g, or t
  misc_feature (77)..(78): n is a, c, g, or t
  misc_feature (111)..(111): n is a, c, g, or t
  misc_feature (113)..(116): n is a, c, g, or t
  misc_feature (174)..(174): n is a, c, g, or t
  misc_feature (177)..(177): n is a, c, g, or t
  misc_feature (191)..(191): n is a, c, g, or t
  misc_feature (200)..(200): n is a, c, g, or t
  misc_feature (204)..(204): n is a, c, g, or t
  misc_feature (207)..(207): n is a, c, g, or t
  misc_feature (209)..(209): n is a, c, g, or t
  misc_feature (211)..(211): n is a, c, g, or t
  misc_feature (254)..(255): n is a, c, g, or t
  misc_feature (258)..(258): n is a, c, g, or t
  misc_feature (260)..(261): n is a, c, g, or t
  misc_feature (582)..(582): n is a, c, g, or t
  misc_feature (603)..(603): n is a, c, g, or t
  misc_feature (622)..(622): n is a, c, g, or t
  misc_feature (669)..(669): n is a, c, g, or t
  misc_feature (671)..(671): n is a, c, g, or t
  misc_feature (687)..(687): n is a, c, g, or t
  misc_feature (690)..(690): n is a, c, g, or t
  misc_feature (718)..(718): n is a, c, g, or t
  misc_feature (734)..(734): n is a, c, g, or t
  misc_feature (921)..(921): n is a, c, g, or t
  misc_feature (929)..(929): n is a, c, g, or t
  misc_feature (1106)..(1106): n is a, c, g, or t
  misc_feature (1157)..(1157): n is a, c, g, or t
  misc_feature (1230)..(1230): n is a, c, g, or t
  misc_feature (1240)..(1240): n is a, c, g, or t
  misc_feature (1251)..(1251): n is a, c, g, or t
  misc_feature (1268)..(1268): n is a, c, g, or t
  misc_feature (1337)..(1337): n is a, c, g, or t
  misc_feature (1374)..(1374): n is a, c, g, or t
  misc_feature (1396)..(1396): n is a, c, g, or t
  misc_feature (1432)..(1432): n is a, c, g, or t
  misc_feature (1501)..(1501): n is a, c, g, or t
  misc_feature (1527)..(1527): n is a, c, g, or t
  misc_feature (1555)..(1555): n is a, c, g, or t
  misc_feature (1563)..(1563): n is a, c, g, or t
  Probeset Number=SeqID_10350
ttatgggttgtgtgctccccnnnnnnnnnnntncncnnnnntccctcgttgtcgtcacanaaccaaaaccannccannacaatgacggcaccctactatactcatcacacncnnnnaacgtacatatctatactataaatctaaacatactattacatcaatcgtatagatcgnagngcatctctgtcatnatctgatgntagntgntnancaatctagataattacgactagcatcgcagtgggaaccgcccnnaananntactaaatatatacctaacattataatacatcaatcaaaccaaacaacagacaaggcaggaatagatgacgtaactgtacacatagcggtatataactatcactgtcctcgagagaataggagagacacaagaagccgcgactaacaatataacaataataacatatagatactatgatttatatataatatattatgttaagtgtagtgtgtcggcgtcggatgtacatcaacacttatcttaataaatatatcacaaataatatatatatatactaaaataactataataataaatattatatgatatatgaaattaanaataccatagacaacaaggcngagagagagcgacgcgaangcgccaacgcgcactaagtaacctaacacggactcggagaaagctancnccacacgcacgcaaanggngtcactaagcaccggcagctgctacctnatgagtgtaagacacncgttatgtgtgggcacacctcttaccataccatattgatcttctatgttgatgttatgtacacagaatgagatgtgtgtgtggagtgtatttatactctatatatgagcaccgacaatgcagagttatagagagttgacgtcgactgtagcaggtaagagtgtatggtgtatatatcgaccaatcgnagatacgntgtacaagtagagacacgatgcagactgaagatatgtgtgcacgtcagactcactatcacagttacgagtacacatgttcgtctcatacaatcctggaattatgcccaaacatcagcataactgatgctatggtgagtctctgcctcatgatcttactatccacacgatgtatcaantgactgatgatgatccgagctctgttgtgatgtgtctgaggtaaatactgngcatacactgcattctctctataaccgacctctgtgactagtacgacgtcactgtatgcactgatatgtgtgnagatactaanggaagatatgnatgtaggaggagtacancactctcactactcgactcgcatgcaggcaccgagcacgcgtcatgacacagatgtgctaactctactngtatatcgtcacgaactctcagcacatcacacgcggnctccactcacaacgagagaganctcatcatctcttcaatacactattcacacaactcnatctcacatcgtatcatacatctactcactatatacgaacacacacacgcactagtattatactaacanacacacatgatatatatatgctcgtntccatttacgcgatcacgatgacgtatnctactaancactaataatgaccatatactaacatatgcgcaatccaacatcaatccagaaatgtgtagatacaacactaaaagatgttataagtatgatataacatcactacatatactaacagataaataccactcaataca

SEQ ID NO: 572 - DNA, 1712 bp, Glycine max
  misc_feature (11)..(17): n is a, c, g, or t
  misc_feature (19)..(29): n is a, c, g, or t
  misc_feature (32)..(33): n is a, c, g, or t
  misc_feature (35)..(35): n is a, c, g, or t
  misc_feature (37)..(40): n is a, c, g, or t
  misc_feature (55)..(55): n is a, c, g, or t
  misc_feature (64)..(64): n is a, c, g, or t
  misc_feature (73)..(73): n is a, c, g, or t
  misc_feature (88)..(88): n is a, c, g, or t
  misc_feature (90)..(90): n is a, c, g, or t
  misc_feature (107)..(110): n is a, c, g, or t
  misc_feature (139)..(139): n is a, c, g, or t
  misc_feature (154)..(155): n is a, c, g, or t
  misc_feature (163)..(163): n is a, c, g, or t
  misc_feature (180)..(180): n is a, c, g, or t
  misc_feature (189)..(189): n is a, c, g, or t
  misc_feature (193)..(193): n is a, c, g, or t
  misc_feature (195)..(195): n is a, c, g, or t
  misc_feature (198)..(198): n is a, c, g, or t
  misc_feature (201)..(201): n is a, c, g, or t
  misc_feature (212)..(212): n is a, c, g, or t
  misc_feature (215)..(215): n is a, c, g, or t
  misc_feature (244)..(244): n is a, c, g, or t
  misc_feature (248)..(248): n is a, c, g, or t
  misc_feature (271)..(271): n is a, c, g, or t
  misc_feature (273)..(273): n is a, c, g, or t
  misc_feature (289)..(289): n is a, c, g, or t
  misc_feature (319)..(319): n is a, c, g, or t
  misc_feature (356)..(356): n is a, c, g, or t
  misc_feature (365)..(365): n is a, c, g, or t
  misc_feature (376)..(376): n is a, c, g, or t
  misc_feature (387)..(387): n is a, c, g, or t
  misc_feature (412)..(412): n is a, c, g, or t
  misc_feature (479)..(479): n is a, c, g, or t
  misc_feature (487)..(487): n is a, c, g, or t
  misc_feature (741)..(741): n is a, c, g, or t
  misc_feature (801)..(801): n is a, c, g, or t
  misc_feature (808)..(808): n is a, c, g, or t
  misc_feature (816)..(816): n is a, c, g, or t
  misc_feature (819)..(819): n is a, c, g, or t
  misc_feature (838)..(838): n is a, c, g, or t
  misc_feature (854)..(854): n is a, c, g, or t
  misc_feature (901)..(901): n is a, c, g, or t
  misc_feature (962)..(962): n is a, c, g, or t
  misc_feature (1000)..(1000): n is a, c, g, or t
  misc_feature (1028)..(1028): n is a, c, g, or t
  misc_feature (1030)..(1030): n is a, c, g, or t
  misc_feature (1034)..(1034): n is a, c, g, or t
  misc_feature (1101)..(1101): n is a, c, g, or t
  misc_feature (1138)..(1138): n is a, c, g, or t
  misc_feature (1232)..(1232): n is a, c, g, or t
  misc_feature (1276)..(1276): n is a, c, g, or t
  misc_feature (1284)..(1284): n is a, c, g, or t
  misc_feature (1288)..(1288): n is a, c, g, or t
  misc_feature (1299)..(1299): n is a, c, g, or t
  misc_feature (1305)..(1305): n is a, c, g, or t
  misc_feature (1312)..(1312): n is a, c, g, or t
  misc_feature (1439)..(1439): n is a, c, g, or t
  misc_feature (1441)..(1441): n is a, c, g, or t
  misc_feature (1448)..(1448): n is a, c, g, or t
  misc_feature (1458)..(1458): n is a, c, g, or t
  misc_feature (1471)..(1471): n is a, c, g, or t
  misc_feature (1564)..(1564): n is a, c, g, or t
  misc_feature (1593)..(1593): n is a, c, g, or t
  misc_feature (1612)..(1612): n is a, c, g, or t
  misc_feature (1632)..(1632): n is a, c, g, or t
  misc_feature (1658)..(1658): n is a, c, g, or t
  Peptide Sequence Number=SeqID_8690
  Probeset Number=SeqID_10351
ggggggggggnnnnnnncnnnnnnnnnnnccnncncnnnncgcacggcgccgcgnctcacgcgngcgcgggcnccgccgccggcgcgngngcgcccggcgtcgcccnnnnaatatattcggcacgaccgacggccgccntaccccaccccctcnnacacatcntcaccctccctctcttntctcgtgcnctcncnctnccnctctctctcgngtntctggcaggatcttgtagtcgcacttganccgncgtcgcgcagtcgtacgtcgcangnatagtcatgagtatangtaatgtgtgtgttagtgtgtgtgagattnttgtttatactacaaaattaatttatatgtttatagntatcacatnacactctcatntgtgtgtctcntcgcgtgtgtttggtgagatgtgtngagtgtggttgatgggtgtgtgagtgtgaagtagtgtttttgtcgtgagagtgcgtgtctggagtgntctctacntctccacactctcttctcttgtatacatatgtctgaattctatttaatatctcatatactacttaaatctgtcactcatcactatatcatctctttattatatctcatattattacactctattactacgatgagtagtataatgataatagtatgtatatataggtttgtctgctatagtgctgcttctatctctgtatgtctcttgtacgactgtgcctctcgtattgaggtatcgacagcagcacagagtngtcgtgtcgtcgcacgatcagctatactgacatctcatcagtattgcatactgtgtagtntagagtngtagtganatnatgtgtgacgttactctangtgtgtgttatcgtgncgtcgatcgtcttgagaatgtcgtctcactacactactagtaaatcncgctatcactgcgaccgcgatcgcacacgagagcatgacgcgatcaaatacataccgatgncagactataccgagcacagtcgcatagacgagatcacnacaaagtagcaaaagtcacacgtagacntntgangagcactactagcgcacggaggatcactctcaggtaccgttgatgttgactatatctctactctccncatatgaagaggtgatccgacagcatgcgactacatnactactcacgactataactgtgatgacttcatcgatatctaaatgagactgccgcactgcgactgagagcgcatatcgacgatgtagttctagncttgtagcaatgacactctctagatcggatttgattcggtcgtncgcgcgcntgcncgacgtcgctnctcagntgcgcgncgcatctgcgcgcgtctggctgctcgcgcatgtcatccgctgctgcctcactctcactctctcacttctctactcgctcgcgtctctctcctctctactctgtactactctcccatctaatctccanancgaacanacgcaactanagatcacagacanaccgactcacgtcatgataatacgtacacaatgatgagtgatgagacgaagatatatcaattagactacaccatatatatgacagagacatgncgctatgactcaggtagcgctctgctcantgatcttatgtgtagtagnagtgcacgtgcagtgtgcgngtctctgtactgtactatcatcgttntgatttgtcatctcactcgttacttcatcagcgtgctgtcatatcttcgcacta

SEQ ID NO: 573 - DNA, 443 bp, Glycine max
  Probeset Number=SeqID_10352
ggctcgagagccgaaccaactcctgttttttctggcgacaggctcacttttgctccgaatggcctccgatggtcaaaaccgagatggatgcataaactgatgcaaatggggttccaccaagggggactccaaatagcggttccatgtcttattattcctgacaccctccacttaatgagaggattattttatccatgaccagaagatctggttctgcacacccatggcatgacctcgagatgggacctggagctccaattatcttcaattgactgattgaaattgggaaagggagcaaggtgaaatatgaactggacaaaaagtcggagcttattaagatcgaccgcgtgcattactcatcagctgtttatactgacaactatgggtttatccctcgtactatttgagggacagtgatcccctggatgtcttgagtattatgc

SEQ ID NO: 574 - DNA, 509 bp, Glycine max
  Peptide Sequence Number=SeqID_8691
  Probeset Number=SeqID_10353
cccaccctccccaccccaatcgcgggtgcaccgccggcgacccaccacggccacgcaccgccgggccgctcctcctcctcctccttcgcccaaggtcgccagccttccttcctcctttcccgagcagtgcttctccaccggtaagcgactgctcttcatccttgccttgcgtcctcttttgctagatccatggccatggaggtaagatgcagcgggcaaggctgcctcatcgacatcaagcttcgtggtgatgatgctgggcatggacgaacagcaagtagcagcatcaccaccattgcgggaagctcggtggtggcgagatctattcattgaggcatcaccaccactcctccgacaagcacgccgctggttgacagctcttcctcatcttctaattcaatttttctaggtagaagagatgcatctccttgtttttttaaacaagtctattatttaatcaatctcttgagatgcatctgctttcgtgtgtgattgtgtcttctgtgtgg

SEQ ID NO: 575 - DNA, 589 bp, Glycine max
  Probeset Number=SeqID_10354
agatcaatatctacaacatctctttgaatatcatattgaagagatggcaaagatgtcaccgttttcgacgctcattgttatcctcgtatcttccatcatgattcaccaccttccattggcgagctccacacaatggtgcgtggcctctccgacgtcgaaagagaaacagctagaagaaaatctcgggtttgcatgcgctaatggagttgactgcagaccaatcctagaaggcggagcctgttacaaccccaatactccattaggccatgcgtcttacgtgatgaacgcatattacgcaacccatgaccgcaccgactacgcgtgcaagttctttttcccaaacagtgccatgttgactactacaaaccctagttatggtagttgtgtctatgcttaagtattttcgttggttttcgatatgtgatccacggcatacctcatagcctgataggatgtatggttatggcagatccaatgtcgtttttcttttaccaattttatagttataaaaataagtcctcataatgtttcgtttaagtaattaagtataacgaaaatatcgaaggcatggcatcgttcggtatctttc

SEQ ID NO: 576 - DNA, 2224 bp, Glycine max
  misc_feature (41)..(41): n is a, c, g, or t
  misc_feature (87)..(87): n is a, c, g, or t
  misc_feature (130)..(130): n is a, c, g, or t
  misc_feature (142)..(142): n is a, c, g, or t
  misc_feature (145)..(145): n is a, c, g, or t
  misc_feature (150)..(150): n is a, c, g, or t
  misc_feature (166)..(166): n is a, c, g, or t
  misc_feature (171)..(172): n is a, c, g, or t
  misc_feature (201)..(201): n is a, c, g, or t
  misc_feature (248)..(248): n is a, c, g, or t
  misc_feature (274)..(274): n is a, c, g, or t
  misc_feature (327)..(327): n is a, c, g, or t
  misc_feature (331)..(331): n is a, c, g, or t
  misc_feature (343)..(343): n is a, c, g, or t
  misc_feature (515)..(515): n is a, c, g, or t
  misc_feature (524)..(524): n is a, c, g, or t
  misc_feature (528)..(528): n is a, c, g, or t
  misc_feature (573)..(573): n is a, c, g, or t
  misc_feature (633)..(634): n is a, c, g, or t
  misc_feature (646)..(646): n is a, c, g, or t
  misc_feature (802)..(802): n is a, c, g, or t
  misc_feature (842)..(842): n is a, c, g, or t
  misc_feature (844)..(844): n is a, c, g, or t
  misc_feature (856)..(856): n is a, c, g, or t
  misc_feature (889)..(889): n is a, c, g, or t
  misc_feature (914)..(914): n is a, c, g, or t
  misc_feature (993)..(993): n is a, c, g, or t
  misc_feature (997)..(997): n is a, c, g, or t
  misc_feature (999)..(999): n is a, c, g, or t
  misc_feature (1080)..(1080): n is a, c, g, or t
  misc_feature (1107)..(1107): n is a, c, g, or t
  misc_feature (1124)..(1124): n is a, c, g, or t
  misc_feature (1184)..(1184): n is a, c, g, or t
  misc_feature (1198)..(1198): n is a, c, g, or t
  misc_feature (1209)..(1209): n is a, c, g, or t
  misc_feature (1216)..(1217): n is a, c, g, or t
  misc_feature (1219)..(1219): n is a, c, g, or t
  misc_feature (1232)..(1232): n is a, c, g, or t
  misc_feature (1243)..(1243): n is a, c, g, or t
  misc_feature (1245)..(1245): n is a, c, g, or t
  misc_feature (1264)..(1264): n is a, c, g, or t
  misc_feature (1292)..(1292): n is a, c, g, or t
  misc_feature (1300)..(1300): n is a, c, g, or t
  misc_feature (1320)..(1320): n is a, c, g, or t
  misc_feature (1335)..(1335): n is a, c, g, or t
  misc_feature (1380)..(1380): n is a, c, g, or t
  misc_feature (1402)..(1403): n is a, c, g, or t
  misc_feature (1427)..(1427): n is a, c, g, or t
  misc_feature (1468)..(1468): n is a, c, g, or t
  misc_feature (1576)..(1576): n is a, c, g, or t
  misc_feature (1587)..(1587): n is a, c, g, or t
  misc_feature (1602)..(1602): n is a, c, g, or t
  misc_feature (1629)..(1630): n is a, c, g, or t
  misc_feature (1640)..(1640): n is a, c, g, or t
  misc_feature (1647)..(1647): n is a, c, g, or t
  misc_feature (1757)..(1757): n is a, c, g, or t
  misc_feature (1783)..(1783): n is a, c, g, or t
  misc_feature (1785)..(1785): n is a, c, g, or t
  misc_feature (1835)..(1835): n is a, c, g, or t
  misc_feature (1885)..(1885): n is a, c, g, or t
  misc_feature (1891)..(1891): n is a, c, g, or t
  misc_feature (1894)..(1895): n is a, c, g, or t
  misc_feature (1906)..(1906): n is a, c, g, or t
  misc_feature (1933)..(1933): n is a, c, g, or t
  misc_feature (1961)..(1961): n is a, c, g, or t
  misc_feature (1988)..(1988): n is a, c, g, or t
  misc_feature (1998)..(1998): n is a, c, g, or t
  misc_feature (2019)..(2019): n is a, c, g, or t
  misc_feature (2023)..(2025): n is a, c, g, or t
  misc_feature (2029)..(2029): n is a, c, g, or t
  misc_feature (2031)..(2031): n is a, c, g, or t
  misc_feature (2047)..(2047): n is a, c, g, or t
  misc_feature (2053)..(2053): n is a, c, g, or t
  misc_feature (2068)..(2068): n is a, c, g, or t
  misc_feature (2080)..(2080): n is a, c, g, or t
  misc_feature (2086)..(2086): n is a, c, g, or t
  misc_feature (2094)..(2097): n is a, c, g, or t
  misc_feature (2116)..(2116): n is a, c, g, or t
  misc_feature (2120)..(2120): n is a, c, g, or t
  misc_feature (2128)..(2128): n is a, c, g, or t
  misc_feature (2130)..(2131): n is a, c, g, or t
  misc_feature (2150)..(2150): n is a, c, g, or t
  misc_feature (2156)..(2156): n is a, c, g, or t
  misc_feature (2160)..(2160): n is a, c, g, or t
  misc_feature (2162)..(2163): n is a, c, g, or t
  misc_feature (2176)..(2177): n is a, c, g, or t
  misc_feature (2179)..(2179): n is a, c, g, or t
  misc_feature (2182)..(2182): n is a, c, g, or t
  misc_feature (2185)..(2186): n is a, c, g, or t
  misc_feature (2199)..(2201): n is a, c, g, or t
  misc_feature (2203)..(2206): n is a, c, g, or t
  misc_feature (2217)..(2217): n is a, c, g, or t
  Peptide Sequence Number=SeqID_8692
  Probeset Number=SeqID_10355
ctgtttgatgagtattattaggattacatcatgtacagtantacactcatcggcagtatattcatatgtacgtggcagtctcatagntttcatctcaccgtcttctgtatcgccttcgtcccttcggcgncgctctgtcgcnacntcgtnctctgaccgtcgtgcncgtgnngctgcgacgacggacagtacgcacgagcnagcgatcaggacgccgacgacaacgcatacgtacacgcatcaccagntgcgtgaagtgagagcatagaatgangcgcagagagagacgagtcaggaatacaatgacactacacacacgaagtagangaantagcagagagangtgagatgcaggtagtaagtcagatgcagaacagatcaccgatcgcacgcgacagcacacgtctatgataagcgtgtacacatgtgtgcgagtagacgggagtcgtagagacgacagtagcgctgagtgccacggcgacgtgcggcgcgagtgagcgcggtcgacgggcgtnactgcgtgnagtntgagtagagagagctgagtagtgctactagtcctgacgctgtgtncgtgtgtccgctaggacgcgtcgagcatgtctgtcgtggaggtcgtgagtcagtgcagcnntctgtgcgctancgatcgtcgaatcgtgtgtagaggtatattcgcactgtctcgtgtgtcgacaacttgtagctagcatactcgtccgcgtctagcatctcatgcattgacacagctgcgtatcgcgcctcacactcgcatagtaccgcctcacgtataagtagtgtngtgtgtgtgcggtaggtgtgtggggatttgatgttatatnantcttgagtgtancgcagcagctgatcgcgtctagtaacgcgtggnagcatgagtaagcaggtgctgcggncgagtgcatgtgcgtacacatgatagcatcaatgtatatcgtggatgacgcacagtcgtgagtagcatcgtgcgcgtcnctgntngatcgtcgagtgctagtcagtccagcgcgcatgctagagcgacgatcatgacgcaatagcgatatgctcgtcgctagctcncgacactctatacaccacgagtacatnagaggagcgagtgtcgnccgagtgagagagctgctcagctcgtcacgagcgcagcgaataggtcaagcgacagagcnaggagcgtctgacngtgagtacgtngagtggnngnagcagggtacgangcgaggagtananagagacagacagagtgcgngatgtggcgtcgcgtgtgtcgccgtcgntcgcgctntcgtgtcgtccacgtccctntctgcgtgtcgtcgnagcacgcgctctttcgtgcagtgcgcgtctgggcagcgcgtcccncgtgtctcgcgcgcgcgcgcgnncacactcctaactcacgcaaacantcgacctcccaatacatatcactccgcatccctcacttctnagccatctcatcacatattttatagttccctagtggttacagatcgttatattatatgtgattatgtactatgtgtgagattagtatatgtgttattcacgtcgattnactaatatatntgtgatcgtcctcanccgccatctcatacaacctgcactaannacaccacgancgccgancattcacaacacaccccaccgaccacaagacactcgtctttagtacttcgctctcgcttcactgtaccgtacgtgatttctgcatctacgtacctcaccttctgcgcgcncacctatatacctctagtcaccggtntntattgtttagtcattcaccgtcgttccgcataccgctctcggacgatctnttattcctctgctctttatcgcgacccctcttcacctctcgctccgtctncctctnctnncgccccagcanatcgatagggatagacagtaagagagncacgcgctgccgacaccacgctggagancacgtgcgcggcagttcgccgaagagnagactagcgngacgaaacacagacagaggtngaannntttngntgacacacgcccgtancggtcnacgaatcaccgccanacgcacacaggnatgagnaggcggcnnnngacagcgcacgccacaccnaccncaagcgcnannaccacgccacaaaacgcangaccancacnanncgccgcacccccnncnccnccnncaccgcccccccnnncnnnncccaacccccncccaccc

SEQ ID NO: 577 - DNA, 530 bp, Glycine max
  misc_feature (498)..(498): n is a, c, g, or t
  misc_feature (500)..(500): n is a, c, g, or t
  Peptide Sequence Number=SeqID_8777
  Probeset Number=SeqID_10356
gaatcgtataaacacgagaaccggtctaaaggttgagaacctgagctccttcttcttctcatcgatcaagatggggaatacgaattgcatcgtcggaggttgcatagatcaagcgagcgttggtgtggtagaacgctggggccgattcgagcacatagccgagcctggttgccacttcttcaaccctctcgcgggtcagtggctcgccggagtcctctccacccggatcaactctctcgaggtcaaaatcgagaccaaaaccaaggataatgtgtttgtgcagctgatttgctcgattcagtatcgtgtggtgaaaactaatgctgatgatgcgttttacgagcttcagaacccgagagagcagatccaagcttacgtttttgatgtggttagagctttggttccgatgatgactcttgacgctctttttgaacaaaagggagaagtagccaagtctgttcttgaagaactcgagaaggtgatgggggcttatggatncngcattgagcacattcttatggttgacatca

SEQ ID NO: 578 - DNA, 635 bp, Glycine max
  misc_feature (1)..(16): n is a, c, g, or t
  misc_feature (48)..(48): n is a, c, g, or t
  misc_feature (59)..(60): n is a, c, g, or t
  misc_feature (75)..(75): n is a, c, g, or t
  misc_feature (80)..(80): n is a, c, g, or t
  misc_feature (97)..(97): n is a, c, g, or t
  misc_feature (115)..(115): n is a, c, g, or t
  misc_feature (117)..(117): n is a, c, g, or t
  misc_feature (128)..(128): n is a, c, g, or t
  misc_feature (148)..(148): n is a, c, g, or t
  misc_feature (164)..(164): n is a, c, g, or t
  misc_feature (185)..(185): n is a, c, g, or t
  misc_feature (205)..(205): n is a, c, g, or t
  misc_feature (363)..(363): n is a, c, g, or t
  misc_feature (617)..(635): n is a, c, g, or t
  Peptide Sequence Number=SeqID_8778
  Probeset Number=SeqID_10357
nnnnnnnnnnnnnnnnttggcctattggtaaaaaagggggggattaanaaaaattaaannggatttaacaaaatntaaangttacaattgccatttnccattcagggggggcaantntggggaagggnaatcgggggggcctttttgntataacccaagctggngaaaggggggagtgtgcaggngataagtgggtaacgcaggntttcccagtcacggacgtgtaaaaggacggccagtggaattgtaatacgactcattatagggcgaattgggtaccggccccccttcgaggtcgacggtatcgataagcttgatatcgaattcggcacggagcaggcttcggaattaacattgatattnttaataacaggcaaggttattcaaggtcccaacgaatgacactactgaaatgtgaagactgtcaaggtatccttaaggaaaagttttagcaatggttatttatctcccatttcacacaacaaattatttatttgtacagttattcttttagggaggggaaattggggatgctgatgggagtaaaccagcacaagataggttgtaaagttcaacatatctgtgattagaatgatggtcaaatgtgcatttgattnnnnnnnnnnnnnnnnnnn

SEQ ID NO: 579 - DNA, 423 bp, Glycine max
  Probeset Number=SeqID_10358
gcacgaggccaaactccgaatctatagtttctgaggaaccagaggtacgccaagaagcataacaagaagagcggtgaaacaatcacggaagaagagtcccctgctggtgtaatagctgccattggatttctcccctttaactggcgatacagcagcaagtaccagcccagcagacaggtgcaggtcaactcagctagcaggcgtaggatgcaggtacaagtgatgttgtcaggatggttggcgaaataggcccatgcaggattcaccatgcatgtgtagaataaaccctttccgtaaattgtttggaaagagacgcaaatggagaattagtttgtaaatctaatcagttggattcaatttgtgtcagatgatttgatgcgttgagtcttacttggcaaaaaaaaaaaaaaaaaaattttaaaa

SEQ ID NO: 580 - DNA, 965 bp, Glycine max
  Peptide Sequence Number=SeqID_8779
  Probeset Number=SeqID_10359
atatcattatcaatatcaacatatagagagatgcagatacgtttcaaaagaagaagaggataactagcgaatctttattttttttgttataaaagtcaacagaatctttactgatccctcgtagacttttcttctagggcttatccgaattttatcatcaaattaaaatctaatcaaccactaaccacatcctcccatctccagattcatcgtcgcgggtagacggagaagaagatatggcggttactatgaagcatatgtcgttgatcgtctctttgttcggcgtcttgtccttccttcttggggtcatcgcggagaacaagaagcctgcgtctgggactcctataaacgggaagggagtagttatctgcaaatatccatctgatccaactgtcgccttgggttacctttctgctgcctttctccttgcctccacaatagctggatacaaatccttgttcatgtcttacaagggaaggtctgttcccaactctgtcttgttcaaaagcaccaccttctctgtcttcttcaacattgccttgatcacatctggactggcactgtctctgttgctatggccaaccattacagagcaacttcacttgacacgtaatgtccatcggaacttagagaccagttgccccacggctaagaccggtctgcttggtggaggtgcctttgtttcattagactcgtgccttttctggttggtcgctctgatgctcgctgataacgcacgtgaagaccattttgatgaaactgagaacaggaacgtcaatgggaactcttcctctagggatgttaatctcaagattgatgcttgagagaataatctgcatccgattattagtattgggttttaataaatggttttttacattattctattacttgtttgattaagaaaataactattcgtttcttctggttcttctatgttcttaataatatttgatcttaaagat

SEQ ID NO: 581 - DNA, 1896 bp, Glycine max
  misc_feature (4)..(4): n is a, c, g, or t
  misc_feature (6)..(6): n is a, c, g, or t
  misc_feature (12)..(12): n is a, c, g, or t
  misc_feature (19)..(19): n is a, c, g, or t
  misc_feature (29)..(29): n is a, c, g, or t
  misc_feature (43)..(43): n is a, c, g, or t
  misc_feature (55)..(55): n is a, c, g, or t
  misc_feature (94)..(94): n is a, c, g, or t
  misc_feature (102)..(102): n is a, c, g, or t
  misc_feature (106)..(107): n is a, c, g, or t
  misc_feature (157)..(157): n is a, c, g, or t
  misc_feature (159)..(159): n is a, c, g, or t
  misc_feature (163)..(163): n is a, c, g, or t
  misc_feature (176)..(176): n is a, c, g, or t
  misc_feature (187)..(187): n is a, c, g, or t
  misc_feature (209)..(210): n is a, c, g, or t
  misc_feature (212)..(212): n is a, c, g, or t
  misc_feature (272)..(272): n is a, c, g, or t
  misc_feature (296)..(296): n is a, c, g, or t
  misc_feature (298)..(298): n is a, c, g, or t
  misc_feature (313)..(313): n is a, c, g, or t
  misc_feature (319)..(319): n is a, c, g, or t
  misc_feature (325)..(325): n is a, c, g, or t
  misc_feature (328)..(328): n is a, c, g, or t
  misc_feature (355)..(355): n is a, c, g, or t
  misc_feature (367)..(367): n is a, c, g, or t
  misc_feature (382)..(382): n is a, c, g, or t
  misc_feature (436)..(436): n is a, c, g, or t
  misc_feature (444)..(444): n is a, c, g, or t
  misc_feature (448)..(448): n is a, c, g, or t
  misc_feature (453)..(453): n is a, c, g, or t
  misc_feature (465)..(465): n is a, c, g, or t
  misc_feature (469)..(469): n is a, c, g, or t
  misc_feature (491)..(491): n is a, c, g, or t
  misc_feature (632)..(632): n is a, c, g, or t
  misc_feature (685)..(685): n is a, c, g, or t
  misc_feature (700)..(700): n is a, c, g, or t
  misc_feature (743)..(743): n is a, c, g, or t
  misc_feature (763)..(763): n is a, c, g, or t
  misc_feature (800)..(800): n is a, c, g, or t
  misc_feature (802)..(802): n is a, c, g, or t
  misc_feature (807)..(807): n is a, c, g, or t
  misc_feature (827)..(827): n is a, c, g, or t
  misc_feature (840)..(840): n is a, c, g, or t
  misc_feature (845)..(845): n is a, c, g, or t
  misc_feature (853)..(853): n is a, c, g, or t
  misc_feature (892)..(892): n is a, c, g, or t
  misc_feature (914)..(914): n is a, c, g, or t
  misc_feature (992)..(992): n is a, c, g, or t
  misc_feature (1003)..(1003): n is a, c, g, or t
  misc_feature (1014)..(1014): n is a, c, g, or t
  misc_feature (1054)..(1054): n is a, c, g, or t
  misc_feature (1063)..(1063): n is a, c, g, or t
  misc_feature (1065)..(1065): n is a, c, g, or t
  misc_feature (1072)..(1072): n is a, c, g, or t
  misc_feature (1124)..(1124): n is a, c, g, or t
  misc_feature (1175)..(1175): n is a, c, g, or t
  misc_feature (1185)..(1185): n is a, c, g, or t
  misc_feature (1203)..(1203): n is a, c, g, or t
  misc_feature (1205)..(1205): n is a, c, g, or t
  misc_feature (1228)..(1228): n is a, c, g, or t
  misc_feature (1230)..(1230): n is a, c, g, or t
  misc_feature (1284)..(1284): n is a, c, g, or t
  misc_feature (1286)..(1286): n is a, c, g, or t
  misc_feature (1291)..(1291): n is a, c, g, or t
  misc_feature (1314)..(1314): n is a, c, g, or t
  misc_feature (1320)..(1321): n is a, c, g, or t
  misc_feature (1324)..(1324): n is a, c, g, or t
  misc_feature (1334)..(1335): n is a, c, g, or t
  misc_feature (1346)..(1346): n is a, c, g, or t
  misc_feature (1384)..(1384): n is a, c, g, or t
  misc_feature (1392)..(1392): n is a, c, g, or t
  misc_feature (1412)..(1412): n is a, c, g, or t
  misc_feature (1454)..(1454): n is a, c, g, or t
  misc_feature (1479)..(1479): n is a, c, g, or t
  misc_feature (1505)..(1505): n is a, c, g, or t
  misc_feature (1516)..(1516): n is a, c, g, or t
  misc_feature (1631)..(1631): n is a, c, g, or t
  misc_feature (1633)..(1633): n is a, c, g, or t
  misc_feature (1641)..(1642): n is a, c, g, or t
  misc_feature (1653)..(1653): n is a, c, g, or t
  misc_feature (1706)..(1706): n is a, c, g, or t
  misc_feature (1709)..(1709): n is a, c, g, or t
  misc_feature (1721)..(1721): n is a, c, g, or t
  misc_feature (1727)..(1727): n is a, c, g, or t
  misc_feature (1734)..(1734): n is a, c, g, or t
  misc_feature (1738)..(1738): n is a, c, g, or t
  misc_feature (1749)..(1749): n is a, c, g, or t
  misc_feature (1753)..(1753): n is a, c, g, or t
  misc_feature (1755)..(1755): n is a, c, g, or t
  misc_feature (1832)..(1832): n is a, c, g, or t
  misc_feature (1855)..(1859): n is a, c, g, or t
  misc_feature (1864)..(1864): n is a, c, g, or t
  misc_feature (1866)..(1868): n is a, c, g, or t
  misc_feature (1883)..(1887): n is a, c, g, or t
  Peptide Sequence Number=SeqID_8780
  Probeset Number=SeqID_10360
ccgncntgcacntcgttgnaccgtcttgntgcttggatattgntatggctactgnatatgctgatcgacgagtacgtatgatactatatcggcntcctggtngtanntggctgttggaatgatacggtcaggactggcatgacgacgacatgacagntnatgnttatgaagagcgntgagagtacgngagagggcactgtccgcatagnngntatgcagcggatgacgatcagatgttagagtcgacgtgatacgtcggcgtgtgtatgcantgatgatgacacgatcacgcgtcngntcgtgtcagtagtcnaatcgncgctgnctngcctcactcgtcatcatgtatctcgtngtagatacatcnatatgatagtatgantgggcgtgagagtgtgtcgagatggatggctacactagtagcagtgacgtagtnacggtganagtnagtgnaatgagtcgagnacantggtacaggacgtcatcatacnatgagtccgcatagttggtgtacgagtgtgagtcgggcttcatatcacatcggtagatgtcgatgaatgctctacagacactaaacagatctgtgtgcgtgtgcgacgatgcagtgcatcgctggtatgatgtcatggacngtacacgcgatgatagtagtgacaggcagtcgcaattcagctgcgcaccatantgacgtgcgtgatgncatggagagagagcagttgtgatatgaatcactacgatgtganatctcgctaccttatcgtancatctgcatcgtcgagtgatcttctctacatatcgtncntagcnaatgctagagactgctgtgnatggatggtacantaacnagtcacanactctcaggaacgcgagcgattatgatcgtcgacatcanatacttacagatatgcgcactntcgctatatacggctatatatacgatcactgtacttagcgtatctatgagtgaatcacagatagagtgtatgagtatnatagcatgtanttatatagtantcgtagtgtaggtctgctgctagtggtcgcatggtattancatgctatntncatcgtnctattgcatctatatacacttccgatctcactctcatcgcctatcccatcantatactacactcacatcacgcgactacatactacacatagcatcgatgatntaatagagtnatagcagtgcgcgagatntnatagtcacgatgtattggtagcnantgactgtaatgagtatgcacgatgatgatatactatagtcagtacgtcgtatanantacgntgactcagtgaggctcgtagtgnagactnngtntatatttctnnttattgcaggnagtgtacttatttcagtacgattcagtatagagcatgntgtagagnaggaatgatcaacacgtcgncgcgcaactagacatgacatcactgatcacttatattgttanaatatgtgatacgtcggtatgtatngcgcagatcagctacactatcttagnatcatgctacnacagcgtgcaggaacagtaaagcagtcaccgcaaatagcagcaactaagatatacaacgatgagaggtgtgattcgacatatatgcagcacatacaacgtccttccacacagctngncggggggnncggggacagtnacacatctcacaccatatcacaaccaccacatactgcactgtactctgctagnagnagagtgggaggngtgaangttgggngggnggggtgtgcanctcncnccacattcggcggcgccacctctactcgcccgcttagtcgcatctacacgacggctctgagaggatgacagatctanatataagtatactacactaatannnnnacacnannncacacacccccaccnnnnnccccgcccc

SEQ ID NO: 582 - DNA, 1452 bp, Glycine max
  misc_feature (1110)..(1110): n is a, c, g, or t
  misc_feature (1413)..(1413): n is a, c, g, or t
  Probeset Number=SeqID_10361
aggcgacaaacaagaatctggtagtaatatggtgtgggagtgagtgtgattacaggtctagaccgcctcctcttcaattatacacccggcaccccgcggagcgagagagtactttccaacgcctaggaggacaaagatataatacattattttatcaatctatcagagagtgtaagttcgagtgacagagcttactaaattggcacacgcctttatgtcacagccgcatctttttacccgtcacgatttatactctcaccctcacacatatatttattattcgagatcgagaccacatacgttttctgccgccgcccgcctggcgttggattttgtgtgacttattaaatattgtatcacccaccgcagtattatgtattgtatatcgtgaggaatgagaatggatggctgtattatgccacgtggtttgatatacgtttgattacttttcgtatgtgtattgttatgattaccgcaccgccgcatttgttctgttctatttctatgtagccggcacgccccgccgcgcgcgcataattagttatgataagataataaggattacgacgcgcgacgtatatcacgtacaccacacccgcgccacagggcataaagacagtatagataaagcatgtgcgagggagagcgaaatatattgcacagagcaacgatctgtgcgatcgatctttgtgcgtctgattatatgctccggcccgatatcgctcttgtctggcggatatagattatctgtcctgagagtattgctctacgaatgatgatctcgatcatattattatcgcgtcggcccgtccagcgaagagtgcacacttattatatgtgtcgccgctccgagcttgatgtgttgatcgtggtaaggtggtgattaaattgtacccgcactgctcgtgttcgccgactcagtctcttagtccatcgtcgcgaattagcgagcagttaagaccaccgcacatgaagacacaaagcgaaccgagtgtatgtatattaataaggctgctagctgagctctgtctatatcctacgctcatactatatataagcacaaattctgctaccgcagtcggtatgtcgaccttgtcgccggcgattggncactgataggtgatgagaggcgaggagcgcgagcggcagacgcggcgtatatcttggatggtgtggagacgtcgtcgagtgtcatatggcatgatatattctcgagcttcctctctacagcttcgcacgccacgctatactgtcgagtagcgaggagagcgattatgcgctatagtaggtgtgataaacattatactcgtgacgtgtctgaattatatgtagatgacagtatgtgtactagagatttgtgatgatcctcggtgcgacgtacgtagaagtggtcgcgcgcggctagataattanaggtgcgcgtctattgtagttgaattatgagtacaggcg

SEQ ID NO: 583 - DNA, 1729 bp, Glycine max
  misc_feature (21)..(21): n is a, c, g, or t
  misc_feature (26)..(26): n is a, c, g, or t
  misc_feature (28)..(28): n is a, c, g, or t
  misc_feature (31)..(31): n is a, c, g, or t
  misc_feature (42)..(42): n is a, c, g, or t
  misc_feature (44)..(44): n is a, c, g, or t
  misc_feature (51)..(51): n is a, c, g, or t
  misc_feature (71)..(73): n is a, c, g, or t
  misc_feature (76)..(76): n is a, c, g, or t
  misc_feature (116)..(116): n is a, c, g, or t
  misc_feature (161)..(162): n is a, c, g, or t
  misc_feature (321)..(321): n is a, c, g, or t
  misc_feature (379)..(379): n is a, c, g, or t
  misc_feature (409)..(409): n is a, c, g, or t
  misc_feature (480)..(481): n is a, c, g, or t
  misc_feature (483)..(483): n is a, c, g, or t
  misc_feature (532)..(532): n is a, c, g, or t
  misc_feature (603)..(603): n is a, c, g, or t
  misc_feature (614)..(614): n is a, c, g, or t
  misc_feature (670)..(670): n is a, c, g, or t
  misc_feature (704)..(704): n is a, c, g, or t
  misc_feature (766)..(766): n is a, c, g, or t
  misc_feature (789)..(789): n is a, c, g, or t
  misc_feature (824)..(824): n is a, c, g, or t
  misc_feature (846)..(846): n is a, c, g, or t
  misc_feature (848)..(849): n is a, c, g, or t
  misc_feature (852)..(854): n is a, c, g, or t
  misc_feature (856)..(858): n is a, c, g, or t
  misc_feature (934)..(934): n is a, c, g, or t
  misc_feature (960)..(960): n is a, c, g, or t
  misc_feature (1005)..(1005): n is a, c, g, or t
  misc_feature (1007)..(1007): n is a, c, g, or t
  misc_feature (1093)..(1093): n is a, c, g, or t
  misc_feature (1099)..(1099): n is a, c, g, or t
  misc_feature (1101)..(1101): n is a, c, g, or t
  misc_feature (1150)..(1150): n is a, c, g, or t
  misc_feature (1180)..(1180): n is a, c, g, or t
  misc_feature (1188)..(1188): n is a, c, g, or t
  misc_feature (1239)..(1239): n is a, c, g, or t
  misc_feature (1308)..(1311): n is a, c, g, or t
  misc_feature (1313)..(1313): n is a, c, g, or t
  misc_feature (1316)..(1316): n is a, c, g, or t
  misc_feature (1321)..(1322): n is a, c, g, or t
  misc_feature (1364)..(1364): n is a, c, g, or t
  misc_feature (1367)..(1367): n is a, c, g, or t
  misc_feature (1451)..(1451): n is a, c, g, or t
  misc_feature (1459)..(1459): n is a, c, g, or t
  misc_feature (1476)..(1476): n is a, c, g, or t
  misc_feature (1577)..(1577): n is a, c, g, or t
  misc_feature (1603)..(1603): n is a, c, g, or t
  misc_feature (1605)..(1605): n is a, c, g, or t
  misc_feature (1618)..(1618): n is a, c, g, or t
  misc_feature (1625)..(1626): n is a, c, g, or t
  misc_feature (1677)..(1677): n is a, c, g, or t
  Peptide Sequence Number=SeqID_8781
  Probeset Number=SeqID_10362
cagtcattctctctgactctnactcncnccnacacacgcgcncnctctcangatcgagtagatagacagannnagngagaagtgagaacacactagtagcaggatggcggtctggntcgcgtgctgtgctgtgtgtcgaggtgtcagagaggagtcagtgnncgtgtgtctactctcttatatctgagtctatgtatacacgccgcaggatgccgtcaacttcaatcactaccatcacacatcagcactccatcaaacatagcacactgcacctactgacatcatatacgtgtattggcactttcgacgagtatactgggncgtcgtagtcagcgtctacagtcaggctactcgtctcattcgtctgtcacatctgcanctctcatgcatatgtcggcatctatctacnttctgctacatcctcgcgtatctgtcgcgactagatactaacaagtaacaattctcgacgtacccgcccgnngntacgctgtgtgtacgctgagtgcgtctctgctgtgtggtgagctgtcancgactccgcgaatcgggtcgcaagagataatgtgaggacaaatatgtagaggtgtatagtacgaggcgcgnccgcctgtgcntgccttggcggcatgagcgcctcgaacggcgtactgtgcttcctctgtcgcaatcnccatgtgcaatgcataaacgactggagtcagcanatactgactcggcgagtgcgggctgcacgtgacaagtcgcgtcatcatctctctatctctanatttcatccgtagtgtcatgtgncgagcaaatgctcatagtcacgtggctgtaatcgntgtatgtatgtctgatgatggncnnagnnntnnngatatgacgatgctaatatatacgtacgttatctcgctataatacgcgtacatcagcatgcgcacgacggcgacgnacgatgtccatgcgccctgcgatcgnctacgttcgacagtacgcgtcgacagacgtaacgctcacttatantntaccgttcgttatgcggtatactacgtgactactcatgtggttgatccgcgttgtactcgcatcgagcgatccattggtgtattgnatacgntnatgctgttgtagtgagcagatcatctcgtcgtcgcgaaatagatacgtncgcactcgtcatcaatctctcagttagtcnctgtcgtncacaatactatctaactgacatgcacgcgcgcactgtgtgcgagcttgacncgtcgagacacgtctgtatcgtactgctctcagcatccgcgccgcccgcggctgatgcacgctacgagnnnncntancctcnnctctcgtgccgctatgtgcgtacgtgatgtagtactatacgntantcgttgcgacgccggcatagcgtgtgtctctgcccacggtctacgcgtatatgcgcaggtgcgcgcagacacgatgacgtgcanagccgcanctacgacgtatatgtcntcctatctattgtcctgtcgtcacagtgcgtcgacgttcttcacgtagcgtacgtgtcgcgacattcgcatgctagtgttacgtaccttaacagtgtcgtngccgtctgtcgcgacgcgtcgtcgcncngacagtgtgattntgtcatnntctctcgcgattcgtgctgattcgtagtagtcctgatccgacgtatcatgntgctcacgtcgcgcatttgcactcgctacgtgtcgatcgagacgtagtcgag

SEQ ID NO: 584 - DNA, 571 bp, Glycine max
  misc_feature (119)..(119): n is a, c, g, or t
  misc_feature (123)..(124): n is a, c, g, or t
  misc_feature (160)..(162): n is a, c, g, or t
  Probeset Number=SeqID_10363
atttcatatgtccatcagctcccaaatcctctccacacagtaacagattgcattgactcatctttttgatttggatcaccatggaacataaattagcaaacactgagggacacccatangatnngtaagcgcggttgtcgcaaagctggtgacccactgnnnggtattgaagaatcatggtggcgccaccatgcctgggaaactcgcatcgaaattaatgctccctccctggcaaaaggaattcatttccgaaaatggagggcctccgccaattcccaaaattttgggctatgacaaaaaggtttgggaaagcccaaaaagtttttttttatttccaaaaaggaaatgggccccccttttttaaaaggagggggggggggttattttttaaataaaaaaaaacacctttgaaaaaatctttttaggggtcctcttggggaaaaaaccccccttataatagggggaaaaaaagaaaaaacccccccctttttttttttttttataaaaaaagcgggggggccccccccccacaaaaaaaaggggggggcccccccccaagggttcctctttt

SEQ ID NO: 585 - DNA, 1694 bp, Glycine max
  misc_feature (13)..(13): n is a, c, g, or t
  misc_feature (16)..(16): n is a, c, g, or t
  misc_feature (27)..(27): n is a, c, g, or t
  misc_feature (32)..(33): n is a, c, g, or t
  misc_feature (105)..(105): n is a, c, g, or t
  misc_feature (558)..(558): n is a, c, g, or t
  misc_feature (684)..(684): n is a, c, g, or t
  misc_feature (724)..(724): n is a, c, g, or t
  misc_feature (739)..(741): n is a, c, g, or t
  misc_feature (751)..(751): n is a, c, g, or t
  misc_feature (802)..(804): n is a, c, g, or t
  misc_feature (809)..(809): n is a, c, g, or t
  misc_feature (832)..(832): n is a, c, g, or t
  misc_feature (901)..(901): n is a, c, g, or t
  misc_feature (948)..(948): n is a, c, g, or t
  misc_feature (957)..(958): n is a, c, g, or t
  misc_feature (994)..(994): n is a, c, g, or t
  misc_feature (996)..(996): n is a, c, g, or t
  misc_feature (1005)..(1005): n is a, c, g, or t
  misc_feature (1011)..(1011): n is a, c, g, or t
  misc_feature (1014)..(1015): n is a, c, g, or t
  misc_feature (1052)..(1052): n is a, c, g, or t
  misc_feature (1059)..(1059): n is a, c, g, or t
  misc_feature (1077)..(1077): n is a, c, g, or t
  misc_feature (1086)..(1086): n is a, c, g, or t
  misc_feature (1106)..(1106): n is a, c, g, or t
  misc_feature (1117)..(1119): n is a, c, g, or t
  misc_feature (1132)..(1132): n is a, c, g, or t
  misc_feature (1170)..(1170): n is a, c, g, or t
  misc_feature (1177)..(1177): n is a, c, g, or t
  misc_feature (1185)..(1186): n is a, c, g, or t
  misc_feature (1269)..(1270): n is a, c, g, or t
  misc_feature (1297)..(1297): n is a, c, g, or t
  misc_feature (1302)..(1302): n is a, c, g, or t
  misc_feature (1306)..(1306): n is a, c, g, or t
  misc_feature (1316)..(1316): n is a, c, g, or t
  misc_feature (1359)..(1359): n is a, c, g, or t
  misc_feature (1375)..(1375): n is a, c, g, or t
  misc_feature (1382)..(1382): n is a, c, g, or t
  misc_feature (1385)..(1385): n is a, c, g, or t
  misc_feature (1387)..(1387): n is a, c, g, or t
  misc_feature (1403)..(1403): n is a, c, g, or t
  misc_feature (1421)..(1421): n is a, c, g, or t
  misc_feature (1423)..(1423): n is a, c, g, or t
  misc_feature (1425)..(1425): n is a, c, g, or t
  misc_feature (1434)..(1434): n is a, c, g, or t
  misc_feature (1467)..(1467): n is a, c, g, or t
  misc_feature (1471)..(1471): n is a, c, g, or t
  misc_feature (1494)..(1494): n is a, c, g, or t
  misc_feature (1499)..(1500): n is a, c, g, or t
  misc_feature (1502)..(1502): n is a, c, g, or t
  misc_feature (1508)..(1508): n is a, c, g, or t
  misc_feature (1532)..(1532): n is a, c, g, or t
  misc_feature (1562)..(1562): n is a, c, g, or t
  misc_feature (1564)..(1564): n is a, c, g, or t
  misc_feature (1572)..(1572): n is a, c, g, or t
  misc_feature (1590)..(1590): n is a, c, g, or t
  misc_feature (1593)..(1593): n is a, c, g, or t
  misc_feature (1599)..(1599): n is a, c, g, or t
  misc_feature (1605)..(1606): n is a, c, g, or t
  misc_feature (1611)..(1611): n is a, c, g, or t
  misc_feature (1615)..(1615): n is a, c, g, or t
  misc_feature (1622)..(1622): n is a, c, g, or t
  misc_feature (1627)..(1627): n is a, c, g, or t
  misc_feature (1630)..(1630): n is a, c, g, or t
  misc_feature (1639)..(1639): n is a, c, g, or t
  misc_feature (1656)..(1656): n is a, c, g, or t
  misc_feature (1662)..(1662): n is a, c, g, or t
  misc_feature (1681)..(1681): n is a, c, g, or t
  Peptide Sequence Number=SeqID_8782
  Probeset Number=SeqID_10364
gcctctctctccnacnctcagtctacncctgnnacgcacactggcacatcggctttgctttcctaacaataaagagggggttatagaccgaccacatccccaggnctgcccaatctttttctcttgtggcttctaacacaccctgctctcgccggctgcttttgcgcgctaacacttcctcattctcttacgcctctcattttgggataccaacatatgcgcaatgcggggagcacaaatgtgtgcttccttgtatccaccttcggcaagaataacattcatgcttattgaacgagggtgggggagaaagccgtcttggcgccttgcaattccgcatcaattatcgctgggtatgactaccgtgtgaactgctcacctatcttaggcgcagccacctatcttgccgcttcccagcgtgaagtgagtaggggtagtagaccgaagttgaacaccaaagtcctgtatttatcttatattggtctggcgtacgcccctctctataagaaacccgagagagcgagggaacagcctagcgcggtgctggttgctgtctccatntcttcttacctgcaccaccacacggatatcacggctcccccgttgttagttccttcatcttcacagtccctgcaccagctgggctgatcctccccggttttgggagagtttgggcatagacacccntcctgttcgtcgtatccgcgtgtatggtactgtgctccgntcttctcgctcgctnnncgtgatatanttaatctctcctctcttcgtcctttgtatccatgagtcgtcgaaagggagnnncaccngtattcaccttcccgctgtaggngcatactatcatagcccatagttccgaattgtaatcatctacctggcccttcgcgtcgcgcgcgtctantgccaccactatcttcgagaatcgttatcgctcgggacgttcccttncgtacatannccaccagccgcgggagactgcatctccacgatttcntntcgcgattncaggtntcnnaagaacactgcgtgcagatagtccacacccgcttacntcgcagntagacgcgcgatgagagnttatgttanaggtatgtgcactatcagancgccgacggcnnnatcctccgatatnatagacgtcacgtagacgtacagagtcgcgacatctanctctctntgcgaagnnatcactgcgccaggctggaagactcatagtcgtgagctacgactatagcgccgctctagacgcagccagttcctctctctacnntgagcacgttctctggacgtcataggngtagnagangagagctcgncctacgggtgcactgtacgcaggcgcgtacgcgcgcgaagagnttgatatgacgtgganataaacntancntgataaccggcgcgtncgcgatgagcgtgtcgtncntngtcatgtangctaccatgagagcagcgacatcatgacgtcgncgtnttgcatgacagacatctagcagntatanntncacatntatatccgtgtgtaaggacatatnacagcctatgatgctatacgtctagtagtngnttgaccgnttacgtcgatctcgcatnganagctancagcanngatgnagtngtcaggntcgtncgnagagccagngcgttcgctctctatangctagnacacactcagctcgcactncacgacagcccga

SEQ ID NO: 586 - DNA, 2338 bp, Glycine max
  misc_feature (18)..(20): n is a, c, g, or t
  misc_feature (22)..(22): n is a, c, g, or t
  misc_feature (36)..(36): n is a, c, g, or t
  misc_feature (39)..(39): n is a, c, g, or t
  misc_feature (41)..(41): n is a, c, g, or t
  misc_feature (43)..(44): n is a, c, g, or t
  misc_feature (48)..(49): n is a, c, g, or t
  misc_feature (52)..(52): n is a, c, g, or t
  misc_feature (58)..(58): n is a, c, g, or t
  misc_feature (63)..(65): n is a, c, g, or t
  misc_feature (72)..(72): n is a, c, g, or t
  misc_feature (76)..(84): n is a, c, g, or t
  misc_feature (88)..(89): n is a, c, g, or t
  misc_feature (94)..(98): n is a, c, g, or t
  misc_feature (105)..(106): n is a, c, g, or t
  misc_feature (110)..(110): n is a, c, g, or t
  misc_feature (112)..(112): n is a, c, g, or t
  misc_feature (117)..(117): n is a, c, g, or t
  misc_feature (119)..(119): n is a, c, g, or t
  misc_feature (130)..(130): n is a, c, g, or t
  misc_feature (132)..(132): n is a, c, g, or t
  misc_feature (140)..(141): n is a, c, g, or t
  misc_feature (143)..(145): n is a, c, g, or t
  misc_feature (150)..(151): n is a, c, g, or t
  misc_feature (159)..(159): n is a, c, g, or t
  misc_feature (165)..(165): n is a, c, g, or t
  misc_feature (187)..(187): n is a, c, g, or t
  misc_feature (189)..(189): n is a, c, g, or t
  misc_feature (192)..(192): n is a, c, g, or t
  misc_feature (378)..(378): n is a, c, g, or t
  misc_feature (438)..(438): n is a, c, g, or t
  misc_feature (451)..(451): n is a, c, g, or t
  misc_feature (487)..(487): n is a, c, g, or t
  misc_feature (538)..(538): n is a, c, g, or t
  misc_feature (541)..(541): n is a, c, g, or t
  misc_feature (559)..(559): n is a, c, g, or t
  misc_feature (564)..(564): n is a, c, g, or t
  misc_feature (583)..(583): n is a, c, g, or t
  misc_feature (701)..(701): n is a, c, g, or t
  misc_feature (734)..(734): n is a, c, g, or t
  misc_feature (801)..(801): n is a, c, g, or t
  misc_feature (912)..(912): n is a, c, g, or t
  misc_feature (939)..(939): n is a, c, g, or t
  misc_feature (1032)..(1032): n is a, c, g, or t
  misc_feature (1096)..(1096): n is a, c, g, or t
  misc_feature (1118)..(1118): n is a, c, g, or t
  misc_feature (1223)..(1223): n is a, c, g, or t
  misc_feature (1238)..(1238): n is a, c, g, or t
  misc_feature (1341)..(1341): n is a, c, g, or t
  misc_feature (1373)..(1373): n is a, c, g, or t
  misc_feature (1395)..(1395): n is a, c, g, or t
  misc_feature (1401)..(1401): n is a, c, g, or t
  misc_feature (1423)..(1423): n is a, c, g, or t
  misc_feature (1482)..(1482): n is a, c, g, or t
  misc_feature (1488)..(1488): n is a, c, g, or t
  misc_feature (1533)..(1533): n is a, c, g, or t
  misc_feature (1594)..(1594): n is a, c, g, or t
  misc_feature (1672)..(1672): n is a, c, g, or t
  misc_feature (1691)..(1691): n is a, c, g, or t
  misc_feature (1693)..(1693): n is a, c, g, or t
  misc_feature (1741)..(1741): n is a, c, g, or t
  misc_feature (1754)..(1754): n is a, c, g, or t
  misc_feature (1770)..(1770): n is a, c, g, or t
  misc_feature (1827)..(1827): n is a, c, g, or t
  misc_feature (1836)..(1836): n is a, c, g, or t
  misc_feature (1868)..(1868): n is a, c, g, or t
  misc_feature (1878)..(1878): n is a, c, g, or t
  misc_feature (1898)..(1898): n is a, c, g, or t
  misc_feature (1918)..(1918): n is a, c, g, or t
  misc_feature (1928)..(1928): n is a, c, g, or t
  misc_feature (1950)..(1950): n is a, c, g, or t
  misc_feature (1974)..(1974): n is a, c, g, or t
  misc_feature (2046)..(2046): n is a, c, g, or t
  misc_feature (2076)..(2076): n is a, c, g, or t
  misc_feature (2084)..(2084): n is a, c, g, or t
  misc_feature (2121)..(2121): n is a, c, g, or t
  misc_feature (2131)..(2131): n is a, c, g, or t
  misc_feature (2135)..(2135): n is a, c, g, or t
  misc_feature (2138)..(2138): n is a, c, g, or t
  misc_feature (2167)..(2167): n is a, c, g, or t
  misc_feature (2182)..(2182): n is a, c, g, or t
  misc_feature (2213)..(2213): n is a, c, g, or t
  misc_feature (2233)..(2233): n is a, c, g, or t
  misc_feature (2250)..(2250): n is a, c, g, or t
  misc_feature (2253)..(2253): n is a, c, g, or t
  misc_feature (2256)..(2256): n is a, c, g, or t
  misc_feature (2317)..(2317): n is a, c, g, or t
  misc_feature (2320)..(2320): n is a, c, g, or t
  misc_feature (2338)..(2338): n is a, c, g, or t
  Probeset Number=SeqID_10365
tttttttctttttttttnnntntctccttcttcccnccncncnncgtnntgnccaacncttannncctcccntcannnnnnnnntacnnccctnnnnncgtcttnnacgntnttctnanttatacttctntnatctcacnntnnntcatnntattcacntcttcnctcctcattctcattcctctcncnctntaccttacggcgcacgcaccgcgcccacgcagctacacaactattagaaacatacgcgctcacacgagtactacagtgatcacaacacgcaggaagatgtgcgagattgtgcaggcagtgtgttcacgcgtgaactcactacgaccacccgtgtctagctgatgcaccaatcacgcgacacgaccncaaggagcgtactctcgcggcgaaccacgtacaccctccgatcacgcctgctccaacggnctataatgagaantatgatacgccatgcctgacctctcctactcgcaangctgacctcgcacggactctcacctctcctacatcatcgacgcgccagtangcncgcgtccgtccgtatcantacgncgcgacggagacagccgcngacgccgacgagaggtcacgacgctcgtttacgtcctcacatcacacacaccacaacatcaccctctacaccacacacataccacacgtaccaactcacaactgtacaacatcactcnccataatacacggaacacagaacatcaaatatntgtatgtctgttatgtgcacgatatatcctgaccatacacgagtcaagtatatgagagattgagcgntgcgagacgtgagatagggcggtgcgcgccgaagtgcgcggcgcagcgtgattaatgtcgctgagaaggcaacgcgagtaaatggaaatatgacagcactatctctgtccnaacgtctcgactagtacatatcgatgngacgtgaggcacacacgaaataatagtatatggacgatgtgtgtgatgaaaacttagcatggcggcgagagtgagacggaacaacgcgcgctngcgtgtatgcaggatgatgagactctcgactatacatagacgcataatgacacctcatcgacgncagcgacagtcgggcttcaganggaggtcgacgaagatcagcgtcgcgacgggtacattgaacaataatcagccgcgtcgatgctcagtcgcgcgacacggagagcgcagccgctgacatctcgatnacgatagcactgtgngagatgtgaggggtaatagaacatacgacgcacgcagagatcacaagcgtcgtactcatgacagtcgcagcaaacacgcgagctgtgctcaccaccgccacgntgcgcacgatgttgcgttgcaacaagctcagnacaccggtctctgtcggtctgnaagtgnatacagacactcagagataacnacggacaggcaccgcactcgcccatcagtgtcgaccgcgactgtgtagtacactcgtgncgtgcngtcactaatgacgcgccgagcacgcgcgtgaacaaatcatcagtngcgagagtggagtagatgtagtgagtctacagctcctcgcagcgcagcgagactcgcgtanacgatacacatactcgtcgctatagatcactcacactgcactatagcacacagtcgagtctatcagattacggacganagtgacggcgcttcggcananacggatacgtcgacgagtctgacactgatacgacacgcgcgacgtcantgacgcgactcgntcgcgagtctactcantctacgttactctcatagtagactgctttgtgacgctagagatgaccaccaagactngatgactancacgtgacaacgacgctagacctcgtgtggcntcgaaatagnagacggtcttgcggcgccantacgcatcgtgcatagtacntctctgaaanctctgaaggccacgacgtgatnacgatatagtggccagagtagccntgtaatcatagtacgattacaccgcagtcatacccaagccacggcggcgggctgcgtgagcacagtgctccntgatggagcgctattaccattgagctgggncggttcantagcgccgagcgacgatcgagtcctactgcatctcangcatactgcngtgncgnacgtggtatggtcgcactgacgtgccaanacgacaagggcgagnagcgacgctgacgcatggtcgcgccatgacncatcagatatagccgcaaancggagattgtgggacgnagnctnaatcgacacatgtcacgagcgataaacacaaggatgacagatggcgccgtttcgtctagancangatcacgacagacgtcgn

SEQ ID NO: 587 - DNA, 1817 bp, Glycine max
  misc_feature (10)..(10): n is a, c, g, or t
  misc_feature (73)..(73): n is a, c, g, or t
  misc_feature (89)..(89): n is a, c, g, or t
  misc_feature (92)..(95): n is a, c, g, or t
  misc_feature (97)..(97): n is a, c, g, or t
  misc_feature (101)..(101): n is a, c, g, or t
  misc_feature (103)..(104): n is a, c, g, or t
  misc_feature (108)..(108): n is a, c, g, or t
  misc_feature (111)..(111): n is a, c, g, or t
  misc_feature (122)..(122): n is a, c, g, or t
  misc_feature (128)..(128): n is a, c, g, or t
  misc_feature (148)..(148): n is a, c, g, or t
  misc_feature (181)..(181): n is a, c, g, or t
  misc_feature (401)..(401): n is a, c, g, or t
  misc_feature (428)..(428): n is a, c, g, or t
  misc_feature (434)..(434): n is a, c, g, or t
  misc_feature (464)..(464): n is a, c, g, or t
  misc_feature (489)..(489): n is a, c, g, or t
  misc_feature (494)..(494): n is a, c, g, or t
  misc_feature (522)..(522): n is a, c, g, or t
  misc_feature (640)..(640): n is a, c, g, or t
  misc_feature (790)..(790): n is a, c, g, or t
  misc_feature (845)..(845): n is a, c, g, or t
  misc_feature (1218)..(1218): n is a, c, g, or t
  misc_feature (1268)..(1268): n is a, c, g, or t
  misc_feature (1570)..(1570): n is a, c, g, or t
  misc_feature (1586)..(1586): n is a, c, g, or t
  misc_feature (1602)..(1602): n is a, c, g, or t
  misc_feature (1609)..(1609): n is a, c, g, or t
  misc_feature (1729)..(1729): n is a, c, g, or t
  misc_feature (1790)..(1790): n is a, c, g, or t
  Peptide Sequence Number=SeqID_8783
  Probeset Number=SeqID_10366
aaacgtatanctgatgtatatagatatatacagtgagatactataataactatcttcttctctctcgtgcttntctctgtgtagtgtangtnnnncngatnannattntanagtgaaccacnggtgtncctcgccgcgcgcgtgcgcntatcggtagctgtcgtttgttgcgtgatgttgnttgactagcgtgatgtatgacacactctagagtgaatagagcatatatatatatgagtagatgacactaatgagccaccacaactctcagtatcactcgagactggccgatggcagtatatgaatatactcgtcgacgagcagtgtcactccacgcgtcgacagatgcggtacgcgactagctgattgctcgtgatgctatgctgtgtgttgcgagctangtagtgtcagtgactgttcgttgctcncttcgnctgtcgatcgtgcgagagagacagacgaanccagacggcaagtcatgtagactgnatagnactacgtgacatcacatcgatgtgtgtnaggacaccaatgctagatgtgtagtgatgatgattatgtgagctagtatgccgaacttgtacactagaaggtatattatatgtgtgagaatcagcggtatacgagtatactagaatanaattcgagtgtcagttacaagtatacgtatgatcggtcgcgtccatattttatatatatatacactcgaccgccgtgcggtggtcgtgtcgcgtcgcacatgggtgtagtggtatggaacggagcagcacgggtgactgagttcagtatnccaggtgtggagtgtacttgcgctgactccacgtctcgtcgcagtatgcgtatgnttcatcactcaacgttcgcgactatacgagcgctatcacgactacgtcatcaggagaagtcactcgaggaaacacactcactctccgactactgtgatctcattctatacattgagtgcgacagagtgaggtgataacgcacacagagtggcgttgtaatcgtatgtacggacgactgtgctctcatttaggacaggtatataatattattatgtagcgactcgcaatacgttagaaatatgtgtagacgacccaccacacgactgcagagtgcttaatacgtcctgacgatcatgactttgcgatattagtcgattctacttatgcgttctgtgtagtagagctcatgatccacgacgtattatgtgacagntacgatgtgggtgtaatactgacttatgactgtagatcctactgtaatgnagttacttgactgctcgatgagagctgagagtcgcgcatacgatatctactagagcgatgaccaatgaacgcgcgcggagcgacgagtagaccgcgagcatggaagatcaaaccgctcagcgactagtatcacgatgcgcgattcactgctatatgccgaactcagtggacgtgcgtgaggtgcgctcggctcgtgtggagactgcgtatatgagatcggaataacgtgcaatcagacctagcgtgtgtactcttgacactctcgcacgtatctgttctgcgtatcatcttgacgactgacnatcgcgtagcaagctngcatcagatgagcagnagatgancttacatatggagtgtgaaccttgcgcatagcgcgaagcgatacgttcttcaccacacgacacccatggagatatacaaagcagctcgcgagtgctccctcttcgtctgatagtcataangtttatgtgttgacctaagcatgtctcgcatctcgtactgtcacgatcgacatagattatnttactgatgtcactcgtcagcaaagag

SEQ ID NO: 588 - DNA, 1412 bp, Glycine max
  misc_feature (1)..(1): n is a, c, g, or t
  misc_feature (11)..(11): n is a, c, g, or t
  misc_feature (14)..(20): n is a, c, g, or t
  misc_feature (109)..(109): n is a, c, g, or t
  misc_feature (160)..(160): n is a, c, g, or t
  misc_feature (1094)..(1094): n is a, c, g, or t
  misc_feature (1118)..(1118): n is a, c, g, or t
  misc_feature (1209)..(1209): n is a, c, g, or t
  misc_feature (1299)..(1299): n is a, c, g, or t
  Probeset Number=SeqID_10367
ntttttttttnttnnnnnnnttattcttttgcgtgattcttctcacgtgttctggtgctcttgatcgtacgcgacgactgcttgttcgtcgtacttttatattataganaacaggcgtatagttatttcttagagaggtgtcactactaagataaagaangtgcgggcggcgatgagggaggatattatttttttgtctcttgttatttgcttcggatacacacggtcccgcttctatcgccccgccgctacagtctcaggcgatcaggcgcagagtgcttgactccacggtacctccatagcgaggcgtcgctagttatgtggttctcttgttcttccctcccattttcttccatcctcttctctttccttctcagttctcattgtaatatcctctgtatatacggtggggttcactaacactgagagtcgtgtgaaggtatatatagaggtagtatagaattggtacgtgagggatatcatattgcgagctatgtggcgcttctggtcgctgtagcttatcgtctgtatagctgtttccgtcgtaactggctccacaggcagcggcttcgcgtccatgcatactgctcaactgacaccgccgcaccctcttcgcacgtttgtgcaacgctttctatatgttggctcttctcgagattgctcgtaaacatcctctttcagccgcgcggtatcttctcgatccctaggtggaagttgttctctaaatacaggacgccgcgtcgatacgcaatgaaccagtgcactcgaggcttgttgctcggcccgcgttctattctattgccctgctcgggtgtctcacatcgcccgtactcgcgagacgcagcgaccgcgctgacgaccgcgcgtcgctcggatagtagttacgcgtaaaacgcctgcgtatttcttctccaacgcgtacattatgcttcgatgtgttgcgctcctctgcgtctgctctcctctgatagtatgtatatcatactcacttcctctcgtcttatgtttgctgcgtatgccgcgttagacacgcgtccacggcgtggtggatctgtgtgatcgacatgcgccatggagaggatatgtcgccgatngatgcgattcgcgtgtcactaggngcgtctataaacgaactcgcggacgcaagtattagccagccagaactagatgaagatgcgagtctcatgcacgccgctcaacgatggagantgtatgagtggacatgcgtgcctctcgacactgtgcacagcgcatgtcgcgcatgagcacacgagttagcgcgatcgcgaacatgtaganagcgcgcacgacgcgatgtagcgagccaacgcgtgcgacgctgctggtctctctgcagacgtcgctgtcgtgttggcgcccacgtgtccgtgtcagcgcagtgctatattatt

SEQ ID NO: 589 - DNA, 326 bp, Glycine max
  Peptide Sequence Number=SeqID_8882
  Probeset Number=SeqID_10368
cgcgatgccagcttggggtaagacccatagcgacgaactgatctgggatatggtggctttcgtaaggcaacttccgcgtatgtcacccgcccaatatcaggcggcaatagccagtgcgcccgaagaccatgacgcgatgatgaaggatatgcccggcatgacgaagacggcgccatagcgttgcggctgctccgtcgctgttgctcagatctgcccgctatgtgcgatgctttgacggacaggctggaccggctgctgagccgcttacgcaacgaaccgacgcatccggggctgattggtctggaggatgctgtgttccgacgcat

SEQ ID NO: 590 - DNA, 1960 bp, Glycine max
  misc_feature (1)..(1): n is a, c, g, or t
  misc_feature (85)..(85): n is a, c, g, or t
  misc_feature (148)..(148): n is a, c, g, or t
  misc_feature (248)..(248): n is a, c, g, or t
  misc_feature (260)..(260): n is a, c, g, or t
  misc_feature (319)..(319): n is a, c, g, or t
  misc_feature (346)..(346): n is a, c, g, or t
  misc_feature (424)..(425): n is a, c, g, or t
  misc_feature (464)..(464): n is a, c, g, or t
  misc_feature (566)..(566): n is a, c, g, or t
  misc_feature (695)..(695): n is a, c, g, or t
  misc_feature (708)..(708): n is a, c, g, or t
  misc_feature (742)..(742): n is a, c, g, or t
  misc_feature (959)..(959): n is a, c, g, or t
  misc_feature (961)..(961): n is a, c, g, or t
  misc_feature (1014)..(1014): n is a, c, g, or t
  misc_feature (1198)..(1198): n is a, c, g, or t
  misc_feature (1228)..(1228): n is a, c, g, or t
  misc_feature (1313)..(1313): n is a, c, g, or t
  misc_feature (1332)..(1332): n is a, c, g, or t
  misc_feature (1558)..(1558): n is a, c, g, or t
  misc_feature (1575)..(1575): n is a, c, g, or t
  misc_feature (1586)..(1586): n is a, c, g, or t
  misc_feature (1607)..(1607): n is a, c, g, or t
  misc_feature (1639)..(1639): n is a, c, g, or t
  misc_feature (1736)..(1736): n is a, c, g, or t
  misc_feature (1812)..(1812): n is a, c, g, or t
  misc_feature (1873)..(1873): n is a, c, g, or t
  misc_feature (1878)..(1878): n is a, c, g, or t
  misc_feature (1880)..(1880): n is a, c, g, or t
  misc_feature (1891)..(1894): n is a, c, g, or t
  misc_feature (1897)..(1897): n is a, c, g, or t
  misc_feature (1902)..(1902): n is a, c, g, or t
  misc_feature (1923)..(1960): n is a, c, g, or t
  Peptide Sequence Number=SeqID_8883
  Probeset Number=SeqID_10369
ngtcgacgcagctcgagattgcggacgaggaagtctatcatgaataacacactaggaatcaactcagataccgcaatacaacgtngacatgatgcacgctcgccgcatcgaaaacgtaactgcacggcgatcgactgagcacgcgctncactgccagatcactgacgcggccgccatgtcgtaaccgcatgtgacatgtaatgtgcagtcggtgagacgacactaactatactacagcgactagatcnttcagtgtgcantctcatgtcgcacgagccgtcatctactcgagatgtgcgatctgccatagcgacagganatatagaactatggtagttcaagccgnaagtagacagtgcgtattcggggtctgcgcgtcgcagttcgccacgccgacactactgactatcgtacgatgcgatannacaatctctcgctataatcgtgcatatctatctgtcatnatatagtgctgtcgatcactgtcgtcagacgatacgtacatagtacttatctctctcatactaatctcgtagtcatatatatatagtgagtatgacacgtcnattttgtatcactcattcgtcttcggcgccgtagatcccacacggctttgcgcggctctcatgtcgcctaacagctcctgcagccacttacgcagacgccgacagtcgttatatcgcgcgtacgatcantgccccgcgcacntgtatgcctagtactctacgtatgattctattanattcatgacgtgcggtcaggtcacagtctacacacgtagctcatacagaaggtgaagtagcgatcatcgtactcattgcagtcatagtgtcccacacgtctctctacctcgagataatatgtctctctatgatgtgataatggcatctcgccagcgagagattacgcacctctcacgtaatcagcacagaggcgttgagagttaagtgtgagaatanantgaattgatatgctcgccatctctggactagcatcgacgtacacgccgcggtngagagaaattgcgtacacgcccgcgtcacactgtcttacgtcccagagtctctcgtgcgtgtcatatgcacacatacgctagtaggtcatgaggtgcgttggtgtatcacagtatgtacgcatctactcgccatataagatgtgtagcggtggctacggccacaagcatcgccgtaagctcacntcatctccatttcgtgaatatagtatctangcactacactcctcttacctacacatccacatcgagcgcccagcacggtgaagctatccgatgtgctgctatctcgtatgtgatntctctgttcgtgtttctgnctcgtcacctcaccttttcgttttcacgtctctcgtgtgtgctatactcacgtcgctctcctcgtctcggcatctgctcctgctctgcctcgcgtgtcccgttcgtactgcataaatctccattaccacatttctccgtactaccttagtcgaaaggtacgaagtgtgatctagtagtgacaccaccgactgtagttccatctcgtctcttcgtcgattagtgtgnattcactgttgagcctnctttctctctnttgtaagtgcacagcctattnacttgtgccatgtttgccggtgtgccattganattagagtcataatggtcatgctattgagggtagattcgatggtgtaactaatcgtgatacgtgtaatgagtgcgtcgcgatagagtcgcatgctangtgttgaaccgagctcatgagagaccacataaaggagacgtccacgacgtctcctcacgcctatctccacgacganagcgcactacacctgcactagcttgtatacactataaatatcgcagcactgtcacccaccnggcgngnggtagggcggnnnnggngaggngtagtggagtccccaggtttnnnnnnnnnnnnnnnnnnnnnnnnnnnnnnnnnnnnnn

SEQ ID NO: 591 - DNA, 558 bp, Glycine max
  misc_feature (20)..(20): n is a, c, g, or t
  misc_feature (370)..(370): n is a, c, g, or t
  misc_feature (453)..(453): n is a, c, g, or t
  misc_feature (504)..(504): n is a, c, g, or t
  misc_feature (512)..(512): n is a, c, g, or t
  misc_feature (552)..(552): n is a, c, g, or t
  Probeset Number=SeqID_10370
ttttttttttttttttttgnattactcaatatttatttgctcatatattattacaattttaattttatatatattttgaatagcctcccggaaaacaaaattttattttttagtattacaagcgttaaaagtttcaattaatgaatcaaacactgttgaagcatactcgactaactcaacgtcgagactgttatattttctgatcatttggatctcctcttcagttaattttcctttcgtatctttattcttaaccattccactcgaattgtgaacccatcccaaaggttttgtaagattaaaaatagtatttaaaattggaaatgtttcatttaatcttgaactgattccaactaaatcgaatttctgnaaattcatttttgccttttctaacatcactctcttctttgcctcgtcatttccgacgtttaataaataataagaataatcggnctcaaaattggaaccctcgatttcatttacataactagaaagcattcttgngagtctgntattcattgggttcaagtctcccaattgaagaaaagaggnaaaatt

SEQ ID NO: 592 - DNA, 1442 bp, Glycine max
  misc_feature (10)..(10): n is a, c, g, or t
  misc_feature (12)..(13): n is a, c, g, or t
  misc_feature (23)..(23): n is a, c, g, or t
  misc_feature (846)..(846): n is a, c, g, or t
  misc_feature (1082)..(1082): n is a, c, g, or t
  misc_feature (1120)..(1120): n is a, c, g, or t
  misc_feature (1208)..(1208): n is a, c, g, or t
  misc_feature (1306)..(1306): n is a, c, g, or t
  misc_feature (1358)..(1358): n is a, c, g, or t
  misc_feature (1389)..(1389): n is a, c, g, or t
  misc_feature (1442)..(1442): n is a, c, g, or t
  Peptide Sequence Number=SeqID_8884
  Probeset Number=SeqID_10371
cctccacccntnntacttttccnccttcctctccttcatttgtttttgcgatttgggctacgaggtcccccctcgcagtcagctacgtattgtcccccccccagtagttacattcggtacgtcctacatatcatccctatattgtctatatatacgtgcctcatcctacctagtacttatgttattcagcatcgctgactatagtatcaactccggctgcccacttctagacactctgctcaattcgtttcgttactttctcgaccatgcagcaccacccacctatttgcccacacccagccagctgaatttcccacggttctctataccataataccattgcataattatactcagctaatctttctcttaatttctctcttatactacttcttatcctatatactgattccccccgcagtgcttacactccacctatccagtcttggtcggcagtgaccaactccacctcttaaataatcccttgcggtctatctctcatcaaagactgacctagactgccctgcatcatatcactatctagcagactcgaatggccctagatttgaattacatcctgtctcggctccctataatagcaatctcctcattgaccatctgcgacagcgacaactccagatcgaccgcaagatcttaatgcaagtgagcaccacactcccgctcatactattcgccgacaatcttcaccgctggactctcacattatccttccgctgccctcctcattccttatgccttaatactccatccctgcttttataccttcactatctcaaacacaaccaacatatccaaatagctaacacaccaaaaataacatacccncacaccactaatattgtgccctctctcaccggtgtcaacttctactcactaacgtcctacgctccgcacatcgcattcaacataccatctcatcgttattctcacttcctctagtcccgtggcactactagtcactattctaagcatttctcactcacacttcccttattctgccctcttcctcccctgtattatgtatcgtctcctccgtccatcatactcctcgctatagaatnatcgataaatctatctcgcgcgccttgctactcgcgcnccaccgtgccgtctttgttgtctcacgctgactcctctctcctactattatatagcctcacacagctacttctctatcgtctctcaantactatcacctacttaccactactctctatatatagcgcccacacacctcatcacatgcatactccatgtagatagtcataccacattcctaactctncataatctcctccacagccctcgcctctcactattaacctctcaacagactnctttcactcacactaccgacttcataccttntatcttatatctgcagcgtctatctcgtatatcattgctaccaatatatcatn

SEQ ID NO: 593 - DNA, 2199 bp, Glycine max
  misc_feature (11)..(11): n is a, c, g, or t
  misc_feature (16)..(16): n is a, c, g, or t
  misc_feature (18)..(18): n is a, c, g, or t
  misc_feature (23)..(23): n is a, c, g, or t
  misc_feature (27)..(28): n is a, c, g, or t
  misc_feature (36)..(36): n is a, c, g, or t
  misc_feature (70)..(70): n is a, c, g, or t
  misc_feature (95)..(95): n is a, c, g, or t
  misc_feature (152)..(152): n is a, c, g, or t
  misc_feature (162)..(162): n is a, c, g, or t
  misc_feature (177)..(177): n is a, c, g, or t
  misc_feature (202)..(202): n is a, c, g, or t
  misc_feature (260)..(260): n is a, c, g, or t
  misc_feature (338)..(338): n is a, c, g, or t
  misc_feature (502)..(502): n is a, c, g, or t
  misc_feature (598)..(598): n is a, c, g, or t
  misc_feature (645)..(645): n is a, c, g, or t
  misc_feature (753)..(753): n is a, c, g, or t
  misc_feature (846)..(846): n is a, c, g, or t
  misc_feature (1011)..(1011): n is a, c, g, or t
  misc_feature (1017)..(1017): n is a, c, g, or t
  misc_feature (1087)..(1087): n is a, c, g, or t
  misc_feature (1123)..(1123): n is a, c, g, or t
  misc_feature (1174)..(1174): n is a, c, g, or t
  misc_feature (1259)..(1259): n is a, c, g, or t
  misc_feature (1293)..(1293): n is a, c, g, or t
  misc_feature (1296)..(1296): n is a, c, g, or t
  misc_feature (1391)..(1391): n is a, c, g, or t
  misc_feature (1394)..(1394): n is a, c, g, or t
  misc_feature (1433)..(1433): n is a, c, g, or t
  misc_feature (1498)..(1498): n is a, c, g, or t
  misc_feature (1525)..(1525): n is a, c, g, or t
  misc_feature (1576)..(1576): n is a, c, g, or t
  misc_feature (1615)..(1615): n is a, c, g, or t
  misc_feature (1620)..(1620): n is a, c, g, or t
  misc_feature (1625)..(1625): n is a, c, g, or t
  misc_feature (1637)..(1637): n is a, c, g, or t
  misc_feature (1668)..(1668): n is a, c, g, or t
  misc_feature (1677)..(1677): n is a, c, g, or t
  misc_feature (1687)..(1687): n is a, c, g, or t
  misc_feature (1689)..(1689): n is a, c, g, or t
  misc_feature (1708)..(1708): n is a, c, g, or t
  misc_feature (1715)..(1715): n is a, c, g, or t
  misc_feature (1722)..(1722): n is a, c, g, or t
  misc_feature (1755)..(1755): n is a, c, g, or t
  misc_feature (1797)..(1797): n is a, c, g, or t
  misc_feature (1814)..(1814): n is a, c, g, or t
  misc_feature (1823)..(1823): n is a, c, g, or t
  misc_feature (1833)..(1833): n is a, c, g, or t
  misc_feature (1849)..(1849): n is a, c, g, or t
  misc_feature (1852)..(1852): n is a, c, g, or t
  misc_feature (1891)..(1891): n is a, c, g, or t
  misc_feature (1894)..(1894): n is a, c, g, or t
  misc_feature (1900)..(1900): n is a, c, g, or t
  misc_feature (1916)..(1916): n is a, c, g, or t
  misc_feature (1939)..(1939): n is a, c, g, or t
  misc_feature (1949)..(1949): n is a, c, g, or t
  misc_feature (1981)..(1981): n is a, c, g, or t
  misc_feature (1997)..(1997): n is a, c, g, or t
  misc_feature (2005)..(2005): n is a, c, g, or t
  misc_feature (2014)..(2014): n is a, c, g, or t
  misc_feature (2023)..(2023): n is a, c, g, or t
  misc_feature (2032)..(2032): n is a, c, g, or t
  misc_feature (2045)..(2045): n is a, c, g, or t
  misc_feature (2056)..(2056): n is a, c, g, or t
  misc_feature (2063)..(2063): n is a, c, g, or t
  misc_feature (2066)..(2066): n is a, c, g, or t
  misc_feature (2081)..(2081): n is a, c, g, or t
  misc_feature (2102)..(2102): n is a, c, g, or t
  misc_feature (2113)..(2113): n is a, c, g, or t
  misc_feature (2117)..(2117): n is a, c, g, or t
  misc_feature (2146)..(2146): n is a, c, g, or t
  misc_feature (2149)..(2149): n is a, c, g, or t
  misc_feature (2193)..(2193): n is a, c, g, or t
  misc_feature (2199)..(2199): n is a, c, g, or t
  Probeset Number=SeqID_10372
cgccgctcgtntcttncnatctntccnntctccctntctgctcatctgctcgctcttcgtcacatctacnactcctcacctccatacacactcanatctaggctaccactcactacatacatacgctcatcacatctacctctcttcacaancatagaaganagataaaatatatantactcaatagacaccacagaacatnctctctctgttactccacctcatacaacgctcaagttatacaccactactagcatctnagtcagtgtgacgtcagttctatacataacactagcaagctttactgcgatctcaccactctcattaccatctcacangcgccgccatcactcgtacttcatagactattacctacatcaggtcgtcacacttgctcacactcgtatgctctgctcatattatcaccttcacgtcacggtctcaccactcacatacgtcttatctctcaccatatcacatcactcatcatgcacgtaatctntaaacatacacatcacaagccacacacctggccacatatatcacatagtacatatgtctctctttactatctccaccgagtcgacacgacgagccncacagatacgcaatatgtaatatcgatgcgcgcactctactgcactncttctatctcaatacgcggagtccgcaccacgtcgacgtgcgtctagtgcgatgtgcaagtaatacacacgtctcatgcagccacgatcttctcttctagtcacgtcnatcctcaatggtgtctatctcgcctcgactcatctcgtctttgtacgcatctcttctgttctctgtatccgacttcatatcatatttgcctcncatcgctgtcctcttatgactatatatattactttatgcacagtagcatctctattagtcgtgtcattctatagactagcacaacaacgaaactcctgtggtctatgtcctatcaatactcacctatctctctcacccacgtgtcgtctacgtctacacgattanctttcnctggctacacataataacataatcatcgactacgactggatccacatgcgtatcattgatcgtatgctanactatcatatcgacacatatcggctacttactctcnacaataaactccgactcatcataggagcaacatacagaccactacatatgntatacttagtgatcaactacacaccgtgattacgcactacttcctatctattgtactatttactcttcaatagacgtctcgatcnctcactcgcacgatatggcgcgtcatatattcancgnctcgtgacgcgagacgcttgactcaactgtactatgactacatcatcgctcactactagcgcaatcagtaatgaatctatgcgcaaacgcagctncgnacgaatgatcatcatatgatcagctctatgcacacacantactcttctgtctatagtcgagtatgctactctctcacacacgctctgtacatttatctgcactnatcgtgatctgtcagtgatctgtctcnttttgcagtgactactctttacatcatttgctgccgcactagactatctcntctgctgatctcgtgtctactgcgtacttatcctgcaanctacngtacntagtcgatctcntcaagccgactgacactacatcatgacgttngatggacgnagatgaacantnacatatacacacgtaaccnagctcanctcaacncttactgtcgatgatcagctagcgtgtatacanaactgacgtgtatctgaagccctgctcataacgactacgtgntgctcatcgcctccttnatgtatgtngatgcgcacngtcagtctatatcctnganctttcctactatctattgacacgacctccatgacacacnatntagtantcgactatacactcantctaatacgtctagactagcgcngcacgcagtnacctcgcacgcagcacactcccgatgtctgtntacctacgtactatanatctctcncttactcangagactaantattagtanctgcatccatatnatgactcgtanggtactntantatagtgatgctcangacgcacgcgccctactacancacagtcgatngcgnacgtaacacattttttacttaggatcatncancttcgataacagacgacatgtacgactgccggatcaatgtaagntcccan

SEQ ID NO: 594 - DNA, 319 bp, Glycine max
  Peptide Sequence Number=SeqID_8885
  Probeset Number=SeqID_10373
gaatcgggaaaagttaatgaagatggccggctcggttacaactggaggaaagggtactgtgagaagaaagaagaaggctgtccacaagacaacaaccacagatgacaaaaggcttcagagcaccctgaagagaataggggcgaatgccatccctgctattgaagaggtcaatatctttaaagatgacgcagtgatccagtttctaaatccacaagttcaagcatccggagccgctaatacttgggctgcccgcggatcacccccaacaaagaagatgcaggaaacactgccctgacacacccgaccaataggccccgat

SEQ ID NO: 595 - DNA, 570 bp, Glycine max
  Peptide Sequence Number=SeqID_8886
  Probeset Number=SeqID_10374
agctggagctccaccgcggtggcggccgctctagaactagtggatcccccgggctgcaggaattcgcacgagaccattacctagaacatcctaacgaaaaataatattccaaaatggagaaacagaaacaccaacctgtatgcggccaagaggctctccttcttctcaattgcgtcacggagtctcctttcgatcaagagaaatgcctccgcttcttgcaatctctcagagaatgcgtcctctcaaagaaagttaacaagttcgtgataccaagtcaggaacatgccagtgagggagcagctaacaagccaccttcataaccttgtttgtttcccttttcttttgagatgtaatctctcacataccttgatggtttcatataagactcggaactagaggtttctatattgttactttgtatgtttgaaaactggatgagctaaatagaaatattcaagtggctgtttgattaaaaaaaaaaaaaaaaaagcttatcgataccgtcgacctcgagggggggcccggtacccaattcgccctatagtgagtcgtattacgcgcgctcactgg

SEQ ID NO: 596 - DNA, 1396 bp, Glycine max
  misc_feature (1)..(1): n is a, c, g, or t
  misc_feature (17)..(17): n is a, c, g, or t
  misc_feature (199)..(199): n is a, c, g, or t
  misc_feature (215)..(215): n is a, c, g, or t
  misc_feature (446)..(446): n is a, c, g, or t
  misc_feature (716)..(716): n is a, c, g, or t
  misc_feature (840)..(840): n is a, c, g, or t
  misc_feature (1184)..(1184): n is a, c, g, or t
  misc_feature (1304)..(1304): n is a, c, g, or t
  misc_feature (1326)..(1326): n is a, c, g, or t
  misc_feature (1383)..(1383): n is a, c, g, or t
  Peptide Sequence Number=SeqID_8887
  Probeset Number=SeqID_10375
ngttcggggtaggatancaagatgagataaatctgcatgtgagtatgaagaactacacgacacatgacgtacgtgcgcaggatcgcacgcatctggagcaagagcgatggtcacgtccgcgtacgagtgatgcagtgacacactgctcgcatgtgtctagagtagtagagtggcctatcgcatattactggccgcacgnctcgacgtcgtactcnactgaggttagtggagcgtagcagtggctgagtcgacagcgtgtgtcgtataacatcataatacgatcacctgagccgtcgtcataggtattcatgggaggcgacgatatcacagcactgatcgcgtggcgctgtacgcatgccagtcgctatgttcgcgccatctccgtagctgtctgtactcattgaagccgtgatgtcgagtcgagagtagtcgtgagcgtactatancatgagtatgatggagcagatgcaaatgacgacgttgcatagcttcagcgctggacagtgacatgcaccattctatagatgtgctgcctcgcacgtctgcagtctatcgcccatattggtcgcaatcacgatccacatacatcatcagtagacgactccgcgaccttctgagcgcagtggttgtgcatcagcagaccacgtgacgaggtcgcgtaggcgtccgcgtccgcactgacgtcgtgagatagtgtaggtgggcgggtgggaggntctacgagagtcatacacgtccggtcgtcttgtatgacccctccgtgacggcacggacggtgccgctcgcgccgcgcgcgtcgcgagcgagatcagagtaggcagcgatcatgctcgtagtgangcggcgacttagtgattgctgagctctcatacatgacgtgacatgtaaagcgaaatagcacagagactcgactgggaacggactcgtggcagcgtataagcagagtactcagacactgatatattaattacattatatgacttgatagatctatttcatacgtagataatgatacaccatctgcacctcgacgcacatagacacgcggcgcgcgacctgtatcgcatcctctcgatgtagtgaccatagagtggtgatgtagtatatacagagaagacatagacaataataatagttatgcattacagtgatagagtaaagagctcatagcagacgcggaatgnatgatgacggaactgctgtcgcggtcgcgcgggagatacgacttcgctctcatcctctcttttctcggtgtcttggtgtgtgataattacataaatacatagtctaattgtcgcctaagnaatactcatcatatccaccaanccacaacaacatcattgtatgatttattacgtggtgtgcggagggagagagggaagnaggcgaaaacaca

SEQ ID NO: 597 - DNA, 291 bp, Glycine max
  Probeset Number=SeqID_10376
cggggagaaaggaaagatgggagacctttcagacagacggcttccggggggggccaacaggctgcccgtatcagcaattaggaaaggcgaggattccgggtctttgtagataagtgctggcggtcaggacagagctctcttaggtgtgaaggagattgaggcgatatggcaaggttgggctggtgacaatgtgcccaatgagatttgacgataggcacttacaaaagctgtgactgaaaaggttctttagcttttccatttgcatggtaaaacgagcttacgcatttacct

SEQ ID NO: 598 - DNA, 456 bp, Glycine max
  misc_feature (438)..(438): n is a, c, g, or t
  Peptide Sequence Number=SeqID_8888
  Probeset Number=SeqID_10377
attcactcccactcattacaatgtggaagctgtggacgttactggcggccatcgctgtggcttcagggcagtacgcaccccctgtggcgacctatgcacctccaccacctccggcggtagagtatgggccgcccccaccccctcctgtagtttatggtccaccaccacctccaccacccgtagagtacggacctccaccgccgccaccgccgccgccgccgccaccaccaccaccaccagtagtctatggcccccctccaccacccccagtggtatatggtcctccaccaccaccaccaccagtagtctatggtccaccgcctccaccttccggtggtctatggcccccctccaccacccccagtggtatatggtcctccaccaccagtagtatatgcacccccaccaccaacaacaacctcaactgtagagtacggnccaccaccagttgtctac

SEQ ID NO: 599 - DNA, 797 bp, Glycine max
  misc_feature (1)..(10): n is a, c, g, or t
  misc_feature (99)..(99): n is a, c, g, or t
  misc_feature (138)..(138): n is a, c, g, or t
  misc_feature (488)..(488): n is a, c, g, or t
  misc_feature (513)..(513): n is a, c, g, or t
  misc_feature (563)..(563): n is a, c, g, or t
  misc_feature (565)..(565): n is a, c, g, or t
  misc_feature (568)..(568): n is a, c, g, or t
  misc_feature (579)..(579): n is a, c, g, or t
  misc_feature (583)..(583): n is a, c, g, or t
  misc_feature (595)..(595): n is a, c, g, or t
  misc_feature (599)..(599): n is a, c, g, or t
  misc_feature (602)..(602): n is a, c, g, or t
  misc_feature (612)..(797): n is a, c, g, or t
  Probeset Number=SeqID_10378
nnnnnnnnnncattgggtaccgggccccccctcgaggaacccgccgccggtgatcttgccgatgcccttcagcacgaccgcggcgctctttgctatcangttgagcgagagcttgccgctcgtctgaaaggccgtcanaaaccacttcatcgtggcgctgtcgagcgcggagacgagccgctccggcgcatcgaggaagtcgagcgcgttcgatgtcggcggggtgtcgagcacgacgagatcgaaacgcgggtcgtccttgacggcgacgagcttctcgaccgccatgtactcctgcgtaccggccagtgacgtggagacgtattgatacagcttgttcgagagcagtttgtcggcgcgctctttggtggacgagtacttgcgcacgagcgcgtcgaacgtcgtcttcgtgtcgagcatcatcacggtgagcgagcccttgagttccacgccggcttcttgaagtgcgcgttgtcgacgatcgcctnttcggtgttgatcatgtcgagcccnagcgcctgcgcagccgcttcgccggatcgatggtgaggaaaacacacggncncgnacgcgcggttncctngcaatcgggggncttntgntttgtcaatnnnnnnnnnnnnnnnnnnnnnnnnnnnnnnnnnnnnnnnnnnnnnnnnnnnnnnnnnnnnnnnnnnnnnnnnnnnnnnnnnnnnnnnnnnnnnnnnnnnnnnnnnnnnnnnnnnnnnnnnnnnnnnnnnnnnnnnnnnnnnnnnnnnnnnnnnnnnnnnnnnnnnnnnnnnnnnnnnnnnnnnnnn

SEQ ID NO: 600 - DNA, 774 bp, Glycine max
  misc_feature (100)..(100): n is a, c, g, or t
  Peptide Sequence Number=SeqID_8889
  Probeset Number=SeqID_10379
aacccagagactggcatcaaatgcatagtttttctaaagatgctattttaattgtattggcttctactacctttgattcatcggattatatttttgaacngatccgaacaaagcatgattccatacgataacttaggaaaagtaaatgcaggcttcaaggtattatttcaacaacagtttgcctcttttttagatagaggttggtatattctgggagatgaagtaaatgcctttgagcaagtatttgcggcgcataatgatactaatttttgtatcggtgttgccaatggattagatgcattagtgctatccttacaagtactgaacttaccaaaagggtctgaaataattgttcctgccaatacctatattgcctctattatttctatcattcatgccgggcatattcctgttttagtagagcctgatatacagacttacaatatcgatccctataaaatagaagaagccatcacgtcaaaaacaaaagccattatggtggttcacctgtatggtaaatgttgcgaaatggatcggataggggagatagcgagtaaatatggattaccgattattgaagattgcgcgcaggcccatgatgccacttataggggtcgaaaagcagggacttttggtgtattgggtgctttcagtttttaccccagtaaaaacctgggtgctttgggcgatgccggtgctattataaccaatgatgcccagtatatggggttattgaaacaacttcgcaattagggtcgcacaaccctcagccgg

SEQ ID NO: 601 - DNA, 1347 bp, Glycine max
  misc_feature (1168)..(1168): n is a, c, g, or t
  Peptide Sequence Number=SeqID_8898
  Probeset Number=SeqID_10380
cggtggtgagagggcgcgtgtgatgaaatcgtagatattgagcgacgcgtggtgatggtactgcggcttgtcgcgatggctgcggttgcgctatctcgctgcggcagagcgaatgtggagagattacgaatggatggatcatgtagagagtattctagacagtgcggcgtacatattgatgtcgatattgtggtctgtgcgctacgtgccgcattcgtcttgcgttgctattggctgaagtgttgttgggttctacctgtatagtatgcgaagcctgggtcggtacgacatacgagcaatgtgtataaagaataatgtctagtggtgacagtaggaagtgcgcgtcgtggcgtcggggaagccgcaataggtatgctttagtctaagtagcgtaagttcgtgcagctggagagtataccgagtcgcgccaatagaatcgtgcgggacgtgtatcgtgcaggttcacggatcttatgtgtatctggaaaggaatagggtggtagggatatcagagactgttcagcgcgggctgtagaggtggtctggctcgatgtgagtaatgcgtgggtagtggttacgtgtagggcgagagggttatggtatggtgagtctgctgtatatatctcgattgttgagtatagatgccgaacgacaagaggagatcggcggctggcggcgggagggaatagatggcggccatcgcagacgtgagggttatgttcgatgcgtgtaggctagtgtgggcgagggggaggagaggtggtcgatcgtagtgtgtgaggtggtgggggggttgaggttctaaggcggagccgctgtgtgtggcgtatagccttgggacgggccctggcgcccgctggagatgcgtgaagcaggtgtcatactctagtagaactcgtacgtctactgccgagcttcgcgatgagctaggctactgcagcgtgagggagtcgagtgcggtgtgtctgcgtgatgctagatgtttcgagtgatacagtagcgttagcggcgggatatctggtgttgtttcagcacgggagcccccgaacctcctcagctgtgatatgagacagcgtcagacgcggtctgctctatggatcttttcgactatatctctggtatatgtcgtcaccaatgctctacggtctatacgctcgcgttgactagngccagacagcacacgagaatacgagtgagggtgggatgctgaatactaaccactcgcccctcactgctggggtggagagccaccttctatcctccctatttgttggtgatgtggtcttgtgttaggtaggtgtgctagatcttggtggtcgatgtatcgactggtgagtatatatcttg

SEQ ID NO: 602 - DNA, 385 bp, Glycine max
  Probeset Number=SeqID_10381
cttcaattcagttgtgacgttagttagagagagagagagagagtgtatgtgtttgtgttgtactttgtttttcttccttcaacttgggaacaaaggttgagactttcaatcttcttctttgcaaattctgtgaaaagccatcatggttatgctattattgcccagtgttgttgtcatgggactaatgagggtcaatggaatgaagctatagcagagtggagagaaggataagaagaaacccacatggtgtttgggttgcatatgattctaatctattgaggaaacaatgtagaacaaggttattgcaacattggacgaaaaagaactatggcttgaactatggtttcattttgagacttgggaagtgggaaaatggtgtgagcta

SEQ ID NO: 603 - DNA, 554 bp, Glycine max
  Peptide Sequence Number=SeqID_8899
  Probeset Number=SeqID_10382
cgaccatcgctagggtcccagggcagcccttccggaagtcgaagccgccctcctagccgatacaagtgctcatcccgcagttcgccggggcaaacactatagaattccgcggcaagtaatctttgacctcgcccgtcttcatctttacatatccgctaacaatgtcttgccttttgggaatacccctgatatccccattattgctcagacgggtgacaaatccaacttggtagcgaaggatttagtgaaagacctgagcccagtggctatgatgaagtcatgttatgtgcaacaatgatccggacttgagaatgagaagttataaaatcgtttctctttcaatagcctgttttgttttcgtatgttgagtcaataaaaagatagagactatgtttgctcggcgttagtgtgtgtatatatatgcttcattatgatatcatatatcatacttagtcttggacgacgataatcaaacttgaggctgaccgtgtatcatgatccaggaggatatagatttaatctataatttataccagaaaaaaaaaaaaaaaaaa

SEQ ID NO: 604 - DNA, 475 bp, Glycine max
  Probeset Number=SeqID_10383
ggttctcaaaaccgaactatgccgattcagcggtgccaagatctacccagggaaaggcatcagatttgttcgtggggattctcaggttatcctgtgcgctaactcgaaatgaaagaggtatttccacaacaggttgaagccatcaaagctcacctggactgcagtgtacagaaagcaacacaggaaggacattgatcaagaagctgctaggaaaagatgacgtgctggcagaaagccttactgcaggtacattgacggtgccacttgggaagttatccagaaaaagagagctgagaaaccagaagtaccagatgcaaagtgggaagctgcccttcgtgaaattaaggataggaacaagaaaacaaatgatgagaataaggctagagaagcagaatgtgccaaggcccaagaatcacataggaaaggatatgttactaagggtgccatgcacaagggtgccatactgagtagagga

SEQ ID NO: 605 - DNA, 645 bp, Glycine max
  misc_feature (203)..(203): n is a, c, g, or t
  Peptide Sequence Number=SeqID_8900
  Probeset Number=SeqID_10384
caggagttccagaataatcatcatgataactgcactcatcttcctttccatcctagaagggtaaaagtagaattaccagttcgcgtagattttgttgggggttggagtgatacccctccatggagcattgaacgtgctggatgtgttttgaatatggcaataagcttggaaggttctcctccaattggcaccatcatagagancactaaagcagaaggaatattatttactgatgatgcagaggacccagttatttgttggagattataagtctatttggcgcaccatttggaatggagatgaccccattttcgggtgggccaaatctgcatttaccttgggactggaaattattcatggcaacattcttggaaaattgggcatggcccatcaaacctggggccaatgtccccccgggggaagggaattggggaacttcaaaaatcttaaaccggcggccgggggtaaaaggcgcttcccccaaaaaaattgggggggaaaaaccccccccgaaaaatggtccctaaatttgttttaaggggtaaaaaacactctttgggacactgggagggggtttgaaagaaccaaaaaaggggggtttgccccccggagataaaagggcctccgagctttcccggaaaatcc

SEQ ID NO: 606 - DNA, 1750 bp, Glycine max
  misc_feature (1)..(21): n is a, c, g, or t
  misc_feature (31)..(40): n is a, c, g, or t
  misc_feature (43)..(43): n is a, c, g, or t
  misc_feature (47)..(50): n is a, c, g, or t
  misc_feature (54)..(54): n is a, c, g, or t
  misc_feature (56)..(56): n is a, c, g, or t
  misc_feature (59)..(61): n is a, c, g, or t
  misc_feature (75)..(75): n is a, c, g, or t
  misc_feature (81)..(82): n is a, c, g, or t
  misc_feature (86)..(86): n is a, c, g, or t
  misc_feature (93)..(95): n is a, c, g, or t
  misc_feature (135)..(135): n is a, c, g, or t
  misc_feature (152)..(152): n is a, c, g, or t
  misc_feature (246)..(246): n is a, c, g, or t
  misc_feature (298)..(298): n is a, c, g, or t
  misc_feature (814)..(814): n is a, c, g, or t
  misc_feature (1214)..(1214): n is a, c, g, or t
  misc_feature (1247)..(1247): n is a, c, g, or t
  misc_feature (1277)..(1277): n is a, c, g, or t
  misc_feature (1320)..(1320): n is a, c, g, or t
  misc_feature (1342)..(1342): n is a, c, g, or t
  misc_feature (1524)..(1524): n is a, c, g, or t
  misc_feature (1587)..(1587): n is a, c, g, or t
  misc_feature (1650)..(1650): n is a, c, g, or t
  misc_feature (1669)..(1669): n is a, c, g, or t
  misc_feature (1681)..(1681): n is a, c, g, or t
  Peptide Sequence Number=SeqID_8901
  Probeset Number=SeqID_10385
nnnnnnnnnnnnnnnnnnnnnaaaacggggnnnnnnnnnnagntctnnnncccntntgnnngacaaaaaaacaanctgaannttgnagaagannncccggcaaagagtacagcatgtttgttcgctcctcttatntgaaaaaggttacactnctttcgctaacaagacaagaaaaaataaatagctcctatattgtgcgtcactcttaatattacatacgggattatatcggtcaggtatttaacncctctctattatatatatatccgtcttctctctatattgtataacacaacgnttgtgtgtgtatatactctctctctcatccatcaccgcacagacaatattatatctcttctctctaataagtaaagagtatgtattctatgtctacatgccccacacacatctcttcactctatccatacatacaccgtacacaagcgttgtctgtgtgagatacttgcttatccctgtccaacttatgaacgtccttgtggacccactatctacaaatgacacttgcgttggcgctcgcgaatgggatccttcttcctcacgcgcggcgagagacataatctacaaccctctcaaacgcacgtcacaatctcgcgcccgactcgtcatccaatcgctcccagcactgctcattgaagcaccgcgtcgcgcgcccctgcctaacatacggagcggaggcacctaatcaagacccctgataaccagtgcactcgcgccgctctcactctaactatttattcctcattatatacctttactacggctacaaactcgtgtgaatatgatagcaataatntctaatcataccgacggcgaggacagaatactctacacaccgactagccaccacaacatggttagactatactcaccccactcacacaaccaacaataataataagtatcaaataatactaagccgcgacacacataccatctcacacacgcccacggtagcggacttatggacatcaataagcaacacaactcggaaaatatatagggataggcatctcactcccagactgagtctatgtgcaacgctgcggatcgtaccacaaacaccgacgtgagaggcaaggatcatagtcacgcatataatcaatccagactcaactctaaagacatacacagaccgacgtacgacatacaggcagaataaatatgaagagtactatatatgacgaagactaatncgctaatccgataccgcagcaacacgtgtaagnaccaacacacccttaacacatacgaaggcntctagcatataatcgataactatcacacgcgacgtccaattantcactctgagcatatacctacncaaatctagcgcgaaactgcgctgaccgacgatataacgatatagtgcagcgcaacaggaacgacgtgacaagagatgagtcaaacttatatacggatgatagatatcatactcacatatacaatgcagcgagcaagacatatatcgcaatacgagtaagcgtatatacccctatagcgcgncacatcgctcgctaggctgacgaaatgatagcacatatctctatacatatatattcaaaagangacattcatactctcgatatgtacaagagcgtgtatatctctctcactgttagagccgcgacnacctagcccacacaccacnatacgcccaacnacctaacagccaatcccacgcaacgtgacacgcagtaggatcgacgcacctactcactcacacacacta

SEQ ID NO: 607 - DNA, 1935 bp, Glycine max
  misc_feature (2)..(2): n is a, c, g, or t
  misc_feature (13)..(14): n is a, c, g, or t
  misc_feature (21)..(21): n is a, c, g, or t
  misc_feature (64)..(64): n is a, c, g, or t
  misc_feature (66)..(66): n is a, c, g, or t
  misc_feature (142)..(142): n is a, c, g, or t
  misc_feature (147)..(147): n is a, c, g, or t
  misc_feature (169)..(169): n is a, c, g, or t
  misc_feature (176)..(176): n is a, c, g, or t
  misc_feature (223)..(223): n is a, c, g, or t
  misc_feature (277)..(277): n is a, c, g, or t
  misc_feature (325)..(325): n is a, c, g, or t
  misc_feature (343)..(343): n is a, c, g, or t
  misc_feature (373)..(373): n is a, c, g, or t
  misc_feature (591)..(591): n is a, c, g, or t
  misc_feature (650)..(650): n is a, c, g, or t
  misc_feature (779)..(779): n is a, c, g, or t
  misc_feature (909)..(909): n is a, c, g, or t
  misc_feature (943)..(943): n is a, c, g, or t
  misc_feature (963)..(963): n is a, c, g, or t
  misc_feature (1015)..(1015): n is a, c, g, or t
  misc_feature (1022)..(1022): n is a, c, g, or t
  misc_feature (1024)..(1024): n is a, c, g, or t
  misc_feature (1096)..(1096): n is a, c, g, or t
  misc_feature (1126)..(1126): n is a, c, g, or t
  misc_feature (1156)..(1156): n is a, c, g, or t
  misc_feature (1184)..(1184): n is a, c, g, or t
  misc_feature (1238)..(1238): n is a, c, g, or t
  misc_feature (1338)..(1338): n is a, c, g, or t
  misc_feature (1501)..(1501): n is a, c, g, or t
  misc_feature (1526)..(1526): n is a, c, g, or t
  misc_feature (1724)..(1724): n is a, c, g, or t
  Probeset Number=SeqID_10386
cngagctgtctanntcgtcgnagtcgaggctgtatgctgacgcactgtagctgatggactactnantacggctcgacgacgtcgcgtgattgtcgtatctcactgctatactatcagcacgcaacagactcacttattactngacancacaggacagctctatgtagangaagccncgcgcagcgcagtgcgacgctacgactatatggatcaacgctcgcangatctactcacgtcgcagatcgcgtctatgcgtcggtgatctgtgcacgtctcnaaactgctctctcgatattgacatatcacggtctcggacaacacgcanggccgcgacgacacggtncgaacgtcacatatgcagtagacacgcgantaataccgcagacagtgacatatatcagtgcatgcgcatggcgttgtaaagagtagcgtaacgtgaagtcgctctgcacttgatacgcttctcgttcgtcatcgatctgataaccacgacattggcttagttagatcgtacaggttcagcgcggatcgaacgtgatctgtatgcgttcgtgccgctagctatcagcgccgcaacactgatcgatcatnacaccactgagattagtactcagcgtacgcggccggagcgcgtcagacagcgacactanagtgacatccatctaagagtcgacgcatattctcgcgaccatgcagacgcgccagtccgacatcacagcgatcgcggtcatatcacacgcacagccaaatcatagacatctactcgtcgcgtgtgccgncgcctacagagaagatgcatggcgtatatcatatcctgcactcgcgttactagacacgtgaagaatcagactgacgccgcgactatgcagaatatatactcagtgcgacgagcccaccacagacgcaacnagatagcgcagcgtacatccaatgattatagagnagtcgagacagtctatttanttgtgagcgagcgctatcagagtcgacgctactctcgtagagctgcgcgtgngtgtacncnatctacacgagacacgcaccttgccactgcgtacagcctctcagacgcctgtcgacgatctcactgactctnagtctcttcacatcacacctatacacacanccatcacaccacccgtacaccgtcgcgatngcaggctcacaccatatcgcaacaactntgtagcatcaccgttccgcgcgttgcgagcagaggagatgatcagcacgtatanagaagagatatgtagagatgcgtcgcgtacgcactcctcgcgcgttctgtcttcttatacgttgcgtacacaagtgcgtaacgatgtgcactggcacctncgtcgtgacgcgactcagtctcactgtcacagcaggctctgattagatgatgaagtcgacactatctccttgcgattcagacgcatattatgttagtatcgtcgatataccattagagcgacacgaccgagccatcacaccctcacgactcaatcaacacggngagagcaccacatatcgatatctcnccagtgcatcgccgtctcggtcattctgtgctctgcgatatgtattcctccgtgattactaccatcaatctcgatatgacatgagtgattatagagtcgacgttgagcgcggtggcgtataatgcgaagagcataccacgaaccgcgtcgcacgacgccgcgtgatagactctaccagacacagcagacaccacacanacacctacgataggtagacaggcagcgagcgcctcgtagtagacagcatcacactcggcgctcataacacgtccctaccgcggcgaagcacgaccgcctacacgcacaccgacaatctcagtacgcaccagaaacttcgctcatgctgggtcgatgaagggcctgacgcgcgtagatgtcgtgggagagtgtggtgtggcagtggggcgcc

SEQ ID NO: 608 - DNA, 1414 bp, Glycine max
  misc_feature (121)..(121): n is a, c, g, or t
  misc_feature (624)..(624): n is a, c, g, or t
  misc_feature (1135)..(1135): n is a, c, g, or t
  misc_feature (1258)..(1258): n is a, c, g, or t
  misc_feature (1344)..(1344): n is a, c, g, or t
  misc_feature (1414)..(1414): n is a, c, g, or t
  Peptide Sequence Number=SeqID_8902
  Probeset Number=SeqID_10387
ggccataccgtccgcgccgcacgacacaaggagccggtaactccgaaagccgcataaaaagtgacccccaacacgcgccgtgtagtgggaatgatttcccgaagagcgcgtggcccggggnggagcagttctatcggtgttgtaaacacatcgtgttgcaaatgcgcgagaggaggcttactgggccaggctcgtcttaacgattcttccagacactaccccaccactactgtggaagcgaaggtaccggggaagacggatgtgcttcatctgcgcagtgcgagctttaaccagaatgaaaacattgtatccccagtgatcgaggcctactgagccgtatgcacaacaagatcgcaacgtatagcagtgagtccctctgttcacagcccaagcacatcgaatgcccacttagtcccgcatttgactgcccgcccgacttctgcaatcaagctgccggcatggacgattccttgtttatgcggcgccacggggcaacatgagcttgcactgatgccgcggaaaagatcttttcggatgcgtgtttccccgcccccccccccgcccaggggttatttttttttgtttggcctcccgagtgtagcacagttagctcgcccatgcccnagcgaaaatacacccatataatacgccgcgtaccacgtgagcgtgcgtaaagcaccgctgaccttgcacgtgccatattgcccgtggcgcgccgcttcgcccgcgcatcgctctaatccgcgaccgccctaccgtagacactgcaccgcgtggctcgagaaagcgagatgcgcctgcgcgcatatacgcctagaaggagcgcgctcgctattcccgcctgtccctatatcgccaggcgacgcccacgcaggagcggattggcgctccagcaccgaacaccacgagagtagtgtggtgccacccgcacgcagcgcttcgatactgtgtgtaggtgtctcggcggccgagtcctagcactcgcattaccacgacgagacacgcgtccgcgcggcaaccgccacaccgcagaagtcaccactccgcgccgagtggttgagctgatcatcagccgccgtaccgcatctcgcgctgtaaccgcccgtcattttgctcgcgcgctcacgcggcctgntgcgctcgacgcttctatctggcccgcgcggtgagatgtgacctgaacagtgcccgcggaatgtccgcgacccgccatcgtatgttatcacacatctgcatttgacgacccacgcgagtattnatccccccgcgccgtgaagacagccgcgccgtgtacagatgctccgcgcgccctacgtattgtgcctctccgcgcccatgaatatnctgctctccgcgctagtcgagtgacgctgtcgcggacgcggtggcgatcgtgtagatgtgatctcgcacn

SEQ ID NO: 609 - DNA, 812 bp, Glycine max
  misc_feature (485)..(485): n is a, c, g, or t
  misc_feature (547)..(547): n is a, c, g, or t
  misc_feature (554)..(554): n is a, c, g, or t
  misc_feature (559)..(559): n is a, c, g, or t
  misc_feature (565)..(565): n is a, c, g, or t
  misc_feature (598)..(598): n is a, c, g, or t
  misc_feature (604)..(605): n is a, c, g, or t
  misc_feature (611)..(611): n is a, c, g, or t
  misc_feature (622)..(622): n is a, c, g, or t
  misc_feature (624)..(624): n is a, c, g, or t
  misc_feature (627)..(627): n is a, c, g, or t
  misc_feature (647)..(648): n is a, c, g, or t
  misc_feature (654)..(654): n is a, c, g, or t
  misc_feature (658)..(658): n is a, c, g, or t
  misc_feature (665)..(666): n is a, c, g, or t
  misc_feature (669)..(669): n is a, c, g, or t
  misc_feature (673)..(674): n is a, c, g, or t
  misc_feature (691)..(691): n is a, c, g, or t
  misc_feature (697)..(812): n is a, c, g, or t
  Probeset Number=SeqID_10388
gatttgccatttcgtgagatgcttctcgaacatcaacttatttgacatgtttttgaacatggtcaccttctagacaagctgctttgaatttctagcagtttgtgtgtattggtgtctacaccttttctttattattgaccaccccttccccccttgccattcaaaggaaaatggaaaatggttgaagccattatttatatcagtgtatgatcaggttgtactcgtaatttttttccttgatattttaaggtatggcggtatggccaacattttgccttttattattatcattgtacatcaaaattgaaataccgtattcacaatgtgagacaagtaggctattgacatgattctccatgacttttctttaatttctcatggaaattatttcaacatctctttgaaaatattatatcctgcctcggttagggtggtagggaagtgttttttgggtgctaatgacctgacctggggatcatatcagnctaatctggtatcatgctgatgggatggtcgatatgctccttaaaagctggaccattacgtngtccttnaattnccaagnaatcccaatcggaattccttctttccggggtgnccatannacttcnaattaattggngnggntccaaaattttgtgaagganntaggtntttngggttcnngcngggnnaattcttgccataattnaaaccnnnnnnnnnnnnnnnnnnnnnnnnnnnnnnnnnnnnnnnnnnnnnnnnnnnnnnnnnnnnnnnnnnnnnnnnnnnnnnnnnnnnnnnnnnnnnnnnnnnnnnnnnnnnnnnnnnnn

SEQ ID NO: 610 - DNA, 1335 bp, Glycine max
  misc_feature (1203)..(1203): n is a, c, g, or t
  misc_feature (1255)..(1257): n is a, c, g, or t
  misc_feature (1308)..(1308): n is a, c, g, or t
  misc_feature (1311)..(1311): n is a, c, g, or t
  Peptide Sequence Number=SeqID_8903
  Probeset Number=SeqID_10389
cagcgagagaagagatgagagatggagacatggagagagacgagaggaagatacgcagtaaagggagatgaggagtaggagagatgtatagagtgacatgatgacgcagaggtaagagatcagagagatattagatgaatattatagtaagtgatgatatgtaggatgagagttgcgagaggtgttggcatgagtggtgatgtgggcggatacacaagcggacgagagagcatgataactgatcgcaggagtatgtgtagctcggcggagtaggacagagtacatataatgatagtagtatgcacgcatataatagacatgacaccgtggatgatcacgcgagagtaggagggcgaggtggcgagacgagagagggataagcagtcaagtgacgagagaataagaagcaagacgagagaacaatgagagagaaaggaagtaaatagagacacaaaaaaagagatatacaataatataaacacagagtgctcagaaggaatgtatatgtagcgcaggatacacgagtgcaaataatagactacatacacaggatcaggagtgatgaatcttaaacaaataggagtgcgagcagaaacatgagtgtgagtatgttgtgttgcaattgttttattaatatacgatataaacagaaatgagacactaaaaatatattgaagatattatgttagatattagaagtgaggcgggggaggaggcgagcgaggagacactaatattatgtttgtaataatcaatcatatatacatatttgtttcttaggagctagaatataactcatctactaacaccactctctcgtgtgggtgtggggcgcggggtgagaagaaaagaaaaatactgtatgtatatgatctctgataatatattcaacagagagtatctataatcgtgcgatagggcggctacgatgacttgtgtgatgcgttcgtttcacatggtgttgtcatgtctgtaaaacaatatagataaataaacaatgagcgggggacggatgcagcggagcgggccgcagcaacaatgaagactggtctgtgcaactcaaccacacccacaaaacaccgccaacacccatctgtccggctctgtttccaccttttacaacatgtacaatgcacaaaaagtagagggagaaaataggcgagtggcacacacaaagagaggagagagtgggaaattcaaagncaacgaaagaatgaaattagaataagtgtgtcatcactattctcactcaggnnnacttcttttttgtgtgtggggggggaaaggaacaacggaggggggcagggnggnggggggcgactccaaactcccaat

SEQ ID NO: 611 - DNA, 1780 bp, Glycine max
  misc_feature (11)..(11): n is a, c, g, or t
  misc_feature (15)..(15): n is a, c, g, or t
  misc_feature (17)..(17): n is a, c, g, or t
  misc_feature (57)..(58): n is a, c, g, or t
  misc_feature (63)..(63): n is a, c, g, or t
  misc_feature (68)..(68): n is a, c, g, or t
  misc_feature (83)..(83): n is a, c, g, or t
  misc_feature (85)..(88): n is a, c, g, or t
  misc_feature (100)..(101): n is a, c, g, or t
  misc_feature (103)..(110): n is a, c, g, or t
  misc_feature (144)..(144): n is a, c, g, or t
  misc_feature (158)..(158): n is a, c, g, or t
  misc_feature (161)..(163): n is a, c, g, or t
  misc_feature (165)..(168): n is a, c, g, or t
  misc_feature (170)..(170): n is a, c, g, or t
  misc_feature (172)..(172): n is a, c, g, or t
  misc_feature (197)..(197): n is a, c, g, or t
  misc_feature (199)..(199): n is a, c, g, or t
  misc_feature (204)..(205): n is a, c, g, or t
  misc_feature (221)..(222): n is a, c, g, or t
  misc_feature (225)..(226): n is a, c, g, or t
  misc_feature (239)..(240): n is a, c, g, or t
  misc_feature (242)..(242): n is a, c, g, or t
  misc_feature (245)..(245): n is a, c, g, or t
  misc_feature (247)..(247): n is a, c, g, or t
  misc_feature (268)..(268): n is a, c, g, or t
  misc_feature (271)..(274): n is a, c, g, or t
  misc_feature (296)..(296): n is a, c, g, or t
  misc_feature (311)..(317): n is a, c, g, or t
  misc_feature (319)..(319): n is a, c, g, or t
  misc_feature (321)..(321): n is a, c, g, or t
  misc_feature (350)..(350): n is a, c, g, or t
  misc_feature (352)..(352): n is a, c, g, or t
  misc_feature (383)..(383): n is a, c, g, or t
  misc_feature (390)..(393): n is a, c, g, or t
  misc_feature (399)..(399): n is a, c, g, or t
  misc_feature (421)..(421): n is a, c, g, or t
  misc_feature (423)..(427): n is a, c, g, or t
  misc_feature (433)..(433): n is a, c, g, or t
  misc_feature (448)..(448): n is a, c, g, or t
  misc_feature (451)..(451): n is a, c, g, or t
  misc_feature (476)..(476): n is a, c, g, or t
  misc_feature (479)..(479): n is a, c, g, or t
  misc_feature (507)..(511): n is a, c, g, or t
  misc_feature (515)..(516): n is a, c, g, or t
  misc_feature (520)..(520): n is a, c, g, or t
  misc_feature (552)..(552): n is a, c, g, or t
  misc_feature (606)..(606): n is a, c, g, or t
  misc_feature (645)..(645): n is a, c, g, or t
  misc_feature (647)..(648): n is a, c, g, or t
  misc_feature (672)..(672): n is a, c, g, or t
  misc_feature (678)..(678): n is a, c, g, or t
  misc_feature (694)..(694): n is a, c, g, or t
  misc_feature (712)..(712): n is a, c, g, or t
  misc_feature (725)..(726): n is a, c, g, or t
  misc_feature (747)..(747): n is a, c, g, or t
  misc_feature (790)..(790): n is a, c, g, or t
  misc_feature (792)..(792): n is a, c, g, or t
  misc_feature (799)..(799): n is a, c, g, or t
  misc_feature (816)..(819): n is a, c, g, or t
  misc_feature (821)..(822): n is a, c, g, or t
  misc_feature (856)..(856): n is a, c, g, or t
  misc_feature (893)..(893): n is a, c, g, or t
  misc_feature (986)..(986): n is a, c, g, or t
  misc_feature (988)..(988): n is a, c, g, or t
  misc_feature (1059)..(1059): n is a, c, g, or t
  misc_feature (1066)..(1066): n is a, c, g, or t
  misc_feature (1109)..(1109): n is a, c, g, or t
  misc_feature (1145)..(1145): n is a, c, g, or t
  misc_feature (1150)..(1150): n is a, c, g, or t
  misc_feature (1446)..(1446): n is a, c, g, or t
  misc_feature (1652)..(1654): n is a, c, g, or t
  misc_feature (1668)..(1668): n is a, c, g, or t
  misc_feature (1691)..(1691): n is a, c, g, or t
  misc_feature (1694)..(1694): n is a, c, g, or t
  misc_feature (1714)..(1714): n is a, c, g, or t
  misc_feature (1754)..(1754): n is a, c, g, or t
  misc_feature (1767)..(1767): n is a, c, g, or t
  misc_feature (1770)..(1770): n is a, c, g, or t
  Probeset Number=SeqID_10390
ccgttatctgnacgntncgtactgtcgctagcatgacagcagtagcattcaacgtgnnacacntgagntagtcgttcatcganannnngggatagtgagnnannnnnnnncgcagccatgaagcacatcattctatacagtctngagttcagggtgangtnnngnnnngnangatgtgtcgtgatgtaaactatganancaaanntactgtgtatgtgcanntgnnatatctaccacgnngntcngnagcgatatctcgttcgtagancgnnnnccacatacagtagtgtatgcgncgcgcggtgtcacannnnnnncnancttcagactctggtagtgagtagtcagtngnagcacagcacttagctactcaggcacaacgngacgaannnnaagacncatgatatagtgaagagcgacnannnnncgagtnagcattcatacgtanggngctcgcgctagatacggcctagtangcnacgcgcgtgacatcgctgcagcgggcgnnnnnccgnncganactttatagagtacgctcgacgctctcgctcngacaacagatcgacgagactatcagttatgtagtacagtcatataagaatgcantcgcgcgacagctcgagtggagcgatcgtgtatagtcgngnngtcagtacttatatcacgcgcgtncatcanatacacactgtcatanactcgtgtgcggagcatncaatatactcatnnacacaaccataagtcatctcncagtccgcgtctgactcgtcgcgcgtcaaccactcacgtccgngngcgtctngatcattatgataatannnntnnttatgtaagacgtcgcgggcgtctgcgtctgcgnctctgctcatagctgtctactgcactaaacgctgagncagatcacacaaaatgtacataggtattactatatacgtcgacacacacattctgtcgtcgagtcagtcaattaatgcgacatcgtctcgcgncngaaacacaacggtacacagactcacgccgcacgccacgcgcacggcacacgacgccgacacgacccgcacngcacacnagactaaatatatattgttgagattacgacgtatatagtgagnacgcatcaatacataccatgctacgacaagatgctngcatnggcagattgatcctcgcttctcaccatacagagtgacgtgtacactcacaggcacaaccacatgtggatcgcgagtatgaatcaagagggttcgtcttcaactcctacacatcacgagggttgtatacatctccacgtattcatacctagtctcgcagccgtatgggacgatgtaggaagagaggtatggtgacatcagcggctcttgcgtcacacagacctctctctctatcaatacaccacgcccctctatctacatcacactatgagtgtcaccgtgagtgaggacgtgactncccctaacaccacaaccggttgtgcggacaagccggtcgtgcggatcgccagtactttctgcgttctgatcatatgtccatgcctacaagaatctatctgaggtgcgggagcggtgcgcctcgctcctcgctcagcacacatactacagacgaaggggaggccgcaccgctcagcgctcattatattgcgggacatactagtgttnnntggcggccacccanaatactaatattatctcacacanctncttctgctactctcgcaagncctgtgcggagctctaccgatgtcgcaaccagccacaggnaaaaacaacaccnaanaaaaaaacac

SEQ ID NO: 612 - DNA, 483 bp, Glycine max
  Peptide Sequence Number=SeqID_8904
  Probeset Number=SeqID_10391
aagtgtccgcggctgctagctcctcctccctctgtggtacgatcatcctcctctgctacgttgaccaagatggccgcgcgccttgcgcttgtggcgacgctcctgtgcgccggagccgcggccgccgcggcgcagcaggcgagcaacgtccgcgcgacctaccactactaccgcccggccgagaacggctgggacctgggcgcccctgccgtgagcgcctactgctccacctgggacgccggcaagccgtactcgtggcggtccaagtacggctggacggccttctgcggccccgccggcccccgcggccaggcgtcgtgcgggaggtgcatccgggtgaccaacacggggacgggggcgcagatcacggccaggatcgtggaccagtgcgccaacggcgggctggacctcgactgggacaccgtgttcgtcaagatcgataccgatggcatggggtaccagaggggccacctcatcgtcaac

SEQ ID NO: 613 - DNA, 500 bp, Glycine max
  Peptide Sequence Number=SeqID_8905
  Probeset Number=SeqID_10392
cccacagagatgctgaaacagagctttgtgtctcacaacaccaatgctctctgtttctctatatccaacccaaagttcaatcctttaagcccaccaaagaagccaaatcgtctcgcgtcgtgcgctctcaatgtcggactccaagatgtaaccgaagtcatccacaacaaggtacttatagctgctgggttctccggagcgattgggcagctcttaaagcccttcacttctgtggttttctacaagaaaaaacttgactttagaaccgctttacaagctggaggcttcccttcaacacattcctcttctgttgtggctgcagcaactgcaattgcttttgaaaggggatttgatgactccatttttggtttgactgtggtttatgctgctctgatcatgtatgatgcccagggtgtgaggagagaagttggaaagcatgcgagagtgttgaacaaactaacagctaatgctcggaaaggtgagagtttggagtcagatga

SEQ ID NO: 614 - DNA, 275 bp, Glycine max
  misc_feature (256)..(256): n is a, c, g, or t
  misc_feature (269)..(269): n is a, c, g, or t
  Peptide Sequence Number=SeqID_8906
  Probeset Number=SeqID_10393
gcatcgaaggatggtgactttttaatgaatgtgggaaagctgaaggaagcattgcccaactaagagaaggttatggatgaattaaccttccagagtgagctccatggattagctgctttgcagtggtcaatttgtcaagactccctcagtaggtattgtcagaaacttcatggcatatctaaagttctcaaggaaactaccagattgtgttctacacagaattgacgacacatcctaatactaagtatgcataagnttggttgttcatncagggg

SEQ ID NO: 615 - DNA, 915 bp, Glycine max
  misc_feature (1)..(1): n is a, c, g, or t
  misc_feature (915)..(915): n is a, c, g, or t
  Peptide Sequence Number=SeqID_8907
  Probeset Number=SeqID_10394
ncggccgacatttatatttttgtcacatcgcacggcatgattatacccagtatgtttaccccttgtactttgtgcttagatcagaataagggatgaactcggggtagtataatccgtcattcgatgctttaaagagttgcgacttcttacttatgtactaaggttacggcatgaagtgtatgtccattaatactgcttcagagtgaattgtaaatactttccagacaatctgtactaagtttccgaagtgtatagttttgatatagttcaataggaggaagatctcttcatgttcaacgatataagcgattatggtgatcgtatatacaatctccctgaagtcgttataaccaagcatgtagcttgtatcgtgccattgataaatagctaaatatagaggagttcaggaagtatatcgagaagtaagaactagtaagtatgtgcaaagcatagctgagatatctttttcgcctgtagtcactcttctcaggcatctcactcttgaagcacaaatatgttgctatatttatttgttctggtgcataagggtacgggtatttcatcaatttgtttgcaccttctcaggaacacgtaagattaagaacatggcatcaagtcataggtgcctcagcagtgaagcagtcacaaaaagtcctgagagaaatttgtgaggcggtttccattggtgatgcagcaggtggtagataccacaatggatgggatctcttttcacggaagtatgatcacgcgcctccaaaagcttcaaaaatctcagcctgagacgcccagccaaccctttgggtagaggatgtaccaaatcaacatgatttgacggtagcaagtctgcccatagcacagtgtcacagtcctagaaaaacatcaataggtgttaaacacaaaaaagtgggaactggn

SEQ ID NO: 616 - DNA, 1565 bp, Glycine max
  misc_feature (22)..(23): n is a, c, g, or t
  misc_feature (114)..(114): n is a, c, g, or t
  misc_feature (254)..(254): n is a, c, g, or t
  misc_feature (648)..(648): n is a, c, g, or t
  misc_feature (829)..(829): n is a, c, g, or t
  misc_feature (838)..(838): n is a, c, g, or t
  misc_feature (1051)..(1051): n is a, c, g, or t
  misc_feature (1082)..(1082): n is a, c, g, or t
  misc_feature (1143)..(1143): n is a, c, g, or t
  misc_feature (1157)..(1157): n is a, c, g, or t
  misc_feature (1212)..(1212): n is a, c, g, or t
  misc_feature (1230)..(1230): n is a, c, g, or t
  misc_feature (1249)..(1249): n is a, c, g, or t
  misc_feature (1290)..(1290): n is a, c, g, or t
  misc_feature (1311)..(1311): n is a, c, g, or t
  misc_feature (1313)..(1313): n is a, c, g, or t
  misc_feature (1335)..(1335): n is a, c, g, or t
  misc_feature (1431)..(1431): n is a, c, g, or t
  misc_feature (1452)..(1452): n is a, c, g, or t
  misc_feature (1463)..(1463): n is a, c, g, or t
  Probeset Number=SeqID_10395
agggagagagtaaatgtataannaacacttacatactacactgtgacgaaccgcgcccaggaagacgacaccaagggtgtacgttgaataagacaattaaggatgggggggacncccatttatgtatacttttgtgacaaaatgagataaaaccgtacgtacctctccccacgaaagagtcagagcgtgtgatacgtataaatgtgtttctctccttcttgtctgtgttgttctgcaggggggggagtacgcgnctctccttttctttcgctgttgtacactcactctaaaattttgtaatctcacatatatattctgttttcttctcccgcagcgggccgctcgccgctttccgcaggtcatggataactgaagcgaaggcacgagggatgtggatgaggaggtatagctaaaatactacgacgtatagatggcgtgctcgcatggacgacggatggcctaatcgagagagaggagaccgcgctagcactggagatatagacgtgagataagagatttacttctcccgcaaaatcctccttattcaccttcgctttttcctcttcctattatggatgggagagaggagtacagcgttagctgtagttagttatgaccatcccgcatgtatatcctatatatatattnatgggagttctatataataataaacgccattatcttacacacgtaatggatacacagacgcatgacgatcggagagtagcgagggacgataccggcggagtgtgttgcaggatgtgcgatctatcgacgcccgtaacactcaaatcacacagcacgatcgtcgactgccgagatctgtgangaagaaagnagagatcggagcactgaagagtacaccagatgcactgtactacatcacgccccgtattgttgtgttgagtattatgttgtatagatacgaccacttcactcctcctatccataccaacgcaccccactctatcagaatgaacgttcgcgacgagtgtatagatgatgtgatgatgctagtgctcgcgctctctccaccaccacgacacatagncgcgatatcatctaccagcaggactacgggnagtgcactcacatagccaactccactactatatatatctcgctgaatgagatctaatctantatcacacatcgantctctcatctgtataatgagcagctagacactagcggagcacactactccagtgncgcatgacctcataatantgacaacttgatgcacaancatacgtaacatcaatgatgagatatatagacgatagaganctagtacatacactactacananagatagtaatatatataatatncgcgatgcgcgctagatcctattacatcagctgatactgtatgtggataagtgacgacactgacatagcacacatagactaaaagacgatatatgntagaacactctctgaacgaanctgcgcgaccngagcacgaaactagcagtgtccgactcttcgtactaaggctgactgacacgcgtagtcggctatatcactcagctcgctatccacacatcgtccgcgccgcg

SEQ ID NO: 617 - DNA, 2508 bp, Glycine max
  misc_feature (1)..(145): n is a, c, g, or t
  Peptide Sequence Number=SeqID_8908
  Probeset Number=SeqID_10396
nnnnnnnnnnnnnnnnnnnnnnnnnnnnnnnnnnnnnnnnnnnnnnnnnnnnnnnnnnnnnnnnnnnnnnnnnnnnnnnnnnnnnnnnnnnnnnnnnnnnnnnnnnnnnnnnnnnnnnnnnnnnnnnnnnnnnnnnnnnnnnnnntttgtttctctgtctctgtctctgtctctctctccattcgtgctttcagctccggcaacctctcttccggcgccgccgctatctcggccgcgcaccagatcttcaatttgattacttgggtcaacgatttctgtcattctcaatcatggcaactagacttcagtttgaaaataattgtgaagttggagtcttctctaaacttaccaatgcctactgtttggttgccattggtggttctgaaagcttctacagtgtatttgaagccgagttagcaggtgttatccctgtggtcaagacatccattggcggtactcgtattattggtcgtctttgtgctggtaacaagaatgggcttctcttgccccataccaccacagaccaagaacttcaacatttgagaaacagtctacctgatcaagttgttgttcagcgaatagacgaaaggttatctgctctgggaaattgtatagcatgtaatgaccatgtggccctcacacacactgatcttgacagggagactgaagagatgattgcagatgttcttggagtagaagttttcaggcagaccattgctggcaatattcttgttggtagttactgtgccttctccaatagaggtggcttggttcaccctcatacttccatagaagacttggatgaactttctacacttcttcaggttcctttggtggctgggaccgtgaaccggggtagtgaagtaatagcagctggaatgacagttaatgattggactgcattttgtggttccgacaccacagcaacagagctatctgtaatcgagagtgttttcaagctgagagaagcgcagcctagcgcaattgtggatgagatgaggaaatctctcattgatacctatgtctgaactgtggtagtaatagtgttttgttttatgcaagatattgcactgctcattgttgagatcttctaagttaagttttggtgatagtttctgttgttgtgtgggcatatatgttcccatcatgttgtgttcttttccttagttgtgatatcgtataatatcaggtgctgatttttgttaccaacaaatcaaatgcatgtaagggtgctcttgcgttccactcatggtgacggcctaaataatagccttaggttgattcgaagcaatcaaattttgtcacgttaagaaaaatttcttacatttcttgatgtataaattctgcattttttaactctttgaaagaaaggttgcatttgcgtagattttgtagtattggaggagctagtgtggcttagtcgctaaatttgttacgacaaagaaattaattcaccgtgaagttgcgagagtgaagaaatggcgcaagacttggcattggatttggaggagcttcgcccgcctccacagcatcgccaaaagacctcgaaccctctctcttctctcctccgaaattcgtaacctcgaaaagttatcgtcagaggaagcttctgcgcagattccggcgccgatttcgaccggaactaaagtggcgccttcacctgcgctgaagtatgcggcactcgcgtcgttcagttgggaccaggatagtgacaaagttaagatatatgtgttaatggagggaatcgatgagaataaggttgaatccgagtttaagtcgatgtcattcgatgttaagattccatgatgttcaatgggaagaactaccgatgtgcaaatatcaaaattgcacaatgagatagtaccggagatatgcacggtgtgtggtcaagacataaaagggtaatcaggaaaatggaagagatgactgaagatgtttgtcgaaattgacgtttccaggaagaccatctttagcaatatttgtgttgagagtaacactcacttgtccaaaatagatgacttggtgcaccctaatacttagaaagaacgacttggatgaaggacctacacttcatcaggttacattggtgccacgggaacgagaaccagtgagtagttaagtaatagcggttggacagccaattaatgaattgatccgtattttgtggttctagacaactgagcaacgcagctatatgtgattgagagtgttttaaaatgaaagagaagcacagccgttgtgcatatgtggaggagatgagaaaatcccgtattgataactatgtttgaactgtggtattatgagagtttttttgtgtgctatttgttgcactgctgattgttaagattttctaatttaagttttgatgataggttgtcttttgtaatgtgggcatataaattcaccatcgtgttatactcttttttcgttaattgtgatatcatataatatcatgtgctgatttgtgtgaccaacacaaacaaatcaaatctcgagactagttctctc

SEQ ID NO: 618 - DNA, 852 bp, Glycine max
  misc_feature (1)..(1): n is a, c, g, or t
  misc_feature (795)..(795): n is a, c, g, or t
  misc_feature (852)..(852): n is a, c, g, or t
  Peptide Sequence Number=SeqID_8909
  Probeset Number=SeqID_10397
ngattgggtaccggtccccccctcgagtcatttcacaaggccccccccccatttctttcgtcttaatttgttctcttcagccatggcgatggtgcaagatgaacgatgcgttcagaaaaagctactgcattgaacatacgacggacttgtccgtagagtcaatgatgctcgattccaacgcctctgatctcaacaaggaggagagacccgaagttttgtccctactaccaccatatgaaggaaaatcagttgtataacttggagcaggcattggaagattcacagatgaattggccaagaaagctgaccagctacttgctgaggattgtcattgagagtgctatacagaagaatgaaagcattactggacaccacaagaatgtcaagatcatgtgtgctgatgccacttctccgaacttgtatatctctgaaggatcggttgatctgatattctcagatcggttactcatgtatctttcagatgaagaggttgagaatttacctgcaaggatgatcatgtggtcaatagccggggcatatggattcttcacagaaacatgcctccaccaatctgaagattccacgagagaatacaacccactcgctatagggaaaactacagtttactgtaaggtagttagagagcgtcatatgagtgtggtcaccacgtattcctttgagctttcacttgcaggatgtagaagcatagtggcttatgctcgagatagcacgatctgatgacgatgttgtcgagatgcgaactagttagatcacgagaagcacgcattacaggcnctttttaagggaaacgggttgggataaatcttaagggtatattacttaatgagagtn

SEQ ID NO: 619 - DNA, 1722 bp, Glycine max
  misc_feature (1)..(1): n is a, c, g, or t
  misc_feature (1041)..(1041): n is a, c, g, or t
  misc_feature (1135)..(1135): n is a, c, g, or t
  misc_feature (1415)..(1415): n is a, c, g, or t
  misc_feature (1467)..(1467): n is a, c, g, or t
  misc_feature (1476)..(1476): n is a, c, g, or t
  misc_feature (1570)..(1570): n is a, c, g, or t
  misc_feature (1615)..(1615): n is a, c, g, or t
  misc_feature (1701)..(1701): n is a, c, g, or t
  misc_feature (1722)..(1722): n is a, c, g, or t
  Peptide Sequence Number=SeqID_8910
  Probeset Number=SeqID_10398
ngattaaattaagtcacctcacctacctgcaccacctacgctacaacgtcacacccatcacgttatgttagctatataacaattataggggtatagcgagatagactcaccggcgtgaggcgtgcgtgcgcgctccccctcattatcaacagtaagatctacattcacccgcgcgctggctgtggaaggctgcattctctcacccgcgtgagctatctatatccctagtgaagtaataattacttattaataggggcgaaactagagtcgaatcaggtgatacttattttagtcaccgccccactataatactaagccaatctagacctctagaagtgatttttgataactgctgagggtcctagtgtgtctatagttaatgacgaagagctgtgtactgtgttagataacgtcatgcgaggtagtagatacgaagagagataaaatagatctaagacaatagagatcgcactgtatagtactagcagtgctaccacgcgatgaacgacagttgcatgatatatactcaaaaaatatgttgacggactagcatcagtaagctgtatctatcgacagctaagtgtacttaacaagtcacaaataataaataattatatctgagtgcgcttgtcaacgactcggcgcctgtcgcttatatgcgcaaagaatcatcctcagtactatgcatcatagcgacgagcctacatgctccgctttgtcgcgatgcgctaagacgtatcatatgcatgagggcgatgtgttagagatctatcgtactacgcaaacaccacacacacgtactatacgatccgtcctacttagactagaatcgctatagaagaatgagggtgaacgctgctagagtccagacgacgacagacctatgataattcgagactgacgtgggtcagtacgctgcacgcgtatctcacgcgttaggtatgatataatgatggctctacggtaccataaggcgacccgcgatactaaatgataaagtggcgtacgtagagggaaagaagatagatgcagttgcaggcnatagtgctgcgaggcgatacggtggtcacactccacacactatctctaatatgtaagattacgtacaggagtaaaagagtagggatgcataatncaatgtccgcttatggtagtcgtgctgtatggtcacgccaccgtctgcgatctatgttcgagtggacctgtccatgattacagttcgacacaatatactatagccttggacgtgaacgttagaagaataggtgtaagaataatgtcatctatatatcttctcatcggcagtagattagcagcgatgccgtatacgtaagtactacactgacactgagagaaccatatgctgtccagtagtcgatgacacgtatacgcgaagtctagctacacaccatcancttcatggtgaccgacgagctcgacagatattgtgctacagttgctatcgancctcgctgncgaagtactgccagtatgtctacacctcgatatactatgatatgttagtgcacgaaagcggtgatgcaagatctgtacgcatgttgtgcaagtncgtctcatatctatgatgtcgaattgcagcacaagtgctatatcnattgtagttagttcttatggcacgagatgagcacatacttcactgtgagcaatgactccgattatctattcatctcctgcgtgagntcactacacacaatgatctan

SEQ ID NO: 620 - DNA, 1135 bp, Glycine max
  misc_feature (1135)..(1135): n is a, c, g, or t
  Probeset Number=SeqID_10399
cccacgggctcgcgcacggttccgttttatttggctttgattttcttctgcaaccttatctactgcaaagctttgattactgagtctaacttaccctgccacagtttgccttgtttacctgagctctgtttttaactggtctttgatcaaggatggccataaaggcaattgagttgttgaaaggaagcggaaaccatgaagagatatttgaagttcttgcagcagtggctgcatctttgggggatgtaatagatgatgtgaacactttgcaggtaacacctttaaagggggcaatgaccaatgaggtttttgaggtaaattggccaaccaaaagtgatggtcatcaaagaagggttcttgttcgattatatggtgaaggtgttgaggttttcttcaacagggtggatgaaatccaaacctttgagtgcatgtcaaagcatggacagggtccacgccttcttgggaggttcaccactggcagagttgaggagttcattcatgccaaaacactctcagctgcggacctccgtgaccctgaaatatctgctttgatagcatctaagatgagggagtttcacaatcttcatatgcctggtgcaaaaagaaatatcctttggcagagaatcgtcaaagagcttagtcatgctatctgagttctgctccccttaagccaagcaatgttatggcgtggcagttagtgaaagctgcataaaaatacactcttgcaaaccatctattttggggtttgtggggacttatttcgagttatgtgaacaaaattgactttgactataaggagtatggaaggcagaggtttcagcaatactggataaggaagcctactttattggactcaccaagcatcgtttccctagatgaaactgtgaatggattgctgtcatccttcacgtgattttgcttcagatttcttatagcctgtttggagatgtaggatgtgataccaaacatgcatttactgaagtttagtcttagtctctctctctctttatatatatatatatataacaccttaaggtataatatgcagcatcatatatgtaaataatatgcaatcactaccaatgtgtgatgagttttggaaattttaattaaggtttgtttatcaatccctctn

SEQ ID NO: 621 - DNA, 1369 bp, Glycine max
  misc_feature (26)..(26): n is a, c, g, or t
  misc_feature (198)..(198): n is a, c, g, or t
  Peptide Sequence Number=SeqID_8911
  Probeset Number=SeqID_10400
tcgcccagctcacccccctccacctnccctactcacgcccaccgctactcatacaccctccacacctcctcgacacccaccactcagacgtggtgggtgaccgcgccgcccccccccccctcgcagtgctcgccacgcgacgatccgaatcacagactccttcttcttcttctctttctgtgttttattactatatanatcttacatacgccttcgccttcatcgagccaacatcggttcgagaaatacaagctcgacacgccttgacccgctatgcaaagttatgctggcgatttatacctcatcgtatcggacctagaggcacacacatatctgtatccgcagtcacagcatattggacgttaggctctacaacatacatacactttagcaaccttcttcttgtaccttggactggcaactcgcaaccagctgcaagagttctagatgctcggatatttcctacgtcacaggcaccctgctaccaaacatgatagagcacgcattatctaacagtattgtgtcagcgcacaccctttctgttcttcctccgctcgggctgattacataatatttattctttataatgacccaaatccactacttatagaaacaagatcttcctgtactcatccaaatggctacggttcgaatgaatccacggcaatacagcgcctccttacctctctcgtaatggaaacggtgcgcaactttttcctcgtccagttcaatccatgcgcctgcaatcgataacctcttaacatccgtatattaatactatggctttgtaacgaataccacacacacgacttacgcactgggcattggtccgcatccacacacaggatagcagcacaacattactgcgctataagacatttatcggtatatatatctccgcccgcagaaatacggcatacgcctcttttctcactgtccacttcacgggtgagtatcaatatcaatgaactaactcgcaaatactaagactattctctcttacttctctactcagaggcgatttactgcgttctctcatacaactgcggggagctcacaacgagttatccaccccacgtccttgcaccactttctcctcacttaggacacccatcacacactcacgtgataagagagagcacacactccttatatagagaatatttcgctcattactataatatagagggaacgctctctgcgttcggataagaggtcatcctcatacgcgcgctctcagcggcgtatagtaatcttgttctctaccaggctcttccatagctaatctgacgccgtactgatcatatgacatgataatgtgtctctgatattcttatctacactcatatctacaatataaacacatttg

SEQ ID NO: 622 - DNA, 2909 bp, Glycine max
  misc_feature (1)..(391): n is a, c, g, or t
  misc_feature (2891)..(2909): n is a, c, g, or t
  Probeset Number=SeqID_10401
nnnnnnnnnnnnnnnnnnnnnnnnnnnnnnnnnnnnnnnnnnnnnnnnnnnnnnnnnnnnnnnnnnnnnnnnnnnnnnnnnnnnnnnnnnnnnnnnnnnnnnnnnnnnnnnnnnnnnnnnnnnnnnnnnnnnnnnnnnnnnnnnnnnnnnnnnnnnnnnnnnnnnnnnnnnnnnnnnnnnnnnnnnnnnnnnnnnnnnnnnnnnnnnnnnnnnnnnnnnnnnnnnnnnnnnnnnnnnnnnnnnnnnnnnnnnnnnnnnnnnnnnnnnnnnnnnnnnnnnnnnnnnnnnnnnnnnnnnnnnnnnnnnnnnnnnnnnnnnnnnnnnnnnnnnnnnnnnnnnnnnnnnnnnnnnnnnnnnnnnnnnnnnnnnnnnnnnnnnnnnnnnnnnnnnncaactggtatgaatctgtatctgtttcatccaatgtatctcatgtaaatgaggaaaaagcagataatgacaatactgaaaaattaattgctccaccttactcagaaaagacatggtataagttcttgattgatacattatttcagaaaagatcagctgatttgaagctaaaatacaaaagacataaataatgacacgagagagctgagaggggctagagctattgatgacgaagtgcttctcttgaggtcatacatagaaaatcaagttattactgtatgtcaaaaaaaccttggaaagaatagggatgccttgaaaacattgaatttatctcaaaaattcagcttgccttcattaaatgattagggtttaagaaaggctatatttggtggagaaaatgctgcattttctgatagtgaaggaatgaactatacttttggctttcactttggtgaatctgaataccttcgctcacaggatgacagaaagctgttagaaatgttgtttccttttcccactatattgcctttgtttcaggatgatcttcccgtgtcagagctcttgcctttttcagagaaacagcagtcttatttcaagagttctttcattggatgcaaaaatgttgacctaagaactactccacttcctctggttattatgcagtactgcctaaccgtctacattcagaagcaggtgatttgctgcaacactttttgactgtaattttcaacaagttggataagggtgaagcatgggatgatgattttgagttaaacacaacattacaggaatcaatcagaaattctgctgattgtatgctgttaagtgctccagactcattggtagtgtcgataaccaaaaatcatgttgacagtgatgaggaagctagcacagctggtgttgttttgagtacgcctcctcaaagtcatgtcaatagctttggaattaatggccttgatatgctcaaattcacgtatagggtcattctttagttaatttattctgcctttctaactgaattcctatttaagaatatgagcttcgttacaaaaaattataaatgggtatataggaaatttggaattggcaggttccttggcctcttgaactcattgcaaatactgaggcaattaagaagtacaaccaggtgtctagcttgcttttgggattttttcactttttgccttggccttttaatttttttcatcattcagattatgatgtttgttcctgctatctggttggttctttttactagctctattgtacttttagtttaaataaatatatattttaggtgatgcggttcttgttgaaggtcaagcgtgcaaaatttgtattagataaagtgcggagatggaagtggaaggtgcttccatagattattccccatttctctttggtggagcatgtcctccttcagctaaatctttcctagaataaacttaacaatctagttttgcattttactaaattgtggacatttactgtaaggtttgaaactgcaatcatcctttgcagggtaagggatctgctacaaacaacagaaagcatcattggttagtggagcagaaactccttcattttgtggatgcttttcaccaatatgttatggatcgggtatgcacattgtattaagataattataaaaataatttctccaagaaaagatttatctgtaaagcacactatatacatgggacatgattaattggcattgaagaaatgatctagcataaacacaaataatagtagagcctgctaatctactaataaaatggcaagttctagtttttaatgccctttaattccttttatgataatcactaatcacacaatggattcttcccattattatacactcatgcttacatggttctgcgttttgggatattccccgccgcattttcagcttttacgacaatgttttagattttaactacacgcacgagtgattaggtagtgatggagctgtttctgcaatcaaagcaaggtgtgagatggaagtggaccggatagagaaacagtttgacgattgcattgctttcttactaagggttttatcattcaaactaaacgtggggcacttccctcatttggctgatttggtgaccagaatcaactacaactatttctacatgtctgctaatggaaatttgatgactgcctccagttctggaagtgttacttcaaggttggggaaggcccctgggtagaattgtttgatctaaaggtggattgttacaactataatctgaatatgagaatagttctgcacctgctttcatgttgtaaaatattttgagaatatcctccatttgcttaatctttgggctttgtgaaggggggaaattaaaggctgttgctacccgtgttgtctgtaactgcagggccacttgcctggcagcttccatgagtgcatagcaagatataaaattgtatcgctgttgtttatatggcagctacgtaagatcaactcctacttttttgtctgattgttnnnnnnnnnnnnnnnnnnn

SEQ ID NO: 623 - DNA, 417 bp, Glycine max
  Peptide Sequence Number=SeqID_8912
  Probeset Number=SeqID_10402
atcatcttcaaattcaattccaattctcgattcaattcgaaaaccaagcaaacactcaacgaaaatgaaattcttgttggctctcgctttcctggccatggtcaccgtctcgctggcccagtacttggtcccgggccagactgtgctgaccggcgtcggcgagatcgctctggacggccacagcaagatcgcttaccagggctaccaaaaccctgcgctcaacccctatattgtcaatggcattcccaacacctggcaatggaatcccctctggagaagacgatagaggaatggactgaacgacggcttcgaatggaaacaacggaatgactgatcgatcgattgctaactcattttacccttttgtcaatcactttatttattggctaaaattytaaaataaaaacaaattcattc

SEQ ID NO: 624 - DNA, 514 bp, Glycine max
  Probeset Number=SeqID_10403
ccatgacgaggaatgcaaagccagatgctggcgctaacactcatactacgtcgaaggggcgcttcttgggacaccattccttgaggaagcggctgtaattcaagacgaaaatggtgtctggagttctgcagacgaactacatctcgactgcctggatagataccggacggatcactaccgggcctccgactacgatacaatttccatcccgaactggtttgtaaaatctggcctctactatcagaatgaccccgtatggggctgccgctactgtcctaagaacaacctgacagagctggggtttaacttggcttattgcaatgccttgaaattagtaatgaactccatagtgacttcgaatcacaaagggattttttacggacattcccacctgctcatttcgaaaatctgcgagtggcttaatgggggaactcgttagagaacgacaccaatgaaaggtgagatggctactgagtcttggataaagatgctccgtgacgctgagtcggatgac

SEQ ID NO: 625 - DNA, 1418 bp, Glycine max
  misc_feature (14)..(14): n is a, c, g, or t
  misc_feature (20)..(22): n is a, c, g, or t
  misc_feature (25)..(31): n is a, c, g, or t
  misc_feature (59)..(59): n is a, c, g, or t
  misc_feature (202)..(202): n is a, c, g, or t
  misc_feature (288)..(288): n is a, c, g, or t
  misc_feature (291)..(291): n is a, c, g, or t
  misc_feature (294)..(294): n is a, c, g, or t
  misc_feature (300)..(300): n is a, c, g, or t
  misc_feature (552)..(552): n is a, c, g, or t
  misc_feature (869)..(869): n is a, c, g, or t
  misc_feature (984)..(984): n is a, c, g, or t
  misc_feature (1231)..(1231): n is a, c, g, or t
  misc_feature (1322)..(1322): n is a, c, g, or t
  misc_feature (1418)..(1418): n is a, c, g, or t
  Peptide Sequence Number=SeqID_8913
  Probeset Number=SeqID_10404
ttggggttgggggngttccnnnctnnnnnnnctctgccttgctctctttttctgttttngtgtcgttttcttgctgctggtgcctcctcggttgctccgtttgtctcttccctcttgcgcgcgcctgttgctcctcttcctcgttcaggtcctgcgcctccctccttccgctcctcgcgccgcgcgggcccgccgacccaantaactaaaaaatatataagagtgttgagtcggtggtgcaataagatacatattaataaaacaaagatagaaaaaaaaaatcaaganganaanaaggcnacagacaaccaccccagcacccacccacccaacacaactccgctaacacgcccctaatattcacccacgaccccacccgctcatcaacccatcaaacccagcgactcgcttgtccgcccccctccttacctcccccacgccgcgatccacgtctcccaacacccgcccacgcctgcatcttcatcacgcgtaatgcataggaatattgagattaagagttttagaatgtctgccatataggtgtagatgtanttggtgggggacgacagtgctgctggggcgtcatatgcacaatgacggttgcgttttcttgattgcgactagaatagtatgacgatccacatcacgttctgcgagctgcccgaacacaacatcaccgctctgtctcgtgctacactacttgccgccaccacgctcgtggccatccactcatcttgatagacgcgtggtgtgcttctgccatgtattacgtatggagtgtgtgagtagagggggctcggcgatgtccacgcacacaactcactactaatctgccatgctcctgatctcgaacgtgatagccacgcttnatgtgtcgtactctccgtctccctactcgcgtggtagtcgggttctctaacatatatacatagacagaaaccatctctatctgcgccctcggatattaagagtcggtattacttncttatctcttatcacgaccgccgacgtgcgtgcgtcgcttatgtgcatctacttgcttgcttctgatatgctatacaatcatccgcagtcctgagctccgagttatcactccgcactgctcgaccctcaagcacccgcgcgcgcgactcgactctgaatcagaataaacaactgttgtggatgtcttactcagctctccaccatccacctgtatatgtctcgagtctcgcgatacaatctcgctcangaagacgcgcgatgaatacacatcataaacaagtctctttacctaactctgtaccatatctctagtcgttcacatcctctgtaatttatcnctatatatctctgtacaatactgtcacctacactcagctctctccacgtcgatcattcccacatctgccatacatcatcgcctcaccctctcacan

SEQ ID NO: 626 - DNA, 1451 bp, Glycine max
  misc_feature (17)..(17): n is a, c, g, or t
  misc_feature (19)..(19): n is a, c, g, or t
  misc_feature (21)..(22): n is a, c, g, or t
  misc_feature (26)..(26): n is a, c, g, or t
  misc_feature (31)..(31): n is a, c, g, or t
  misc_feature (57)..(57): n is a, c, g, or t
  misc_feature (216)..(216): n is a, c, g, or t
  misc_feature (341)..(341): n is a, c, g, or t
  misc_feature (984)..(984): n is a, c, g, or t
  misc_feature (1006)..(1006): n is a, c, g, or t
  misc_feature (1110)..(1110): n is a, c, g, or t
  misc_feature (1118)..(1118): n is a, c, g, or t
  misc_feature (1267)..(1267): n is a, c, g, or t
  misc_feature (1285)..(1285): n is a, c, g, or t
  misc_feature (1338)..(1338): n is a, c, g, or t
  misc_feature (1350)..(1350): n is a, c, g, or t
  misc_feature (1390)..(1390): n is a, c, g, or t
  misc_feature (1405)..(1405): n is a, c, g, or t
  misc_feature (1417)..(1417): n is a, c, g, or t
  Probeset Number=SeqID_10405
ttgggtgggccccccgntntnntttnttaangggaggaagagaagacaagggaggcncctttttgtgtggggggggcacagtagtggtagagagggggcgcccgcgtctggtgcaccgttgtgtgatggcgggcacctcgccgcacagaaaagagaggagagtgtctgttttatatgtggtctagttgtgctctctattatatcgtaatgcagaanagacgcacacagcggaatcgagccgtatagtctagcgatttctatgagaatgaatccttgacatcttgttcagttgtttttctcttttcgagggttgtgtttagaagctgacgcatgtgtttttngtgcgggcgtccgcaatgtgacggcgctgcaacacagccgtctgctcacatgatcactactatgaagagtttctctttgttcgctcatgtatgtacctgtcttatatatgatatagttgacacacctgaacgtcttacacttcggtatctatagttgggattttcttctaccggaagggattgtataccctcttgctccgcatgatgatgtggatctaatatttctgtcggtggtatgtcgttggtcgactggctgcgaccggtgcggcgatatattcctttgcgactctgtgtccatctaggcgtgcacgaagatctacgctctacgcgaatacgcactggcctactacacacgtagcgtgtgttaggtgtgtatggttgtgtctctcgttgatgttgaacaccaccccacccatattccatcatctagcctgcggttctatatcttcacttctcgcgtcctaagtagtatgtggagatgacgccatatctcgtgggatgcaactcctctcccaccaccactccacccacaccgcagctggcgagaggttgtggtgatattctatatattatattgtgttaatttatagatttagacagctatcctcgtcgtgatatggtcgtatgtgatcactcacgttgnatcgtgcgatgtgtggcgggcntcgtacaaccgcgacgggggcgagagatatgacgctgactcctacatacgtagatgatgggactgctagcgcagcagacgtactgacgtgtggtgatgtgtcanctatgttngctcgacacacattgaaactaacaagatgtgtgatgttgtatctgcatcgctcacgatgtgatatatctatcctcacgtttagtactctgtgcatactcgccggctcgtatattcatatataatgaggctactgtcgagaagacctcgngctctgtacgcgatgacngtcggcgtacgcgcggccactcggtgtgtgcgtgtctattctgtgtgctatcnttcccgtgtcgncctgactgcgcgtggatgttcgttatgtatgagtgagagngacgcttgtgcgtgntatctctggttngctacagcacatgattcgtagcgagactcacaag

SEQ ID NO: 627 - DNA, 1348 bp, Glycine max
  misc_feature (394)..(394): n is a, c, g, or t
  misc_feature (683)..(683): n is a, c, g, or t
  misc_feature (1289)..(1289): n is a, c, g, or t
  misc_feature (1292)..(1294): n is a, c, g, or t
  misc_feature (1309)..(1309): n is a, c, g, or t
  misc_feature (1311)..(1312): n is a, c, g, or t
  misc_feature (1323)..(1331): n is a, c, g, or t
  misc_feature (1333)..(1334): n is a, c, g, or t
  Peptide Sequence Number=SeqID_8914
  Probeset Number=SeqID_10406
ataagtaaatagtgtgtgtattacacacacagtgtctagtgtgtgagtgatgagaacaacaatacgctgggtgtgtatatagtgtgtataagaacaaacatacagatagatgtgtaacaaataccagttatgtattactcttctctgcacaagatataatgatcgtgtgtgtatatagcaacacatacgagagataattatatgacagagctacagatcggaacgtagatagtaaagagaagaaaagttagtgtgttatacttaaagcgtttattgacaggtcttacctcactctcatgtttagattgtaggagagacgatacttacgctttgagcatgagtgacatgtgcggtagaggaggcctcacgtgggtgcgagatgagggggtgtagnggctaagctaagagccgatcgtgtgcaggcgcacttactaagaggtggataatagggccggtcctagtgctcgaagcaaattctctacatcgccctcgacagcatcagccttcaaagctccgaatccctcttgctagcagaaagcatagtgcgtcttgtcgcatcgcggcagtgctgttagtgacggagtgaggacgtatatgcgggctcccgtgttgccccaggagcaactgcaagtgacgctaggtctgtccgtacgcaaatgtagggctaattagggggtgaagtntaagggcggcagagagaacaaagcagccaatacgtgtgcttggttctgagatgtggcgtgtccgattgtggccatcacgttgggtaccggcgggtgtgcatggttatattagtgtaacttttgtagttggtgatatcttaggggctgtcgcgggggtcgtgcagtcctcgagttctgcactgaggatcatgtgctgttgacatcactacccttagttactgtatacgagcgacccatatccgtcttcccgctactcactctagagtatgattgtgggtggagttatggttctgacacggggatgacgggaggggtacatgtagagagttagtaggggtgctgagaccactcatacaaactagggcctctagctattatcgtgttacattttctcaacactaggtgtggaactccgcgcgcctccctcggctacgtatagctgcgtgagtatcactaacgatctgtctttctctcttcgtagttatttgtcgctacttaattggatcttactcccggcggactctccctccacccgccgggaggattcctcttcatctgtagaggacccgccactctcccgctggggttgtcttctgtcattgtgtncgnnnaaagggtaaaaaaantnnaaagaaaaagnnnnnnnnnannaaaaaaaaaaaaaa

SEQ ID NO: 628 - DNA, 1419 bp, Glycine max
  misc_feature (19)..(20): n is a, c, g, or t
  misc_feature (23)..(25): n is a, c, g, or t
  misc_feature (28)..(28): n is a, c, g, or t
  misc_feature (30)..(31): n is a, c, g, or t
  misc_feature (36)..(37): n is a, c, g, or t
  misc_feature (39)..(41): n is a, c, g, or t
  misc_feature (44)..(44): n is a, c, g, or t
  misc_feature (48)..(49): n is a, c, g, or t
  misc_feature (53)..(53): n is a, c, g, or t
  misc_feature (73)..(73): n is a, c, g, or t
  misc_feature (76)..(78): n is a, c, g, or t
  misc_feature (80)..(81): n is a, c, g, or t
  misc_feature (93)..(93): n is a, c, g, or t
  misc_feature (95)..(98): n is a, c, g, or t
  misc_feature (100)..(101): n is a, c, g, or t
  misc_feature (106)..(106): n is a, c, g, or t
  misc_feature (125)..(125): n is a, c, g, or t
  misc_feature (132)..(132): n is a, c, g, or t
  misc_feature (190)..(190): n is a, c, g, or t
  misc_feature (255)..(255): n is a, c, g, or t
  misc_feature (336)..(336): n is a, c, g, or t
  misc_feature (441)..(441): n is a, c, g, or t
  misc_feature (466)..(466): n is a, c, g, or t
  misc_feature (865)..(865): n is a, c, g, or t
  misc_feature (928)..(928): n is a, c, g, or t
  misc_feature (1053)..(1053): n is a, c, g, or t
  misc_feature (1134)..(1134): n is a, c, g, or t
  misc_feature (1291)..(1291): n is a, c, g, or t
  misc_feature (1357)..(1357): n is a, c, g, or t
  misc_feature (1362)..(1362): n is a, c, g, or t
  misc_feature (1419)..(1419): n is a, c, g, or t
  Probeset Number=SeqID_10407
tgggtggtgtgtgtggtgnntcnnnccncnnctccnncnnnctnatanntatnctaactacccataatttatnccnnncnncatgtccccccnannnncnnaccanctataccacacatcttttnatattanactttttcctatcaataagaggagtgccacacaactgttctactagtgatataagaancattacccactcaagcacaactatatgtggaggaggagagaggagggagtggaggaacaacagangacagagtgtgttgacggttttcattgcaaactgttggtatgtataatggtagggaggaatagttgatgaagttggggatncctataacatatgtataatccagcatgtgtagattatagaccgtaagacttctctacatccagagggaatcaggctaccagacttttctgcgtctaacacgatanggttttgtcatttgtagaagattgnatctcattgcatgctgttaatgttctttaccttcttcatatttttctacgtacgtgggtgatggcgatggtgagccagagaggaggagatgagtggagatagccagccgtgctgacctggcgccccctcgcgtgctagagtggattatgaggtgacgagtgtctgatatgaatgaggagagaagaaaaataaatagtatatatacctcaccactaactaaactatcacggcatgtagaatcggacttacattaaacactacaaatataacaataaatataacactataatatatatgtatagcatacgtgaagattggagtcattgataaaaatctatacaatatgaactgtagatggattacaatacaaacaacgaagtagagtgtggagtgtctcgnccccaccacacattacatacaaacacatgtatacccaatgatataatgtatcgagtctgaatngaatcactacaccatactagacattcatatacatacaatgtgcattgacgttagtctgctatgcatagagtattgctgctcaataagatgagacagtacaccacccacacaccaggcgacactantccatcatacatcccatctatccctactcatacgagttgatatgattgtaactgagtgtgtgtcctcgtatacagtatagngatgataatgcttagagtggagcggagacgtgatgcgagatacgttagagcgtaccgacagacacgcgcagatgaatgggcatcactactagacacgcgcgcctgcatacatagcgctgcaccatatacaatcagcccatctaacaccgctcatggngcgacaccacgcacacgcgtcatcgtatctgccttcggtctctcatagtctgtatgcacatatacntccanctcactcacacacaacactataacttgtcatgtactatcctctacatacgcaccctn

SEQ ID NO: 629 - DNA, 1740 bp, Glycine max
  misc_feature (1)..(1): n is a, c, g, or t
  misc_feature (104)..(104): n is a, c, g, or t
  misc_feature (191)..(191): n is a, c, g, or t
  misc_feature (319)..(319): n is a, c, g, or t
  misc_feature (374)..(374): n is a, c, g, or t
  misc_feature (438)..(438): n is a, c, g, or t
  misc_feature (808)..(808): n is a, c, g, or t
  misc_feature (832)..(832): n is a, c, g, or t
  misc_feature (862)..(862): n is a, c, g, or t
  misc_feature (868)..(868): n is a, c, g, or t
  misc_feature (888)..(888): n is a, c, g, or t
  misc_feature (894)..(894): n is a, c, g, or t
  misc_feature (903)..(903): n is a, c, g, or t
  misc_feature (912)..(912): n is a, c, g, or t
  misc_feature (915)..(915): n is a, c, g, or t
  misc_feature (918)..(918): n is a, c, g, or t
  misc_feature (925)..(925): n is a, c, g, or t
  misc_feature (933)..(933): n is a, c, g, or t
  misc_feature (939)..(939): n is a, c, g, or t
  misc_feature (1019)..(1019): n is a, c, g, or t
  misc_feature (1063)..(1063): n is a, c, g, or t
  misc_feature (1126)..(1126): n is a, c, g, or t
  misc_feature (1256)..(1256): n is a, c, g, or t
  misc_feature (1271)..(1271): n is a, c, g, or t
  misc_feature (1293)..(1293): n is a, c, g, or t
  misc_feature (1298)..(1298): n is a, c, g, or t
  misc_feature (1303)..(1303): n is a, c, g, or t
  misc_feature (1321)..(1321): n is a, c, g, or t
  misc_feature (1330)..(1330): n is a, c, g, or t
  misc_feature (1332)..(1332): n is a, c, g, or t
  misc_feature (1340)..(1340): n is a, c, g, or t
  misc_feature (1354)..(1354): n is a, c, g, or t
  misc_feature (1360)..(1360): n is a, c, g, or t
  misc_feature (1364)..(1364): n is a, c, g, or t
  misc_feature (1368)..(1368): n is a, c, g, or t
  misc_feature (1373)..(1373): n is a, c, g, or t
  misc_feature (1382)..(1383): n is a, c, g, or t
  misc_feature (1385)..(1385): n is a, c, g, or t
  misc_feature (1408)..(1408): n is a, c, g, or t
  misc_feature (1411)..(1411): n is a, c, g, or t
  misc_feature (1418)..(1418): n is a, c, g, or t
  misc_feature (1424)..(1424): n is a, c, g, or t
  misc_feature (1430)..(1430): n is a, c, g, or t
  misc_feature (1476)..(1476): n is a, c, g, or t
  misc_feature (1496)..(1496): n is a, c, g, or t
  misc_feature (1532)..(1532): n is a, c, g, or t
  misc_feature (1541)..(1541): n is a, c, g, or t
  misc_feature (1545)..(1547): n is a, c, g, or t
  misc_feature (1549)..(1549): n is a, c, g, or t
  misc_feature (1552)..(1553): n is a, c, g, or t
  misc_feature (1558)..(1561): n is a, c, g, or t
  misc_feature (1592)..(1592): n is a, c, g, or t
  misc_feature (1605)..(1607): n is a, c, g, or t
  misc_feature (1611)..(1612): n is a, c, g, or t
  misc_feature (1614)..(1614): n is a, c, g, or t
  misc_feature (1618)..(1619): n is a, c, g, or t
  misc_feature (1624)..(1624): n is a, c, g, or t
  misc_feature (1631)..(1633): n is a, c, g, or t
  misc_feature (1644)..(1644): n is a, c, g, or t
  misc_feature (1647)..(1647): n is a, c, g, or t
  misc_feature (1700)..(1704): n is a, c, g, or t
  misc_feature (1706)..(1710): n is a, c, g, or t
  misc_feature (1712)..(1717): n is a, c, g, or t
  misc_feature (1739)..(1740): n is a, c, g, or t
  Peptide Sequence Number=SeqID_8915
  Probeset Number=SeqID_10408
ngagagagacgatagcgattgagtgagagtggtgtggtgatgagagtagatagcttagagtcagtgcgatatcgaagcactgcgcagcagtcagagtgagcgtnggagtgtgtatgatcgagtatatgatagtatagtcatagatagtgctatatagtaatatagtgagattatatctagtgatagtatangagttaatgagtgatgtatagtgtgatgagtctgagttaggatgagtagtagtagcgtgaagtggcgcgacgtcagtgtgttgtgatgagatgactagtgtcgacgcagtgtacggtactgcgcggantgacagcgtgtcgtggtggtgtgatcgagagtgaagcagatggagagaagttatnactgagcacagcacaggtgaatactcgagcgatgttgagacgagatatcaggaggacgttgcgntgcaggagacggcgagatgagcgtaatagtgggatgagctgagatgcgggagtgttgacggtgtggctgtacagaggattcgctatcatacactgatcaagtatagtgtcatgtagatagtggtgatgatgcatgagagatggggtcgggtcgagcgcgctccgcagcctatagcacatcatatttatatgatatactctataacatctacatagtcaatataagtagtactcatatgagttgcgtttcgattttacgtgtgatgctatattatcgaatatattacatatgtacatacaatcatttacttctatataatcagtaagtatatagaggatgatcgtttcagagatgtagatatatatgcatnaatctcttctgctgtcttccactnttcttactatccattgtaattatagatatntcatantatatactacactacaatantttatnttatttgcnacgtgtcantcncantaatctntcgtcttntatgtntgtattctcttcgtttgagcatacgtgcaggagagtgcagcgacaacgcacgacgaagaaacacgacagctgacagcacntatagaatatatctgctcaaggctaatatcagagtgaggtatantgcaagtcgagagctaccacacacagataagaaagttgacagaatatgataatagatgaggtngctgatgagataaatagacataattttatatataatcgcgtagatgaggatcaagaagacgtagatacatacaagagaaacactcatagagagatagagacagacaagaatgagacaccactgtggctcnggccagcggactgcncatcccagtattactccacggncgcangcagncaccagctacgcgccgancgtctcatncntgagcacnccctctgccatagnatcagncatnaatnagacnaagaaaaannanaaaaaacatagaatataaaagangcnaaatgtnacacanatgagnagaggagaatagtgtactagcagataggcgtgtgccgcctcgcttntatcgccttctccgtgggcncgcaggtacagcgcggtcgacgtcgctgtccgttangtgtagttntgtnnncnggnngagcnnnnagataatagaacatagccacatatataaccnaatcaataaacannnaatnncnaatnngaacnacatccnnnccccaacccanccnatcactcacacaccaccacctcacacaccacacgcacacaccccctacaccannnnnannnnntnnnnnnccccaacccccccccccccccnn

SEQ ID NO: 630 - DNA, 1864 bp, Glycine max
  misc_feature (1)..(1): n is a, c, g, or t
  misc_feature (72)..(72): n is a, c, g, or t
  misc_feature (97)..(97): n is a, c, g, or t
  misc_feature (111)..(111): n is a, c, g, or t
  misc_feature (115)..(115): n is a, c, g, or t
  misc_feature (117)..(117): n is a, c, g, or t
  misc_feature (154)..(154): n is a, c, g, or t
  misc_feature (174)..(174): n is a, c, g, or t
  misc_feature (182)..(182): n is a, c, g, or t
  misc_feature (188)..(188): n is a, c, g, or t
  misc_feature (203)..(203): n is a, c, g, or t
  misc_feature (219)..(219): n is a, c, g, or t
  misc_feature (287)..(287): n is a, c, g, or t
  misc_feature (296)..(296): n is a, c, g, or t
  misc_feature (355)..(355): n is a, c, g, or t
  misc_feature (361)..(361): n is a, c, g, or t
  misc_feature (405)..(405): n is a, c, g, or t
  misc_feature (409)..(409): n is a, c, g, or t
  misc_feature (422)..(422): n is a, c, g, or t
  misc_feature (425)..(425): n is a, c, g, or t
  misc_feature (433)..(433): n is a, c, g, or t
  misc_feature (465)..(465): n is a, c, g, or t
  misc_feature (491)..(491): n is a, c, g, or t
  misc_feature (499)..(499): n is a, c, g, or t
  misc_feature (539)..(539): n is a, c, g, or t
  misc_feature (549)..(550): n is a, c, g, or t
  misc_feature (560)..(560): n is a, c, g, or t
  misc_feature (608)..(608): n is a, c, g, or t
  misc_feature (616)..(616): n is a, c, g, or t
  misc_feature (618)..(618): n is a, c, g, or t
  misc_feature (651)..(651): n is a, c, g, or t
  misc_feature (680)..(680): n is a, c, g, or t
  misc_feature (710)..(710): n is a, c, g, or t
  misc_feature (755)..(755): n is a, c, g, or t
  misc_feature (760)..(760): n is a, c, g, or t
  misc_feature (765)..(765): n is a, c, g, or t
  misc_feature (1196)..(1196): n is a, c, g, or t
  misc_feature (1462)..(1462): n is a, c, g, or t
  misc_feature (1469)..(1469): n is a, c, g, or t
  misc_feature (1481)..(1481): n is a, c, g, or t
  misc_feature (1517)..(1517): n is a, c, g, or t
  misc_feature (1532)..(1532): n is a, c, g, or t
  misc_feature (1582)..(1582): n is a, c, g, or t
  misc_feature (1622)..(1622): n is a, c, g, or t
  misc_feature (1772)..(1772): n is a, c, g, or t
  misc_feature (1817)..(1817): n is a, c, g, or t
  misc_feature (1837)..(1839): n is a, c, g, or t
  Probeset Number=SeqID_10409
ngtcaacgcacctagtcgacgcagagcgctgactacgatgcgcgcagcaaacgacacgcgatagcgcagctncggcgacgacgcagcgacagcgagngcagcagcgtacgncgangncgaccatacgcacacgcgcagcacagccgcagtgcgnagtgagcacagacgaagcanggtcgtgngtagcntatgcagtcgtgacnatgcaggctaccgagncgaggcgcacgaggtacgcacagcgcgcgcatgcgtcagaactgcgacgtgcgcgcagagacgggagnagtgctgangtcagcggcaacgcagcaggtggcaacacgtcgagcaggagcagtaggaatcgtcacangatcancatagtacacggcaaaacatacacatcgacatgcatccagacgntgantgtgaactgtgtngancacgaganataatgcacatacgaagaatgcatatacaagnagatctagcagtcatgcaacagcacnacgacgancacacacagcaccgcacgcgtgactcggcgccgcgcaagncaacacgagnnacacgtagcnagagcacacacacacagtaactgtagcgagaatatacgtagacgacanacacgacnanactcgcggcaacgcagcaactcgcgcacacacngccgcaatcacgagtcggaacgcgatcanaggacaagaggaagagacacgacacagagncacaagacgcatcagaagagagtcgacagacatacgaatagagantctancagangtagcgtatagagagcgatctcagacgcacaacacacacacacatacgacagcacacatcagcacacacactacggagaaacacaagagcgaatacacagagccgcgcagcgagaaggacgagagcaatgcaagcagaacgacgcgacgccacagagtatgaagaggcggacgcatcgatacaggacgcgcatgcgcatgccacgctctgccgcgagagacagagacgcaccgccgtcccaactacgcacaacaggacgacgtcaccacccagatgcgatcacgacgcgcaaccacccaacaccccgaacccgcattaaaacacgactgagacgtcaccgtaagtacaccacacgccagaagtacgcgaacgcgaccgcagagcaggacggaagaggcgagagctgagccgcgaaccgatcagagcgaccnagaaccgaccagtacaggacgagccagcagatgcgacgagcagccagatcgagagattagcgatagagaagtagagagagaagaagaaatagagaaggaaggagacagcggctccgcagcggcggcgacgaagaggaatcacacgaagaacaaacaaagaagagacacccagcagccgaaacaacagcagcacccagacaacaacaacaaccagaaagaaaaagcaaaaggaagaaacaacagagcggcaaggacacaacacacanacggagnacacgcggaagngaaacctaaccgacacaaaaggctgctaacagaganaagagggaacgcgangcatgcagagagaagagagaccagacaccagacacagagagagcacgcgngaacgaaccgcacgccaagaccggaggagacggaagaggntaccggaccacctacacacacagacacaccgcaaccgagacaagcacacagcacgctggcggaggaccgcgagcgagcgctcaccagcacgacaagaggaacaacggaaggcgtgaagatgaagatagatggagagggccgtccgcggtntggagggaaaagaagagacaacagaacgcacgagacccaccctcncgaacaccacgcgaaacaannnaaaaaataacaaacaacaacaacta

SEQ ID NO: 631 - DNA, 1822 bp, Glycine max
  misc_feature (111)..(111): n is a, c, g, or t
  misc_feature (156)..(156): n is a, c, g, or t
  misc_feature (398)..(398): n is a, c, g, or t
  misc_feature (429)..(429): n is a, c, g, or t
  misc_feature (563)..(563): n is a, c, g, or t
  misc_feature (694)..(694): n is a, c, g, or t
  misc_feature (869)..(869): n is a, c, g, or t
  misc_feature (884)..(884): n is a, c, g, or t
  misc_feature (1066)..(1066): n is a, c, g, or t
  misc_feature (1072)..(1072): n is a, c, g, or t
  misc_feature (1144)..(1144): n is a, c, g, or t
  misc_feature (1167)..(1167): n is a, c, g, or t
  misc_feature (1224)..(1224): n is a, c, g, or t
  misc_feature (1316)..(1316): n is a, c, g, or t
  misc_feature (1340)..(1340): n is a, c, g, or t
  misc_feature (1344)..(1344): n is a, c, g, or t
  misc_feature (1360)..(1360): n is a, c, g, or t
  misc_feature (1369)..(1369): n is a, c, g, or t
  misc_feature (1413)..(1413): n is a, c, g, or t
  misc_feature (1433)..(1433): n is a, c, g, or t
  misc_feature (1461)..(1461): n is a, c, g, or t
  misc_feature (1468)..(1468): n is a, c, g, or t
  misc_feature (1480)..(1480): n is a, c, g, or t
  misc_feature (1490)..(1490): n is a, c, g, or t
  misc_feature (1525)..(1525): n is a, c, g, or t
  misc_feature (1588)..(1588): n is a, c, g, or t
  misc_feature (1593)..(1593): n is a, c, g, or t
  misc_feature (1607)..(1607): n is a, c, g, or t
  misc_feature (1612)..(1612): n is a, c, g, or t
  misc_feature (1683)..(1683): n is a, c, g, or t
  misc_feature (1685)..(1685): n is a, c, g, or t
  misc_feature (1750)..(1750): n is a, c, g, or t
  misc_feature (1752)..(1752): n is a, c, g, or t
  misc_feature (1754)..(1754): n is a, c, g, or t
  misc_feature (1756)..(1757): n is a, c, g, or t
  misc_feature (1779)..(1779): n is a, c, g, or t
  misc_feature (1822)..(1822): n is a, c, g, or t
  Peptide Sequence Number=SeqID_8916
  Probeset Number=SeqID_10410
tctactcccctcctttccttcttctctacctcctccctccacactacgtctcgctcctctctctgaggaatgaatttgcctccgcctgatgaacaacgcaaacaatacttntgaggagagaacgagtagagacggagacgacgtggcgtgggcgcnactccccgcaccgcgagtctcgtccggaggtgtgagtagtggttcgtacgcgtgtgcgcgtcgcctcttcttccgtacccaccacctcttatccgctgctctgcctttcacttatctcacaatcatcagctctcatgcatactcatgctcctgttcttcttccgtcatgtggattgcacgcggccgcctatggtttcagctagcgacacacaatcttagggagtagcgacgtgagtctcacntagactaatatatcacgtcgtccgagatatnaactatcacagagagtatgtggtggcgtggctgatgacagatcgcgcggtatgcgcagcggccgccgagtgtggcgtggaggaagcgctgtgggacgacggtgcgcgagacgtgtaggatgagtgagcgcgtgnggagtaggtgacgcagacttgattgaccagcagtcatatatattagaccacgttcaacttcgaaccacgggttcgcgatgtcgctatgacgctcgatgtgcacttgtcgaactgattcgtcgtattactgntcatgtcgttcgttagtctcggttatgctctatactcatcttctcgtcttctacattaatgtagctcgcgatctcggtctactaccatgtctcctctctgtgtcggatagtggagcgatcgtagtatagtcacgctgtatgtagagataatacgatgagttagcagcacgcggcncgtgcgacatcttcncagtacgacacgagagcagaagtatcactgtacgatcgacgcattgacgtatcatgcagccgtgagcgtctatgtgcgatgcgtgataagtggtgagagactgtggtttgcgcgcagtcagcgtaggacgcgtgcatgagctgttcgatgtgtgatgactcgcacgacacgcgtcggtggtngtgtantagtaagcagagtgatgtaggtgttactgcatgcgagatcatcgatagtaagagtgtcacaccactgtaatngtatctaactagacatctcatcntctctacactcacgacatggtcaccttgcgcggctctatgtagtgatacgagataantacgagtatattatacgacgaagagtgcagacgcacgcgtgacacgtcactcgtagtatgtacagcggacgtcgatagacgctatgtcactncttgctctatgcatacggtgtgantcanctctacgtcggttgantcgagctgntgctatatgacgtcaagtttacgtgcacgttacctatatatctntatagcatatactgtacgantcagctatgatgacgagtcgatagctangcagatngctgtatgtgtngtcatatatncgtttcaatatcagtcgagtagcatatctctcaanatgatgacatcagacaagagagggaagcgatgtagtaacatgtagtggtgacatgattaggantagtntacttactactacncaagnattatttattatatgagatacatatgtacgacgctgttgatatatcatcgatatacatagttataacatgntnacagaatagtatatgataggcatgtatgacgatgtcgcgtctacgtgattggaagatcgtcgcananancnnttgatgatatatatgctcgtantaactatgccgtgtacgacgacatcatcgcgtagagtgtgtgn

SEQ ID NO: 632 - DNA, 867 bp, Glycine max
  Probeset Number=SeqID_10411
gtcgactctagatgagttcaatccccgaatcgatcatcctagtgaaattttatgaccattcgaattggggcgagagcttcccttgttcaatggcgagcgtttagatgagttatgtccccgaatcggacatccgggtgaaacgttatgaccattcgaatttctcgagagcttccgttgttcaatttcgagcgtcttgatatattatgtcccggaatcctacatccgcgtggaaagttttgaccattcgaatttctcgagaacttccgttgttcaatttcgagcgtctcgatgagttatatccccgaatcggacatccgggtgaaaattaatgaccattcgactttctcgagagcttccgctggtcaatttcgagcgtcttgatatattatgtcccctaatcgaacatccgtgtgaaaagttatgaccattcgaatttctcgagagctttcattgatcaatttcgagcgcctacatgagttatgtccccgaatcgaacatccgtgtgaaaagtcatgaccgttcgaattttcgggagctcccgctgttcaatttcgagcgtcctgatatattatgtccccgaatcggagatccatgtgaaaagttatgaccattcgaatttctcgagagcatccgttgatcagtttcgagcgtcttgatatataatgtccccgaatcgaacattcgtgtgaaaagctatgaccgttcaaatttatcgagaaatcccattgttcaatttcgagcgtctcgatatattatttccccgaatcggacatccatgttaaaagttatgacaattccaatttgtcaagtgcttccgttgttcaatttcgagccgtctcgatatatcatgtccccgtatcagacatc

SEQ ID NO: 633 - DNA, 1723 bp, Glycine max
  misc_feature (1)..(15): n is a, c, g, or t
  misc_feature (20)..(42): n is a, c, g, or t
  misc_feature (52)..(52): n is a, c, g, or t
  misc_feature (55)..(55): n is a, c, g, or t
  misc_feature (60)..(60): n is a, c, g, or t
  misc_feature (68)..(68): n is a, c, g, or t
  misc_feature (70)..(70): n is a, c, g, or t
  misc_feature (75)..(75): n is a, c, g, or t
  misc_feature (82)..(82): n is a, c, g, or t
  misc_feature (86)..(87): n is a, c, g, or t
  misc_feature (93)..(94): n is a, c, g, or t
  misc_feature (107)..(108): n is a, c, g, or t
  misc_feature (110)..(111): n is a, c, g, or t
  misc_feature (116)..(116): n is a, c, g, or t
  misc_feature (137)..(137): n is a, c, g, or t
  misc_feature (146)..(146): n is a, c, g, or t
  misc_feature (159)..(159): n is a, c, g, or t
  misc_feature (175)..(175): n is a, c, g, or t
  misc_feature (178)..(178): n is a, c, g, or t
  misc_feature (209)..(209): n is a, c, g, or t
  misc_feature (213)..(213): n is a, c, g, or t
  misc_feature (242)..(242): n is a, c, g, or t
  misc_feature (270)..(271): n is a, c, g, or t
  misc_feature (275)..(275): n is a, c, g, or t
  misc_feature (277)..(277): n is a, c, g, or t
  misc_feature (280)..(280): n is a, c, g, or t
  misc_feature (283)..(283): n is a, c, g, or t
  misc_feature (287)..(287): n is a, c, g, or t
  misc_feature (314)..(314): n is a, c, g, or t
  misc_feature (318)..(318): n is a, c, g, or t
  misc_feature (320)..(320): n is a, c, g, or t
  misc_feature (322)..(322): n is a, c, g, or t
  misc_feature (327)..(327): n is a, c, g, or t
  misc_feature (334)..(334): n is a, c, g, or t
  misc_feature (369)..(369): n is a, c, g, or t
  misc_feature (377)..(377): n is a, c, g, or t
  misc_feature (401)..(402): n is a, c, g, or t
  misc_feature (409)..(409): n is a, c, g, or t
  misc_feature (423)..(423): n is a, c, g, or t
  misc_feature (488)..(488): n is a, c, g, or t
  misc_feature (495)..(495): n is a, c, g, or t
  misc_feature (508)..(508): n is a, c, g, or t
  misc_feature (511)..(512): n is a, c, g, or t
  misc_feature (531)..(531): n is a, c, g, or t
  misc_feature (535)..(535): n is a, c, g, or t
  misc_feature (591)..(591): n is a, c, g, or t
  misc_feature (636)..(636): n is a, c, g, or t
  misc_feature (646)..(646): n is a, c, g, or t
  misc_feature (652)..(652): n is a, c, g, or t
  misc_feature (657)..(657): n is a, c, g, or t
  misc_feature (660)..(660): n is a, c, g, or t
  misc_feature (680)..(680): n is a, c, g, or t
  misc_feature (692)..(692): n is a, c, g, or t
  misc_feature (773)..(773): n is a, c, g, or t
  misc_feature (790)..(790): n is a, c, g, or t
  misc_feature (822)..(822): n is a, c, g, or t
  misc_feature (870)..(870): n is a, c, g, or t
  misc_feature (900)..(900): n is a, c, g, or t
  misc_feature (956)..(956): n is a, c, g, or t
  misc_feature (1013)..(1013): n is a, c, g, or t
  misc_feature (1099)..(1099): n is a, c, g, or t
  misc_feature (1149)..(1149): n is a, c, g, or t
  misc_feature (1151)..(1151): n is a, c, g, or t
  misc_feature (1172)..(1172): n is a, c, g, or t
  misc_feature (1244)..(1244): n is a, c, g, or t
  misc_feature (1550)..(1550): n is a, c, g, or t
  misc_feature (1723)..(1723): n is a, c, g, or t
  Peptide Sequence Number=SeqID_8917
  Probeset Number=SeqID_10412
nnnnnnnnnnnnnnnttttnnnnnnnnnnnnnnnnnnnnnnnttgttttgtnttnttttnttgtgtgntntggtnctgtttntgtnnttgtgnntttgtgtgctctnntnngtttntctaatcagctgggtgtgttncgtcttgcncacgccgttctgntcgttggtgtcgtctngcngctggctgtcgctctgagcacagcgtgtggngtcntgtgcatcgcgcttgcgtcgtggctggcngtcggcatatgcggagcgatttggcgtnnctcntnttnctntctngtttgctgctgtgtcgtgtgtagatcntaanananggagntataatnatcgtgacaacttcatgattttatagtaggatttnataattcnatataatcatagataaacactatnntatagantagcaacgtatacnacggactattaaatagaacgaatataggacagtgagaggagagacaggacgtataggtaaaaaanaagccangattatctgaacnatnngatacgtagagagcagaanagcnacatagaaagactgatcggagacggacagatagcaagagataagaaagatgtagangtatcacagagagcagatagagcatagaagagtattaagagagtnatagtatgangacggnaatantgnacaaatattatatcatactnagaggtgtaaanaaatacatgagaatgtagactgactgtctacgtacgatatatagatgtatgtgatagagctacgtgacagtgtgatgaagnagtagtactgttttctnctggtgtctgtagtgtgtcggcgacacgatancatcacgtggctacgagctcagaggtgacgatgaagaggcactagcgnacatgaagcggtgtagtggcgcatacttantgatgtgagtatggagtgtgagtgtgctgcgtgcgtgtgcgtcgcggagtggaggnggtgacatagatgagagcggagtgcgagtgcgattgtcacaccgcgacatactagcnagatcgcacacaacacgagcgcacagaagcagcagcagtgaatcaaagacgcgagagccgcgagagacaggaacgagagagagagngactatgagtgcggcgcgcaggtgtcagcgtacagccggacgccgcgaangncgctggcgtgggcgagcacgntgctgtgtgtagtgatgtgtgagagtgtgtcgcgcgccagattgcgccatgttgtagagtagagtagtcggnatatatatataactgtggctgtagatatatgttgcagagatatctgtgaccaacacagtgatgacgctacgcatgctcgtatactgcggtgagaatactattagaatacacatgcgcagagagacggctgtaaacaatctcagtgtatgcagtggagtagaaagtatatggagcaaatgaaaatcgaaattacagtgattcgcgacagcactacagtaatcatcacgtgaggtggtagagatacgtcgagagaatatgatacgccacatgacacatgtagtaagaacgctaatcagagagggaganaatgtacaatgcacgaacagagagacagtcgagcgtgtacacgaggatctcacgacaccatacatagtggctatcacaaaatcaacacgcgctataaggatgtcgataaaccatatgcgtgtatataatcacatctacgcgctgcgcacgcgatcgtcgtgaacggcgagaan

SEQ ID NO: 634 - DNA, 440 bp, Glycine max
  misc_feature (427)..(427): n is a, c, g, or t
  Probeset Number=SeqID_10413
acacagtgccacacagacacacgtacgcatggtacgttcgagcggcatgaagggaggacggcggtccaacaggaggctcctcaggtcgttcctgggcgcgtgcaggaagctcagcgccgagctgcagctgctcggcccgacggcgagcgcgtgggtgcaactcgaggccggcgacgaggccatcccggtggacgtgccgaggggccacacggtggtgtacgtcggggaggagctgcggcggtacgtcgtccgcgtgtcctccctcgaccacccgctgttccgggagctgctcgaccgcgcgcgggaggagtacgagttcgccgccgacgccaagctgtgcctgccctgcgacgaggacatcttcctcgccgtgctctgccacgtcgactccaagcacgactactggaggctagcactctgcagctgntcacagtgcatcc

SEQ ID NO: 635 - DNA, 1250 bp, Glycine max
  Peptide Sequence Number=SeqID_8918
  Probeset Number=SeqID_10414
aaagccgccacaagagacaaaaagagcgatccttgttctcatctcctccggtctccggcgagcttcgtcggtgccgtgaggaggtcttttgtctagttttctggtttagtctgactgagatgaagcttttgagagtcaggggagtcttggatttgggattcttcttcgatttcatcctgtaggttgcttgggctgccttgtctcgatccgtagctttttctggtgtgcggtgcaggttataccgactctgatgtggggtggtacttcttccatcggatcttgtgaggcggagctcaggtatatcagtggctggctttcgtgtgtttcctgcctttcgacttcgttttggtgtttcgaaagttctcaatctcgggtagtttgtagctgtgtgtgtcttgttgtagctctgtgtccaaatcctctcgatataagttcggttctgcatcaaggtcgtcgcttgaggggcgttcttgtggagtttcaggttgagatttccatgtggagacaatttgagagagtgtagaggactctgctgtaaggttgttggaaggaggagtttcagttgtctttggtcttgtggagtttgtttggtctgtggttccgttggaagacgtcattaccggtgctatcgggtggttatttctgctcttgaagtgggttatgcttggtctttcttgaggcggctgtttctcattgtttttatcattggtaagtccacgtggttagacctttgttcttgtttgagttgacttcagttggtgaagctccggggtgtggaagttgtgcagtcccttggtttgaaaccaacgggttttccggatttcctggtaaggggctgtggagcattagctcaattgcgtgcagtctttgggtagttcattgcctaccatcgacttctttggctgctcggtttgaagatatgtttctcttgtggcttcttgttgatgaagcagttttatgtgtggtgttggagcgtttccctctggtgattatgctcgtggagatcatatttcaaactcaaataattagacgtgcatcgctttcattttcatctcttcttccggctcggtttagcttctcctttcctgcagtttatcgtgtatctccaccatgctcttcctcaacttttacttctttctttagtctggtttatgggtgtagtgtatgtgtatgtgtaaaactttgtctccggatggtgcctatcactttgccggcttttggctccaaaaaggttgcatacctttgttggc

SEQ ID NO: 636 - DNA, 586 bp, Glycine max
  Probeset Number=SeqID_10415
catggcggatcaaacaccagatgagatgaaggaggaggttccggattttgttgcttttgatcctgccaagaagaacaagaagaagaatattacaattgttgatcctgctgatgaacctgtggaaaaattggctgagaagactgagaactcgtcattttccagaggggttgagactgcgtttactggtttgaaaaggaagatgagcaggcgtgttgaagtgggtaacttgaatgatgagagtggagatgcgattgaagatttggatgatcagcctgagtatgatgaaggagaaatggttgttccccaggctcgttatccttgggaacggagtgatcgtaactatgaatatgaggagctgcttggcgtggtagggaacatactacgtagtgacaatcccgaccttgctggagatgagctaatgacaggtatgatggctctcctggttcttcgatgcgtgccctagattgctgtccgttatactatgatggatctatgcactacgatgcatagtcgactcgactaggtcgtgagcttctagcttgcagcttagttcagtcgtgctcctctgggtacgactcgacgattg

SEQ ID NO: 637 - DNA, 593 bp, Glycine max
  Peptide Sequence Number=SeqID_8919
  Probeset Number=SeqID_10416
caactacaacaactacaactcttccctctctccttaacactgtttcatgcaaaaccatttctagggttttcggttttctcgccattcttcaattctcgcgctccggcatcgcttcgccatggcatttccgaccaagaagctcatcgacgaccccaatgcattaggctttgactgaatcgcaccgtgctttaaatgacggaaatcgctgctcgagttcgtaatatttgatgtgaaatgttgtagaattgattgcgatgatttcctgttcatctagctgttttagttcgaagattacgattcaatgtgagaatgttgtgactgaattcattgaaggtcttgtggagacatatcctggactacagtatttagatggctttcctcaggtgaaggttgtcctacgtgcagatgtttcagctgcaacatatgataaagttgcaatcatatcagggggaggaagtggccatgagcctgcccatgctggatttgtgggagaaggaatgcttaccgcagcaatttgtggagatatattttcttctccacctgtcgactcaattctagctgggatacgagctgtgactggtctaagggatgtc

SEQ ID NO: 638 - DNA, 1879 bp, Glycine max
  misc_feature (8)..(8): n is a, c, g, or t
  misc_feature (29)..(29): n is a, c, g, or t
  misc_feature (36)..(36): n is a, c, g, or t
  misc_feature (49)..(50): n is a, c, g, or t
  misc_feature (78)..(78): n is a, c, g, or t
  misc_feature (83)..(83): n is a, c, g, or t
  misc_feature (86)..(86): n is a, c, g, or t
  misc_feature (96)..(96): n is a, c, g, or t
  misc_feature (115)..(115): n is a, c, g, or t
  misc_feature (147)..(147): n is a, c, g, or t
  misc_feature (274)..(274): n is a, c, g, or t
  misc_feature (286)..(286): n is a, c, g, or t
  misc_feature (344)..(344): n is a, c, g, or t
  misc_feature (356)..(356): n is a, c, g, or t
  misc_feature (382)..(382): n is a, c, g, or t
  misc_feature (431)..(431): n is a, c, g, or t
  misc_feature (461)..(461): n is a, c, g, or t
  misc_feature (463)..(463): n is a, c, g, or t
  misc_feature (548)..(548): n is a, c, g, or t
  misc_feature (656)..(656): n is a, c, g, or t
  misc_feature (683)..(683): n is a, c, g, or t
  misc_feature (739)..(739): n is a, c, g, or t
  misc_feature (790)..(790): n is a, c, g, or t
  misc_feature (805)..(805): n is a, c, g, or t
  misc_feature (811)..(811): n is a, c, g, or t
  misc_feature (813)..(813): n is a, c, g, or t
  misc_feature (816)..(817): n is a, c, g, or t
  misc_feature (819)..(819): n is a, c, g, or t
  misc_feature (835)..(835): n is a, c, g, or t
  misc_feature (842)..(842): n is a, c, g, or t
  misc_feature (844)..(845): n is a, c, g, or t
  misc_feature (850)..(851): n is a, c, g, or t
  misc_feature (857)..(858): n is a, c, g, or t
  misc_feature (860)..(860): n is a, c, g, or t
  misc_feature (881)..(882): n is a, c, g, or t
  misc_feature (891)..(891): n is a, c, g, or t
  misc_feature (898)..(898): n is a, c, g, or t
  misc_feature (919)..(919): n is a, c, g, or t
  misc_feature (985)..(985): n is a, c, g, or t
  misc_feature (1040)..(1040): n is a, c, g, or t
  misc_feature (1112)..(1112): n is a, c, g, or t
  misc_feature (1205)..(1205): n is a, c, g, or t
  misc_feature (1232)..(1232): n is a, c, g, or t
  misc_feature (1293)..(1293): n is a, c, g, or t
  misc_feature (1418)..(1418): n is a, c, g, or t
  misc_feature (1509)..(1509): n is a, c, g, or t
  misc_feature (1519)..(1519): n is a, c, g, or t
  misc_feature (1533)..(1533): n is a, c, g, or t
  misc_feature (1540)..(1540): n is a, c, g, or t
  misc_feature (1551)..(1551): n is a, c, g, or t
  misc_feature (1563)..(1563): n is a, c, g, or t
  misc_feature (1566)..(1566): n is a, c, g, or t
  misc_feature (1605)..(1605): n is a, c, g, or t
  misc_feature (1611)..(1611): n is a, c, g, or t
  misc_feature (1632)..(1632): n is a, c, g, or t
  misc_feature (1662)..(1663): n is a, c, g, or t
  misc_feature (1679)..(1679): n is a, c, g, or t
  misc_feature (1693)..(1693): n is a, c, g, or t
  misc_feature (1701)..(1701): n is a, c, g, or t
  misc_feature (1747)..(1747): n is a, c, g, or t
  misc_feature (1750)..(1750): n is a, c, g, or t
  misc_feature (1755)..(1755): n is a, c, g, or t
  misc_feature (1765)..(1765): n is a, c, g, or t
  misc_feature (1771)..(1771): n is a, c, g, or t
  misc_feature (1774)..(1774): n is a, c, g, or t
  misc_feature (1779)..(1779): n is a, c, g, or t
  misc_feature (1781)..(1781): n is a, c, g, or t
  misc_feature (1794)..(1795): n is a, c, g, or t
  misc_feature (1814)..(1814): n is a, c, g, or t
  misc_feature (1817)..(1817): n is a, c, g, or t
  misc_feature (1821)..(1821): n is a, c, g, or t
  misc_feature (1823)..(1823): n is a, c, g, or t
  misc_feature (1828)..(1828): n is a, c, g, or t
  misc_feature (1831)..(1832): n is a, c, g, or t
  misc_feature (1835)..(1839): n is a, c, g, or t
  misc_feature (1844)..(1845): n is a, c, g, or t
  misc_feature (1852)..(1853): n is a, c, g, or t
  misc_feature (1856)..(1857): n is a, c, g, or t
  misc_feature (1859)..(1859): n is a, c, g, or t
  misc_feature (1864)..(1868): n is a, c, g, or t
  Peptide Sequence Number=SeqID_8920
  Probeset Number=SeqID_10417
tcgcgcanggttccagtatagtagatatntggagcngtgtactcgaganncaccggacgtatcagacgtacatagtanctgtngantcgtcatagnggggagggagtcagctcancagatacaaagtcagagaggtagatgagagtnttgatgtcagatcagtacagagcacagtacatatcgcatcatctgtcgacgcaggtgtgtgtcagagatgagttgcagtcgacgcactcacaacatgtagatagacggtgcgataggagtcgtgtgntggcagaacgantgtagctatgtatcatatacgatcacaagatcatcgatacgatacgtaagagagggtntagtagtgtgtngcgaacgagtagtatatgttatagcnggtacactaaaatacgcgcggagacagacagagaatgaacagagagcgnaggaagtgcgtctcactaatgtatagagtngngactggctgcgactaaaggtggcgtgactatagattgtttcatacgcagtgcgataggagtggaggtagtagatagaggagttantctctgccgtaggatgtctggcagagtcgacggtatgcacgcgctcactcgtacgaatagtagcatctcgttcaagagtcatagctcacagagatgtaaggacagcanaatgtctaagtattaagagtatgatgngggagtggtgtgtagagagagcgcgcggagagacgtcatacatctaatagagtggngcgtgagagagagatggtaacaatgcgccacgtggggcgcgagtacaagangaaggtcttcgatgntctggntnttnntntttaattgcatgattntcgtcgntnnttttnnttattnntntttttctctctcatatttgtnngcttacccntacaatnttcaatcatcactttatcttnactacctcagatcgaccacatcatcatatatgtgagctgatggaatatcgtacctgagccataganaagagtgcgagtatgctcatgcgtgcctgacacctactcacatatagcctaacancacgacgcacagaacaacgtttgctgagagagacatatcgtgatggcgaccataatcatgagatgacatctnctcgaccatcgaggactaaggagtagcgaatatattgatatggaagggacggcacgaagtacttgctatatcagtacgtgtgtaatggaggtnagccgcgacaatcgcagcgagggggcnctattctgtgtatcacacgtatgcaatgactaagacaatattgcgcatactgtcagtgagnggtaggtgatgcagatgtatgagcattaagaattatatagcgatgtgagatgtggagagctatcgagccaccagagtggcgatacattctcgcgctacgtgtaagggtgaccgacgagcatgatntatctatagtctatcgtgtactcgacatcagtctgccgagaggtgcgtgcgtgagagagagtgtgcatagcatcaggttgcatatctagangacagagggngtaatagtcactancagcatngacgatcgatntagagccacacntcnatcacctataactatcttatacatacgatgaccagtagnagtatntacgaaatcattacacatatngtgtgtacattaactacgcacgacagaganncagtggacatatcatncacacatacatganagtgtaanccacacagacctagcatcgggagcggcgagaacggacactcactangtnaaacnagcgaatatnaggggnggnggggngngggctggcgcgannatcggcgtatacacgaagnganaaananatacnaannaannnnngcacnnccaaccnnccnnanggccnnnnntttttttaaaa

SEQ ID NO: 639 - DNA, 1522 bp, Glycine max
  misc_feature (67)..(67): n is a, c, g, or t
  misc_feature (208)..(208): n is a, c, g, or t
  misc_feature (419)..(419): n is a, c, g, or t
  misc_feature (425)..(425): n is a, c, g, or t
  misc_feature (461)..(461): n is a, c, g, or t
  misc_feature (556)..(556): n is a, c, g, or t
  misc_feature (663)..(663): n is a, c, g, or t
  misc_feature (775)..(775): n is a, c, g, or t
  misc_feature (1054)..(1054): n is a, c, g, or t
  misc_feature (1103)..(1103): n is a, c, g, or t
  misc_feature (1345)..(1345): n is a, c, g, or t
  misc_feature (1357)..(1357): n is a, c, g, or t
  misc_feature (1371)..(1371): n is a, c, g, or t
  misc_feature (1413)..(1413): n is a, c, g, or t
  misc_feature (1484)..(1484): n is a, c, g, or t
  misc_feature (1519)..(1519): n is a, c, g, or t
  misc_feature (1522)..(1522): n is a, c, g, or t
  Probeset Number=SeqID_10418
gggcggccgctccttctttccaacacgactacgggcgtcacaatatggaagacacctctggcggtgncacaatatctatacattatcttgttgtgttatgaggggtgggggtgaggcggaacacgggtcctacacaaactaggcggggggtcgcgcccgaacaggtggcaaaagtaagttactcatttatctatcctctgttgttatntactctaatatggcgtgtctcactacgggggagataaaatagagccataactgcttttggtgtccactgacagctctcaactacaccattgtgagatgccacccggggccctcactcattcaccttaatcaacaaagtaattcatatttggatacataccttctgtttactaatatttttgtgtgtctctctccttttgtgctgtttgtanctctanctcttattatacttgtgcgccgtaacatcaacaacnacgtgaatctatactcgtcgagatagaaaacacaatacatactactccaccatccttgtgcataccacatacacctctctctctccgctccaccncatatactgtgtcttcataacctcggctgttgtacactctctatccgtaacgtgtacaacacaacaccacttgctgaagatcagctacattgatgtggtattattanaacacttaccagtctcccacacaccatatatttatgtgagtacgcccacactctaccttccggggcgtggagtatacactctgtgccgttgtgtgacatatatagctagggnggcactacatactacgcgccttcacacccacaatcaccaataatgtgtgctgattatataatatatcgagaacttgagtggtgtatataacaactcacaccctctgctgtaactatatgtatatagatacataaccacccaactcgaccgtacatccagcgtgggtgcggcccactcgcacagatcttcacgattcctcttcctacttacttcgttgctcaactcctcactacaacagtaatgtgtgtggacaccacaacataacaatcgggatagtantatccgtcactaccaacgcatcttcaggagccacaactcatcgctctantcttcttctctatatcctctcactcatacattcctatacatactgctgacaacatcaaacaaccaccacaccacaatcagcaccgctgtgtgtgtgcgttgctctatcgtactatactatctgttgtagtgtaaatcttatctgcgctctcacacaagccacgtgtgtgctgtctacacacataccatatgcgtggtgatgggccatacatacacaccacgcgatcgcgtggacacattctntgttgctcagcngtatctccacaatncattagagagtgactaccataactacatcagctctacgaaangacacacactacgcagacagctgtaacacaaacataatatactgtgacacatctacgcactacgcacgctnaccacgtgactttcagtatcccactcgccatcaantcn

SEQ ID NO: 640 - DNA, 1190 bp, Glycine max
  misc_feature (1)..(374): n is a, c, g, or t
  misc_feature (1190)..(1190): n is a, c, g, or t
  Peptide Sequence Number=SeqID_8921
  Probeset Number=SeqID_10419
nnnnnnnnnnnnnnnnnnnnnnnnnnnnnnnnnnnnnnnnnnnnnnnnnnnnnnnnnnnnnnnnnnnnnnnnnnnnnnnnnnnnnnnnnnnnnnnnnnnnnnnnnnnnnnnnnnnnnnnnnnnnnnnnnnnnnnnnnnnnnnnnnnnnnnnnnnnnnnnnnnnnnnnnnnnnnnnnnnnnnnnnnnnnnnnnnnnnnnnnnnnnnnnnnnnnnnnnnnnnnnnnnnnnnnnnnnnnnnnnnnnnnnnnnnnnnnnnnnnnnnnnnnnnnnnnnnnnnnnnnnnnnnnnnnnnnnnnnnnnnnnnnnnnnnnnnnnnnnnnnnnnnnnnnnnnnnnnnnnnnnnnnnnnnnnnnnnnnnnnnnnnnnnnnnnnnnccccttagggtggggggggggggggggcaaaatttctccccccccaaagaagtgttttttttttttcgctgcgcccccgttttgggtcctttatactggtaaatcagaaagggcccctcccccgggggggggggccgtttaaagtaaattgatccccctattgggggcggttgccgcaataacccacttgaatgggggggggttgaaaagtgcggtgttcttttgggggggggtttttgttctcctattcccccaaaagggggccccccccgccacaggtgggggttgacgatgcctttttggggtctccccggggtgggtttttggctgggacccccttttcgttgagaggcgcgcctggttattgcggctttgcgccaatggtggtttccgggcaaggttagggtggggtgggggcggaacctttaaacctttccccggtcgttgggcattgggggcatgtgatgcattcctttccgttttgctagtggtgccatcggggtcctgctgatcaaggtgctgtgggttccggcctgcctgtgttcgtttggctttttcgtgtatgtgctatcatattgtcgcctgtaattgttttaatatgtatttcggatatggccggccgtcgtgtgctgttcgttcttgtgttcattatatcccgtgctcgcgtgtgagcaggatgtgtgcgtttgtttcagttattgtacctattttggaggccgtggtggctcgttgcgtctgtggtcacttttgtatttatgtgaggtcgcaaaaaaaaaaaaaaaatgtgtttgggggtttttataagtatttggtttn

SEQ ID NO: 641 - DNA, 517 bp, Glycine max
  Probeset Number=SeqID_10420
tttttttttttttttttgaactaagaatgacagttaaccttaataataaaaaacaaaagcaactcccaaaaaatcccaaaaacttgtggcttaaggtttgtctctaagctcgaccgctaattttgggttaaattagttttttttttctttactttattattttagttcaatttaatcctttaatttttcatatttaactaggttctctaatttttaaaaagaatttgatttgatctttgtcatccattttgtctaactaagttaagtttatatccgtttaagtgaaggaaacatcaacaactacctagactctaccgtttaacaattttgatagaatggacgacaaagatcaaattaaacccatagaacctaattaaatcggtaaaactaaaagatcaaattgaaccaaaataataaattaaatgacaaataaactaatttaacccttgttttattttgaaaaaaattagctcaccttcaaatgcactagccccgatatcccatgccaaccccgctg

SEQ ID NO: 642 - DNA, 1603 bp, Glycine max
  misc_feature (1)..(1): n is a, c, g, or t
  misc_feature (10)..(10): n is a, c, g, or t
  misc_feature (22)..(22): n is a, c, g, or t
  misc_feature (28)..(28): n is a, c, g, or t
  misc_feature (34)..(34): n is a, c, g, or t
  misc_feature (39)..(39): n is a, c, g, or t
  misc_feature (70)..(70): n is a, c, g, or t
  misc_feature (82)..(82): n is a, c, g, or t
  misc_feature (301)..(301): n is a, c, g, or t
  misc_feature (321)..(321): n is a, c, g, or t
  misc_feature (360)..(360): n is a, c, g, or t
  misc_feature (449)..(449): n is a, c, g, or t
  misc_feature (549)..(549): n is a, c, g, or t
  misc_feature (600)..(600): n is a, c, g, or t
  misc_feature (679)..(679): n is a, c, g, or t
  misc_feature (783)..(783): n is a, c, g, or t
  misc_feature (1143)..(1143): n is a, c, g, or t
  misc_feature (1183)..(1183): n is a, c, g, or t
  misc_feature (1186)..(1186): n is a, c, g, or t
  misc_feature (1220)..(1220): n is a, c, g, or t
  misc_feature (1266)..(1266): n is a, c, g, or t
  misc_feature (1479)..(1479): n is a, c, g, or t
  misc_feature (1494)..(1494): n is a, c, g, or t
  misc_feature (1545)..(1545): n is a, c, g, or t
  misc_feature (1549)..(1549): n is a, c, g, or t
  misc_feature (1553)..(1553): n is a, c, g, or t
  misc_feature (1601)..(1601): n is a, c, g, or t
  misc_feature (1603)..(1603): n is a, c, g, or t
  Peptide Sequence Number=SeqID_8922
  Probeset Number=SeqID_10421
ntctcccacncccggacgtttntacaanctttangcganactcacactcaatgcgctctacgagactcangacatcgtcganaactagacatataaactacgcataacacgcacgttacatcatccctattctatagttatctgtaattagtatatacagcaatagaagctctgtatctgagtgctgtgctctctcgcgttatgttgtgtaatactacgaacatatcacactcctcacaacatatatcgagagtatatacacacgtcccgcgtctctggctgtcattatgactctccgctnacacctcatacagctccgcncgtccctgacatctaatccgcgggctgtcgttctagacnataatatatcattacttctatttgtcgtcttacatttttgttatattatatcatagtctatcacacttcttcaatgcaccctctcatcnctttatattctcacgtgatcaatcatctcactgagctacgtgagaccagatcatatagcacgagacactataatcgagccgtaccgattagactacatantcgtactactgaacgatcaagatggatcaccacccaatcctcacatctagnataccacctagcgccactacctacgataccatctaaacttcgacatacccctcctctgctcatcacacacaccatttanctacatatgacgtactatattgcgacgatccccactaatacagcgcatgtactttctctacgacgattacactctacttcatttctgtcctactatactatacncacagcgcaatgtatatacgccactccatttcgtatatactctctacgcgaccaccacatcattcgctacgccattcctttattatgattgcgacatcacacacacagccactcactacttgtacctcgagattatacatgacactccgcatgcgtgatccgtcgactaacctctcactctatatatagtctttctggtatctattttctctaacttgcaagagtttcatctcgcacgcgctgacataagatgatactcgactccgccgcgctccctcactcgtgcatccgtcacacgcgacacacatgaccaacacatcacatagcacatcacgactcatatatgtctcacttcattanatgtgtgcatcatatctgctctgagtactgatctacagancanatcagtgtaacctacacataacacgaatagatantctgatcatgtctaatcctatgcagatatccgctctacgttgttcngatgcgagaagatagctaaacatctcatgatgcactgctcatcgtttctatggctgcgtgtgtctatatatcatatcctgctcactatacatctgagcatatgtatgctattatatgtatctcaatcacgcgcgatatgaatatctcacttatatctacatgatgatactatcgtgtatccatctcacataatccgcagtatatacacataantcatatacatgcgtngttactgaccatacacgcagcatctctgctagtattactacttcgcgtcantgantctntctacgatgtgtacactagtgactctatgctctcgaccatcacgcctncn

SEQ ID NO: 643 - DNA, 506 bp, Glycine max
  misc_feature (461)..(463): n is a, c, g, or t
  Probeset Number=SeqID_10422
gtccctgtaagtcacatgttgcgttctcaacgccagccacacacctgtgattttcaactcgtatcactgcctgataaagatacccgtgaggcatttttgattgttgcagcgttgttgatgacagtgtcatttacagctgcttttactgtaccaggaggtgtatatagctctgatgacccaaaccctaaaattagaggaactgcagttttttctggtaaaccaacattctggatattcaccatcgtcaatatcataactatgtatagctctgcattggcatgtggacttctgtctatgggaatatttcgtcagtctgaattatctcgtacaatttcttttccgctcttgtgtatgatgcttgcctttctcatagcaccagtggcctttacgtctgctgtagttctagttgtggccaataacactttactcaaacgtgctgcatggctcattggagccttgtnnngtttactcaactattttgtattaaaagaatttcgagcaaatga

SEQ ID NO: 644 - DNA, 352 bp, Glycine max
  misc_feature (245)..(245): n is a, c, g, or t
  Peptide Sequence Number=SeqID_8923
  Probeset Number=SeqID_10423
gcacgagggcagtgcagtggttctactactttgcttcttgctgcttcactctcagatggctcatgctgccacctacacagttggagattctgggggttggacctttaacactgttgcctggcccaaaagaaagctctttcaaactgataacacacttactttcaattatagccctagaactcacaatataataaccgtaaacaaagctaaatataatagctacaagactccaagaagagccaaantatataagtcagaaacaaatcagatcagacttaccaaaggacagaactacttcatctacaattatattaatcactacgagtctgagataaaaattaccatcaacact

SEQ ID NO: 645 - DNA, 728 bp, Glycine max
  misc_feature (699)..(700): n is a, c, g, or t
  Peptide Sequence Number=SeqID_8924
  Probeset Number=SeqID_10424
atcgatatctatatatctttctatatatcaaaaattattgtcacgtcgatctaaattacacttgcttttggtgattctcagtacaacatgagtagacctgttgaatgctctatggtcaatgtattctgctgttctcttccttggattcaaaatgcgttactctgtacagccagcgctagcatgatgaaagaactgtcttttatagagaagaagctgacggaatgtatactgccttaccctatgcattagcacaagttatggctgagataccattatatcttccctcaagctgagacatacggatcaattgcttatgccatgatcggatgtgacctggactgcttcagaaattctcttaggcatctattgttcagctccttctaattgcctgactttactatctacggcatgatggctgagggagtgacgccaaaccaccatgttgctgccattgaggctgctgcattttatgcagtatggaatctcttctaaggatttatcggctgaagagctagaatgcacgtgtgacggacatggtactattgggcatgtccatgggctgggaccttgtaaggatcgattgctgctcactgtggagacataactgagagaatgccgcttgacgatagcttgatggtgaaagagttatagaagacatcttggcctaaaacatgactccattgaaatctgtgctggagnnggtgctggcatcgccgttgcctttgcat

SEQ ID NO: 646 - DNA, 419 bp, Glycine max
  Peptide Sequence Number=SeqID_8925
  Probeset Number=SeqID_10425
gtaagctagcaatgagtctggagggcgggcataatcagaggctagcaactcaagcctcaacaattggacgtctaaataaccctatcgagaaagtgaagggtccagctcaagtttatatagcgggtggcgtaggcacttttatcttgttaagcagacaaaaaggaagatgatccttttcgcaaacccacaccagggatgttgcatattatggagcaacacttcaactctggcatcgccattgatatggatcaatccttttatgctggtgatgcagccggaagagaatcatatcacaacgacgctgttattaaatctgcaaaggccattggcttaaaatctcatgtccctgaatagtacttcacctgagcatctaatttagtccttgggtcataggaacgctcacgtgtactttaccagct

SEQ ID NO: 647 - DNA, 1679 bp, Glycine max
  misc_feature (1)..(1): n is a, c, g, or t
  misc_feature (59)..(59): n is a, c, g, or t
  misc_feature (67)..(67): n is a, c, g, or t
  misc_feature (84)..(84): n is a, c, g, or t
  misc_feature (131)..(131): n is a, c, g, or t
  misc_feature (161)..(161): n is a, c, g, or t
  misc_feature (200)..(200): n is a, c, g, or t
  misc_feature (210)..(210): n is a, c, g, or t
  misc_feature (240)..(240): n is a, c, g, or t
  misc_feature (281)..(281): n is a, c, g, or t
  misc_feature (481)..(481): n is a, c, g, or t
  misc_feature (505)..(505): n is a, c, g, or t
  misc_feature (606)..(606): n is a, c, g, or t
  misc_feature (615)..(615): n is a, c, g, or t
  misc_feature (644)..(644): n is a, c, g, or t
  misc_feature (660)..(660): n is a, c, g, or t
  misc_feature (666)..(666): n is a, c, g, or t
  misc_feature (668)..(668): n is a, c, g, or t
  misc_feature (677)..(677): n is a, c, g, or t
  misc_feature (813)..(813): n is a, c, g, or t
  misc_feature (980)..(980): n is a, c, g, or t
  misc_feature (1012)..(1012): n is a, c, g, or t
  misc_feature (1031)..(1031): n is a, c, g, or t
  misc_feature (1332)..(1332): n is a, c, g, or t
  misc_feature (1422)..(1422): n is a, c, g, or t
  misc_feature (1524)..(1524): n is a, c, g, or t
  misc_feature (1601)..(1602): n is a, c, g, or t
  misc_feature (1612)..(1612): n is a, c, g, or t
  misc_feature (1614)..(1617): n is a, c, g, or t
  misc_feature (1619)..(1621): n is a, c, g, or t
  misc_feature (1623)..(1624): n is a, c, g, or t
  misc_feature (1627)..(1628): n is a, c, g, or t
  misc_feature (1631)..(1633): n is a, c, g, or t
  misc_feature (1640)..(1641): n is a, c, g, or t
  misc_feature (1647)..(1647): n is a, c, g, or t
  Peptide Sequence Number=SeqID_8926
  Probeset Number=SeqID_10426
nagtgtgtgtatcagtagtatgtcgactgtagtcgacctgatctagatatctgtagcantctcctgnttcgcagacgaacgcanatcactgaaggatcgctacaacgagtgcaaccatagcatcaagcagnactctctagtaatgattattgtgtagtttncatcatagcatgatatgtgtgcgtgtgtctcagtatagngtatattagngatgtgagtccaagctcgtcgtcgtcatcntacagttacacgcacatacaactacaagacacgatcgctcncgtgactgccatcatctgttgcagagcacaagtcatactcacacactagctacgctgagctggttgtcataacgtgtcgtgagtggcggcctactgcgaaatgcgggtagatgcgacaagagacagacatagagagaggagcgagagcacatgtatagctatccgactcttctacagtgataggggagtcagcgagactngtgtcacacgagagtgagaggccncgagcacacagatgcgacgatatgttcatagcacaacatgagagcatcaggtgtgccggcgtgctagttcttcgcccttcgtacatccttcccatcacgcncatgctatncctatctctctcctccctatatcctctcntgttagatatgttgtntcgctntngagttatgngggtggtggtgtggtggtgtcgctagcgacgaacaaaactcactacatgtcgtgtctcatatctcgcaactctcccttagacatacatataatatactacgtacacatataaccaacaccaggctagtacagcgcnaggagtctacaacgacttactcactaaagccggtcacgccaaagtcgcacatcatcatccatcacatctctctattgcgtaatactcaactcactaatttcctactgcatcatgtgttgtagtagtgttgataatctctattagatgctttatgttattggtgatgngagttccgccatggctgtggtttcgccatacnactccacccgaacacactncagaggcttcgttcttataatcctcttctcttaatttcctctatactcaagataaacacaagcgctgggtgtgtgcggtgagggattacgactattagtagttggtatatacaagattggctcgtatagtggtgtaatatattgccttcaggcaccctcctcatttctgccttattagagttgttgtgaatcatttctcttgacatatatacaaactctacacccccgattcatgagaccaacttaaaagagaagaatctatacatagttaataaactaacaagagaaagaataagagacnaaaggaatagttataagcaaaggcgacgtcccgacagaggacgttgacgggtcgcagcgacgcgtcacagtgagagatgcgagcgagctnagagatgaagagggagggttatttgtgttagagtgttgatgttgtcacacctccacacttacacctcatgacgacttacgcccaatgtcctcgtcgcgcagntgtcgcgcggcgcgcagttggcgcaataacataagatattatgtatagacagaggtaatatataaatatatatattnntaatataaantnnnntnnncnnttnntannnccacgcnnacaccnccccccacccccccacccaacaaacaaacaca

SEQ ID NO: 648 - DNA, 421 bp, Glycine max
  Probeset Number=SeqID_10427
ttttccgacggaaaaaccaaggaatctcctccactatgctctctctatactcctcctctaccatcaaagcctcttttcattcttcctttcctcctctccgatcatcaccaccaccactctccgttggatctcatatccggctcgttaagcgagatcactccgtagccgctgcttctggtggtgtctcgatgtcaacgaacagagattctcacggatcgtcctcgcaggtcgctgaaccgtttttcagaagcgttttaggacagatggaaacggtttacctaaaccggaacccgacgcctagatcagtcttggagcttgtcagatccgttgatgacgagcagctttgctatgatcatctcgctttcaggacctttgggattggcggttatgggattgactcgcttgcaagcttcttccttga

SEQ ID NO: 649 - DNA, 509 bp, Glycine max
  misc_feature (448)..(448): n is a, c, g, or t
  misc_feature (451)..(451): n is a, c, g, or t
  misc_feature (470)..(470): n is a, c, g, or t
  misc_feature (503)..(503): n is a, c, g, or t
  Peptide Sequence Number=SeqID_8927
  Probeset Number=SeqID_10428
attactttcatttcatcagtcgctgcctcgcctctcgcatctcttttacagcccttgcttcagcggagagcagcagcaaccagtagccatggctgaacagactgagaaggcttttcttaagcaacccaaggttttcctaagctcgaagaaatctgggaaaggaaagagacctggcaaaggtggaaaccgtttctggaagaacattggcttgagtttcaagactcctcgtgacgccattgacggaacttacattgataggaaatgtccattcactggaaccgtttctataaggggacgtatcttagctggtacttgccactctgccaagatgcagcgaaccatcattgttcgcaggaactatctccacttcgtcaagaagtatcaaaggtatgagaagagacactccaacatccctgcccacgtctcaccctgcttccgtgtcaaaganggngatcatgtcatcattggcnagtgcaggccgttgtcaaagacggtgaggtcantgtgct

SEQ ID NO: 650 - DNA, 206 bp, Glycine max
  Peptide Sequence Number=SeqID_8928
  Probeset Number=SeqID_10429
gcatgcctgcagattatactttaatcccatagaatatggcagtgactctaccacccctttgccagttgtaatagacaaggtgtatgagtctgatccaatggactcaaggagatcattatacatgaatgcagcgtagtgtggaggatcaaccatgttctaggatactcacaggaggttgcaacgtgatctaattaaaagacacgatg

SEQ ID NO: 651 - DNA, 298 bp, Glycine max
  Peptide Sequence Number=SeqID_8929
  Probeset Number=SeqID_10430
gccggctggtcatgggttgagatcccgcaccaggaattccttctcttgtcctttcgcgaagaatggaaccctctccctcacctcatgcctgaaaacctaccacgtcggcgactctgtcgacttcaagggtgacggtgccggtcacaagggaatgccccgcaaattctaccatggcctgaccggacgcgtctggaatgctaccaaacttgctgatggcgtgtacctcaactagcacgttggcaacacaattctcaggaataggattcctgtgcgggtagagcatgtgatgccttcccgt

SEQ ID NO: 652 - DNA, 460 bp, Glycine max
  Peptide Sequence Number=SeqID_8930
  Probeset Number=SeqID_10431
atccaatcccgattgaggctgtggggagcgagatcgcatcgactctccatccactcttgaaccctaatccaatccctatggaggctaaggggagcgatactgcatcgactccactccggaatcgagccacagagaggagcggccggttccatccagtgaagacggccggtgtgcgtccgtccacctgagttgagggatgggatcgagtccatccggtcgatcccagcaaccggaggagcgggatccgggtagagccgatccacgaacggcgctgctgctgctcgaggaccccgctctcgagccccctccacccctccctccacagctgccacagcgtgcgccttgcaatgttggcgtgtaggccatggcgcccgacgcccaactccgggccgccaccgcaagccgtcactcccaccaccgccttccccgcatcttcgtcgccatcctttggcttctgctc

SEQ ID NO: 653 - DNA, 349 bp, Glycine max
  Probeset Number=SeqID_10432
tcctcgattccaacttttccccaacctagcgctagctgaaggctctggcggcggcgagcgattcttggtccggcggcggcggccggctctcctgcctctccctcggtccctcccctcccctccatccggccatctcactcccctgccctcggcctccggcgcccagccctctcctccgcggctcccccaggcgccaggccaccagtccgcctccggcctcccgagcgcggcggcagcaacatccagcagtccggcctccgttcctcaacagccacaatacccggacgccggttggccccgccaaaacgcagctccccgccaacgcccctctctctcagctgccgacctc

SEQ ID NO: 654 - DNA, 215 bp, Glycine max
  misc_feature (99)..(99): n is a, c, g, or t
  Peptide Sequence Number=SeqID_8931
  Probeset Number=SeqID_10433
tcgagtcagctacgtaggccccccccacagacgtactggagcttccgttgaggccaaccccaaccaacgtcaataacggtgatgctgccatcgtcaagntcgttccctccaagcccatgtgcgttgagaccttcactgagtacccccctctcggtcgtttcgccgtccgtgatatgagacaaaccgttgccgtcggtgtcatcaagtccgtctcc

SEQ ID NO: 655 - DNA, 1394 bp, Glycine max
  misc_feature (30)..(33): n is a, c, g, or t
  misc_feature (35)..(37): n is a, c, g, or t
  misc_feature (45)..(47): n is a, c, g, or t
  misc_feature (82)..(82): n is a, c, g, or t
  misc_feature (87)..(89): n is a, c, g, or t
  misc_feature (97)..(97): n is a, c, g, or t
  misc_feature (99)..(100): n is a, c, g, or t
  misc_feature (102)..(102): n is a, c, g, or t
  misc_feature (105)..(105): n is a, c, g, or t
  misc_feature (140)..(140): n is a, c, g, or t
  misc_feature (145)..(145): n is a, c, g, or t
  misc_feature (175)..(175): n is a, c, g, or t
  misc_feature (211)..(211): n is a, c, g, or t
  misc_feature (821)..(821): n is a, c, g, or t
  misc_feature (886)..(886): n is a, c, g, or t
  misc_feature (901)..(901): n is a, c, g, or t
  misc_feature (921)..(921): n is a, c, g, or t
  misc_feature (953)..(953): n is a, c, g, or t
  misc_feature (1107)..(1107): n is a, c, g, or t
  misc_feature (1172)..(1172): n is a, c, g, or t
  misc_feature (1222)..(1222): n is a, c, g, or t
  misc_feature (1231)..(1231): n is a, c, g, or t
  misc_feature (1272)..(1272): n is a, c, g, or t
  misc_feature (1276)..(1276): n is a, c, g, or t
  misc_feature (1295)..(1295): n is a, c, g, or t
  misc_feature (1319)..(1319): n is a, c, g, or t
  misc_feature (1346)..(1346): n is a, c, g, or t
  Peptide Sequence Number=SeqID_8932
  Probeset Number=SeqID_10434
tttttgtttttcgtgtgcgcccggcggggnnnntnnntcttgctnnntttgcgcgctttgttgtgtgtggaggggttgtgtnccctnnnagttttgntnntnttntgtatggctttttctttttgttttggaatatttanaaaantcgattgtacaatgcgcgcgcggtggtagntatatatataaatgaccattattttccttttattantgtgtacggtgagagaacagaggacacacgtaagccccaagcgataaacaatgttatctctgcggagtgtgtgagacgaagacaagcgtctgacgaataccagtcgacggatgtatgagagtgattttggacgccgtgtcgataagatccgcaacccgccacgacgcacgacgcgaagcagagagttgttgtgagtagcgcgatggtacaaataaaaaagaaggtatgtagctgatttgtgttgcggcgtatctgttcacgccgacgtgtagtcgccgctgagagtgagatgcgggcgtgtcgagcagaataataaataaaggcactattaagcctaatgaggtgatgaggcgctgtgttttcgttcgcgccgctatcgaggaatgtcgtagtggtaactctgaacagagcgaagtagcgtgcggagcagggacgattgaagagagatacgtcaatacaccgctgcttggtcgtcgcagatgtgcgtgattatcatagtacgtacggtggcagcggacacaggtacgctgggtgcgagtgcagaatggttagggtgcggggcggctcgcgagcagatgatgatgccaagccggagctatacgtgcttgcnacgtgcttgtgggaggttagagagggtggatcggtaagacgcggatcgacgatggtcgtgagagnaggcatcatgcgacnacagtgtgtaagtgcggaantgagctgcctatcggacgtcgacacgccactnagaccgtgagccgtgcgcgctgagagtcggagagagtacgagaggagagtgatatggtgtagcgtgtatatagaagagagacgaggctcgcgtcgtgacgaggcgcggatgtgtcgtacgggtctgagtctatgcgggcgtatgaaatcgagtncgaagcgacgccgcgccgcggttaggctcgctgtacgtagtaacctcaccagacgtggagagatnaacagcgcgtagccgctcgctgattgtatgagaacaacgcgacgcgcgancgtgagagntagcgcggcattgataagtcgcgggcgaggtgagatctagncatncgcagtgattagtagtcgngcgacatgtcgcaccggacgtagnagcgtcgcgacgaagcgtgcgagacgnagaggaagcgcgcgcgcggacagagcggaggacgatcggaggcagacg

SEQ ID NO: 656 - DNA, 1676 bp, Glycine max
  misc_feature (1)..(1): n is a, c, g, or t
  misc_feature (25)..(25): n is a, c, g, or t
  misc_feature (31)..(31): n is a, c, g, or t
  misc_feature (39)..(39): n is a, c, g, or t
  misc_feature (43)..(43): n is a, c, g, or t
  misc_feature (82)..(82): n is a, c, g, or t
  misc_feature (88)..(88): n is a, c, g, or t
  misc_feature (111)..(111): n is a, c, g, or t
  misc_feature (160)..(160): n is a, c, g, or t
  misc_feature (162)..(162): n is a, c, g, or t
  misc_feature (189)..(189): n is a, c, g, or t
  misc_feature (220)..(220): n is a, c, g, or t
  misc_feature (224)..(224): n is a, c, g, or t
  misc_feature (258)..(258): n is a, c, g, or t
  misc_feature (294)..(294): n is a, c, g, or t
  misc_feature (327)..(327): n is a, c, g, or t
  misc_feature (369)..(369): n is a, c, g, or t
  misc_feature (421)..(421): n is a, c, g, or t
  misc_feature (442)..(442): n is a, c, g, or t
  misc_feature (489)..(489): n is a, c, g, or t
  misc_feature (507)..(507): n is a, c, g, or t
  misc_feature (531)..(531): n is a, c, g, or t
  misc_feature (578)..(578): n is a, c, g, or t
  misc_feature (593)..(593): n is a, c, g, or t
  misc_feature (634)..(634): n is a, c, g, or t
  misc_feature (645)..(645): n is a, c, g, or t
  misc_feature (687)..(687): n is a, c, g, or t
  misc_feature (710)..(710): n is a, c, g, or t
  misc_feature (750)..(750): n is a, c, g, or t
  misc_feature (827)..(827): n is a, c, g, or t
  misc_feature (842)..(842): n is a, c, g, or t
  misc_feature (897)..(897): n is a, c, g, or t
  misc_feature (903)..(903): n is a, c, g, or t
  misc_feature (968)..(968): n is a, c, g, or t
  misc_feature (1078)..(1078): n is a, c, g, or t
  misc_feature (1080)..(1080): n is a, c, g, or t
  misc_feature (1099)..(1099): n is a, c, g, or t
  misc_feature (1151)..(1151): n is a, c, g, or t
  misc_feature (1317)..(1317): n is a, c, g, or t
  misc_feature (1323)..(1323): n is a, c, g, or t
  misc_feature (1329)..(1329): n is a, c, g, or t
  misc_feature (1348)..(1348): n is a, c, g, or t
  misc_feature (1350)..(1350): n is a, c, g, or t
  misc_feature (1387)..(1387): n is a, c, g, or t
  misc_feature (1438)..(1438): n is a, c, g, or t
  misc_feature (1443)..(1443): n is a, c, g, or t
  misc_feature (1533)..(1533): n is a, c, g, or t
  misc_feature (1535)..(1535): n is a, c, g, or t
  misc_feature (1559)..(1559): n is a, c, g, or t
  misc_feature (1596)..(1596): n is a, c, g, or t
  Probeset Number=SeqID_10435
ncgcgtctgtctctgtcgctgtctnctcgtntcgctagntgtnagtataatcgttcagttgtttagcgtgtgaactaatcgnatgtgnttacagtgttcgtgagatcgtgncaccattcctcgcagatgacacgtatggcgtatggctgtgtgtgtgtananaatcatatatccgcgcggctctacgcnagtggagcgatcagcactcgacatccgctcntctncgcgcgacatctctcgtatgatcgtacagcctcngtggtcgcactacacgtgcaattgccacacgtgctntattacgacactgtgagcgcatactaacacatncacacacaacgtgccgcgataggtagcgagtccttacattcnctcgatattatactacgcagcgaacatcgcactctatgcacgtggcgtcatnagtgcgtgatgaggtgcatgncggtcaatataagtacgatagatgagttatatactttcatcttatcntatacaattcgattattntatgagatgatgatacgtagtgtntgctcttcgatcaggtatctcgatcgttctacgatagagatctagtncattcctacgatgangtgtgcgtgcgcgcccacacaccttatttgcagcgtacganatcacatatantatatatacattcattgacgtcgatgtcactgtgttgcacanataacgtcagcatgataatatantatgaacaggcgaagcgactgactgcgtcatcatgcaacnacttatgtagctcgtctatgtatcgtacactaagacgcgacatgaagagcgcacgcgaccacacctctgcgttgtantcatcatacatcacncatcatatctagatcgatgtgagtagtaatgtcgctatttctactcgtcattacntctggnatcgtgcgcggtgtgtgactgcactctcactcatacacgcggtctgacattaatagactgctgcntgcgagtatgtaggtagtgagcgatcgagcgatgcgtaggtaaccgtctatgtctatgtcatgtattctcgtatgtgtagttactctgacttgtctctcatatactctcntntaacgcactgtggtagtanatacgccggtggctacatcgacagaatatggctgaacgccacatccacattnataaactcactacaatatcatgacttacgcacacgtgagtgacacgtagtaagcagagagataagacaagagatcgaccgtagaggttgaggtctctattgctttcatcctagatacacgagagtatacatacacacctgcatatctatataatatactctttctnaacctnactctngataacatatcgtcgctgnangctcaacactctttcatatagttatatatatatatangataagatgtgttatatatcactctcataccttcagcctcgcgaaggagcngagtncgcagcgtagacagcgaccagcatattatgcgtatgtcgccgcgagccctagctagcggggtattataatataaagaataaacgaccggntnacagagggtgggggggggggtagncaggatctagataatactcgtgctatcgcgtcctcgntctatagctctgtgtaggaagtgatattatgattttaattaatcaactatattcttctatcatacattattatattataa

SEQ ID NO: 657 - DNA, 763 bp, Glycine max
  Peptide Sequence Number=SeqID_8933
  Probeset Number=SeqID_10436
ctctctatcttttttttttttttttgttttttggttgagatgtattgatacagatatggagagagagatattgacccttacccttctctatcgctcgctttcctttgacgcttctgacccttgctttgtctgcgtctttcttctggctttctttctatctctgagagacgcaatggctctcccagactcttctttccgtcgcaactccctgatcccctacttcatctactcctcttcctgcaaaacgctccctgtccaccacatgctcaacaccggctccgctgacgacgacgccgctccctacccgacgacggccaatctcgacgccggatcgcgtggcctcatgactccctctcccagcgagtcacgcaagatcgagttgtactgccccgccttctacgccggctgcaccgacggtggaatcctccactgtggcctcactgtcatgaccgacgctcctcccgacctagtcaagtggaatatgcacatcgaccctgctaagtacaagagcatctcggccggccctgggggtttgcttaaggagcagggattcaagggctattttcgaggctgggtgcctaccttgcttggttataacgctcagggtgctagcttatttgcatccatactacgtactttatgatagacatattctgatgttggttgccaacagaatctgatcgagaaccttaccttgatatactgtgctgattaaatttatggtccggccatggaatcaatagctctgtaaccgcttgagact

SEQ ID NO: 658 - DNA, 1601 bp, Glycine max
  misc_feature (23)..(23): n is a, c, g, or t
  misc_feature (410)..(410): n is a, c, g, or t
  misc_feature (568)..(568): n is a, c, g, or t
  misc_feature (1113)..(1113): n is a, c, g, or t
  misc_feature (1295)..(1295): n is a, c, g, or t
  misc_feature (1467)..(1467): n is a, c, g, or t
  misc_feature (1569)..(1570): n is a, c, g, or t
  misc_feature (1572)..(1576): n is a, c, g, or t
  misc_feature (1578)..(1578): n is a, c, g, or t
  misc_feature (1580)..(1580): n is a, c, g, or t
  misc_feature (1583)..(1584): n is a, c, g, or t
  Peptide Sequence Number=SeqID_8934
  Probeset Number=SeqID_10437
gagatgggagaacatagagcgtnctctcggtggttgatgttgcaaatgggcgtctcttcttaccgtagtgcggcatagttattatgtattcatctcacaataggtactccgaatagcgaggtgcaggtctcgttcgagcggcgagtctctgctgtctgatgcgatatatatcggttagtagacactctggcacgtgttttatgttctcgtgagtgatgtatttatgaggttataatggagtagagatgtgtgtgtgtgctgcgtggtgatcgacgtgagagcatcggtgagatatatagttagatttaatatagataggagtgagcgatatagcgacataaatgagagtatagaatggaaatatatacggcgattgtgaacatgcgcactgacagcgaattatagtattntcgtagtagatgtgtatcaactagtaatacctgagtacgacgatgtgcttagcatacatagatcagtgcagtttggtgtgtctgtgtgtcgcattgtgcgcgggggcatgtgggacagtagtatcataggccagtgagtgtgaagactttggcgcacncggtgaaggcagcagccaataaaataatgacctcgagaactgatgcatactataataataagttttatgactcggtggaacctaccgcacttgactatagagtcttgagaaggttagtcatcatacgcgcgctcgcttacatacatgaacgcaggcaagtcacacaggtagacatcgcggcctgctgtccctatctataccatacagaagccacggcgtcttgcgccccgacacttagtagtaggtccacccccgagaattcgtggtggggtggggtgccctactgctgtcgcttgcggtgcggtgtgggtcgacggggtcgataggtgtctaggataagcgcatctagacagcaaaactactaggaggagtaaaggtggtgacgctcaccccacagttgcactgctcagcgacggcgcgcgagtgcgcggcaaacgataacaatacacacactaaactcgcacccaccaccgcgcacgccacccgtacaattccatctctcatcatacctctagtcttttcacgagaacaacagagatacttgnagagggactggtggtcccggtctcgctctatagctataattaatgaagtgcataataggggggaagaagatccggtgagggcgcggtagaagtatagcagtaattacatccacataccatacataatatatatatataataaaattaccagaactagtatataataataatagttgttaatntgtcttatattgtttgcggagtggtgtgggagtttttttgtatttatttctttgtccccctattcttcgtcctccgcaacttgctggcacgcatactgtaacaatatttttatatgaagatggtggaggagcgcaacaaaacgcaaacacgcacagacaagcggggcgcctnccactctccctttcctttttcctccctctccttcataaaaacataatattattaatatccacatcatacctatactatcttctcaacctcctcagacgccannannnnncncncannccacaaaaaaaaccaaa

SEQ ID NO: 659 - DNA, 746 bp, Glycine max
  misc_feature (4)..(4): n is a, c, g, or t
  misc_feature (6)..(7): n is a, c, g, or t
  misc_feature (9)..(9): n is a, c, g, or t
  misc_feature (11)..(12): n is a, c, g, or t
  misc_feature (15)..(15): n is a, c, g, or t
  misc_feature (51)..(51): n is a, c, g, or t
  misc_feature (173)..(173): n is a, c, g, or t
  misc_feature (713)..(714): n is a, c, g, or t
  misc_feature (716)..(716): n is a, c, g, or t
  misc_feature (719)..(723): n is a, c, g, or t
  misc_feature (725)..(725): n is a, c, g, or t
  misc_feature (727)..(731): n is a, c, g, or t
  misc_feature (734)..(745): n is a, c, g, or t
  Probeset Number=SeqID_10438
acancnncngnnctnctttacggggtatttttcggtcatgtgaatgggggntaaggaggtgataaacaacaaaaaaggcttgaaaaaagagccaaatcaaaaaaaagtctgtgagctcgaccgtgtgtgattgatgttgacgcggaatagtagaaagttcacgctctggaagntgaacgctatttgtagcgccgtcaatgagccgtcacgtgttttcgacgcgtcaagagcgtgttttgggtggaaccggcggtggaaccacttaagccgcttcgaggggctggtccttgtctaacgcggctggagctcccaggtaccttgcagcgcgtaaatgggccttgcagagacatggggacgccagccgtatccctgctcaggtaccgcactggctcacgaccagccaccagcattccaacatcttcgccctgtcagacggctcaagacgcgttcaacatgggagtcgcgtcgagatggtaccccgctgacttggaccaagctcacagcttggaacaggggccaatttgccaacctggaaaaagcccggtcaccaagtgggttgtccgaacgtcattctcccttatcaatcagtaaacatgatcatcagcgcgtcttcccagtggagatcttacgaggcacagacgagaattgctccagctcggtcgttcggggcgccgggatgggtctcggagagggggggcccggtacccaattgnntnaannnnncntnnnnncannnnnnnnnnnnc

SEQ ID NO: 660 - DNA, 531 bp, Glycine max
  Peptide Sequence Number=SeqID_8935
  Probeset Number=SeqID_10439
gccgtcgtctctttgattgatctttgtgggaattggaaatggcggaatcaaaggttgtagttccggagtcagtcctgaagaagaggaagagagaggaggagtgggctctcgcgaagaagcagagcgctgaagctgcgaagaagacgaacgccgccaacaggaagcttatctacaaaagggccgagcagtacgccaaggagtatgccgagaaggagaaggagttgatctcattgaaacgtgaggctaagttgaagggaggtttctatgttgaccctgaagctaagctcttgttcatcattcgtatccgtggtatcaatgccattgacccaaagactaagaagattcttcagctcttgcgtttgagacagatattcaacggtgtgtttctcaaagtcaacaaggctacaatgaacatgcttcgtcgtgttgagccctatgtgacttacgggttccccaatttgaagagtgttaaggagttgatctacaagagaggatacggaaagcttaaccaccagagggtggctttgactg

SEQ ID NO: 661 - DNA, 638 bp, Glycine max
  misc_feature (2)..(151): n is a, c, g, or t
  Peptide Sequence Number=SeqID_8936
  Probeset Number=SeqID_10440
gnnnnnnnnnnnnnnnnnnnnnnnnnnnnnnnnnnnnnnnnnnnnnnnnnnnnnnnnnnnnnnnnnnnnnnnnnnnnnnnnnnnnnnnnnnnnnnnnnnnnnnnnnnnnnnnnnnnnnnnnnnnnnnnnnnnnnnnnnnnnnnnnnnnnnnggcgaggtacaaaagcggggtcaaccttgggggggaaagacttttttttgttcagaagggggccttccatttggaagggttcctcaaatcgggccaaggggtttttggtttttggagtttccgcctttgtaagggtccccttaggggtttttactgacattgggggattttttaaattttaaactgctgggggatcattccttgggggttttttttgcccccattttttttttgggccatgagggggggtatgtagggtttttttagatttgttgaaagttcaatttataggggggggcccttgtagtggggaaatgtatgctccccgggggggcttgtctgtttttgttgctgtacatcaaggaaacatttttttttccaactttttatccccccctttttaaaaaaaaaaaaaaaaaaaaaaaaaaaaaaaaaaaaaaaaaaaaaaaaaaaaaaaaaaaaaaaaaagaaaaaaaaaaaaaaaaaa

SEQ ID NO: 662 - DNA, 1529 bp, Glycine max
  misc_feature (23)..(23): n is a, c, g, or t
  misc_feature (47)..(47): n is a, c, g, or t
  misc_feature (492)..(492): n is a, c, g, or t
  misc_feature (952)..(952): n is a, c, g, or t
  misc_feature (978)..(978): n is a, c, g, or t
  misc_feature (1005)..(1005): n is a, c, g, or t
  misc_feature (1040)..(1040): n is a, c, g, or t
  misc_feature (1099)..(1099): n is a, c, g, or t
  misc_feature (1126)..(1126): n is a, c, g, or t
  misc_feature (1223)..(1223): n is a, c, g, or t
  misc_feature (1288)..(1288): n is a, c, g, or t
  misc_feature (1347)..(1347): n is a, c, g, or t
  misc_feature (1370)..(1370): n is a, c, g, or t
  misc_feature (1410)..(1410): n is a, c, g, or t
  misc_feature (1434)..(1435): n is a, c, g, or t
  misc_feature (1475)..(1475): n is a, c, g, or t
  misc_feature (1479)..(1479): n is a, c, g, or t
  misc_feature (1482)..(1482): n is a, c, g, or t
  misc_feature (1491)..(1495): n is a, c, g, or t
  misc_feature (1497)..(1504): n is a, c, g, or t
  misc_feature (1508)..(1508): n is a, c, g, or t
  misc_feature (1510)..(1511): n is a, c, g, or t
  Probeset Number=SeqID_10441
gtggaggagtgaggattaatgcncgcgagcacatcagacgcatgtcntcatatgagcagtgactgaggtcgcctcttcatcacacgaagatcaggatcgcgactcaagcagatatataagttagtctacgtgtgagcggcgcagcgaggagaacggtagagacggagtgcagttcgtggcctcggtgttgtttctgtgtcttgtctgatgtgtatttacacataggactcagtcgatgtgtcgtggtgcccgtgtgcgctcgacgcaactcgtacatatactgatgagtgagagattggcacagaagaaggataacgagggcggtgatggtgcagactcacaatcaagaacacacctatatctcattattctcacgttatatatgtagtgatgattggaaggggtgtggttgatatccaaaataagactgaatcgtcggacataccactggatagtagagagtagttatatacccgtgtacaacgagtggtntgagatactagtagagtatgaagatagcagtccatgtgcctgtccgtggtagatctcgtgtctttccgctcgtcgtcgtgggaggggcacgagtagcttcactctcatcacggtgtgaggagaggagagataagagacgcgctactccacgtcgtgaacataatgcttatgttgtgggatattccgacatgatcaggccatctcagcgagagacaggctgtggatcttatttatgtgtcgtgtggtatctgcgcgtgaggtcacagacagaataacaatctatacaaatgtatagagactatagtatatcacacacactactggtcgaggataagacattattgcgggctcacgtgtctcttgcgtcgggtgttctgtatatgctatacagatgcatcgatggccggggctgccgtggcggcgcgtgtaggagtggcgcgctgaacctgctccttcctcncctccatagaggataggcagaaggtngattaactcttccctcaacatctctantaactgagtcttataagcgaggacgagaattaagnttataatgtttttgaagtcttgccagcggcatgagaggtacaattgcgtggctgttctnttgtgtgtatgttttgttgtagtgctnggtttatattcaactactcgcggcgtggagaagacacgagcgtacacctatctcgtcgttggatcgtcttactcggcatttgctgtgctcgacgagngcgactggctccagtggcactgagccacacagagtagcacgagcgcccagcaggagccactactnaccttctctccgcgtgagcgggtgaacgtatgataggatgtgagagagtctcttttttntcgtgatgagataagactcgttnccgttacatataggaaggagaggagccacccaccaacacntctactctagcgccgagaaccccnncgcagcacgacacgcagagggacgggaccacgcagagccncacncanacgaccaannnnngnnnnnnnngggngnngggccacacacacacacc

SEQ ID NO: 663 - DNA, 387 bp, Glycine max
  misc_feature (96)..(96): n is a, c, g, or t
  Peptide Sequence Number=SeqID_8937
  Probeset Number=SeqID_10442
caactcatggaaccgcagctttataatcttcgacgaggaacatagttaccggaactagataggtgaaccctgaacttttctggaaaccttagattncacatgtgtgctcgctgttgtgtttcttgaacagaccagatgcacctggcgttgatttggaaggggcgaaaggcccattttggcatcaaccacgggaatggagatcacctgctgcgtcttttgtgtgttgatcgttagttctgacctgtcgcgtcgtataacatattctattagtccagtggtcgtttgcaggtacaaactgtaggtgtgtagatgttggtggtgtttttggagcacagaaccttattattagctggaagagtcgatgtgataacaaaaaaaaaaaaaaaa

SEQ ID NO: 664 - DNA, 1390 bp, Glycine max
  misc_feature (6)..(26): n is a, c, g, or t
  misc_feature (62)..(63): n is a, c, g, or t
  misc_feature (1351)..(1351): n is a, c, g, or t
  Probeset Number=SeqID_10443
acaaannnnnnnnnnnnnnnnnnnnnccacctagccgttattgactctgtcgttctattcgnncaaattctacgcgccgcgcgcccgtgcctagggcggcgctcggggccccggcggtgttggccctcgggcgacgggggtcgcaacgttatagaaaggagcggggggcttgggcctgggcgtcctccccctcgtggcgtccacgcgctgcgccgctcggtctaggccatgccgagcgtcgctccccggccggcggccgcccgcgcaatgggaggacatcgcggtccgcggactcctttgctcaggtccaccaggattccagcgtccctccctagcgacacccgttacgcccggctcccctaccccccctcagcccgtctcctcgcttcctgaggggatgagctcgggagttgtagctagacatgagtcggccatacagcgagattgaatcagcttcgcgctcactagtcccccgtcctctgcggaggtggatggtgccctcccagttacgtaaagctgccgtgctccaggaagtacatcacaataaaccaggctatacctggaccccccctatacctcattatccgccgtgcgccgctgtcagtagccgctctcggcccttcgtcacggtcagcaaagggcgtggggccccctacttcctccacccacctcacggtgcccatcgcactcctccacccgtaacacccgcttttcgcttgctccaccatcccttagcttcaccgtctgtgaggctccgccccgcacaacttgagagactccactgagggcgtgatatatctggaaacctcacgtcttaggtcagctattggagggaggagcgcgtgggcgagagctataccctccgaacataactactgaaagacactgccgtaggctgtacaataatgcgatttgtatttatctaccttctaattctgattatacctctctcacaacacccgcgccacacgatgccataaaatgatagtttggtaacgcttattagcttgataacacatttcttatctgatgtctgtttatcgtgttagtattagcatcgttagctctcgaaagcaagaggatagtaatcacgagctgatgcgagcccgctcgtcactctactacaccagagaatagccagcgaccagcgcagaccttacgctctcagatgcagtcgttccctttccatctcatcctgtctaccatattacatcctcctttgtttcgtagtgacgacgcgtagcgatgcactatttcgctcgcaacgcaatacaggcatgtgccacacctgtggcctgatgaagagccaggatgcgagttggaatgctacgcgcccatatcacgcgcgcgntccagcagcacatagaacacacaccgacctgaacacaca

SEQ ID NO: 665 - DNA, 1431 bp, Glycine max
  misc_feature (108)..(108): n is a, c, g, or t
  misc_feature (324)..(324): n is a, c, g, or t
  misc_feature (383)..(383): n is a, c, g, or t
  misc_feature (435)..(435): n is a, c, g, or t
  misc_feature (468)..(468): n is a, c, g, or t
  misc_feature (516)..(516): n is a, c, g, or t
  Peptide Sequence Number=SeqID_8938
  Probeset Number=SeqID_10444
atacacacacagtatctcaatagacacaggcatctacccgactgcgccattaactagtgtcggtatcgttcatatatatattgtataaaactgttgttcttccgtcgnagtctcgtgtctatgagatatatccgcaccccatctagcatccgcgtgctgacgccagcacaccaaacgcatctatcacggaacttcactcgggtctataatcggttgaacgatactaactccactaataaggtatagggctcatgtaccaggcagaccaagctagaacagtggctggtggcgtgcgcaacgttgtcatctcacacagagtaacgngtgttcacgtccaacacacgtggtcttataaataattattatgttgagaagcgtgcgangccggggagcggaaaccaagccaccctcaccacagcaactcgcccgctctcngcttggttggcgtgcgatcacgaacgcgcgtgncaacactcagagcgcgagcggcggccttcggcgcgttacgtaccaatntgttgttacatctctatccggcgttcattgatatctcacaccagtatgtgcgtgtgtgtgtaactgccaccacacacgccttctctacagtgttcaatcccacgtctcgacgtacactaatcggcacctatcaccttactagtcgttaagatgagtgaggccggtctccacacatgtcaccgggtgggtccgatacaacacctccccgccgaaactcggcgccataaaactccacgtagtaaacgcgagggcggtcggagatgtaatatcgatgtcactgtgagcgtgcgcgcgactctgtgatgataataataggagaaagacggacgcggcgcgacatcgtgcgtcactatcctttattagctcaatatcgtggagcgcggcagtattataaagcgtgtcatcatcacggggcgctggccgcgcgtgctctcccccatacaaaactcctctctccctcgccgcgtataccatggtgctggattactaatttaacattctcgagcatcgcacagacgcaccggccgcgcctgccggcatataacgcacctccgccatccctcacactcttctaattgagtagggcataacaggcgggaggcggtttgtggggattatgacagatatacaaacagcgtgcgggttgtgtttcagagcgttgctttttgtaaccatcgacaccaatacaacgtggatgaattggttaagagaccaactccgccgtcctttctcgcactcccccggcgcgtgcggggcatacaacccctccaatgatcggcagcactcgtccgcgacacaaaacgagagggagcagagagacaatgttagtccgaaaacacggatggcacgccattaaccgaagagcgagggagagggagagaaggggtggagatagagataggccacactaacaac

SEQ ID NO: 666 - DNA, 459 bp, Glycine max
  misc_feature (359)..(359): n is a, c, g, or t
  misc_feature (447)..(447): n is a, c, g, or t
  Probeset Number=SeqID_10445
ctcccgcgattagggtttccccgctgccaccgcctccagccgccggcggccccgcctcaagccaccgtccgctggccgcgcctcaagccgccgcccgctggccgtgcctcaagccgccgctgccagacccgcctcaagccaccgccacagacccctttgtcaagcaggacggctgcccgcttccggcgccgtggacgtcggcttccgagctcgactggatggacgccgacccccttctccgctgatatcgacggcggctgctcctccccgatgccccactccgccccactctccttccatggctgagacgcccctggttcgtcgccgtcgtcgtcaacgcactgccctgacgcccggcncctgcacttctctggacgccatggccacccactgctagttctctgattgtccatcgagtagcagatgcttgacaatctcatggcgatnaggagtagtatt

SEQ ID NO: 667 - DNA, 409 bp, Glycine max
  Peptide Sequence Number=SeqID_8939
  Probeset Number=SeqID_10446
gtttaaggatctctgtggggataagtcgatttgatagcgaactagaaagcgagagatcgaagcaagtgatgccaggaggtgtgcccaagctcccaaagatccaaccggcggatatccaagccgccataggatggggtgtcgccgccgcagccggcgccatctgggtcgtccaaccatttgattggatcaagaagacgttcattgacaaaccagcaactgaagagaactgatgggtcgtcaccaagatgtagacttttctttgccatgggactgaataaagttttggttctttttctggggatttttgttgtttcatgacttcagtgtaaacttttttgccttctcaaatgttataacacatgaataagcatacacactgtaaccagaaaagagcatgcattttgctttt

SEQ ID NO: 668 - DNA, 1313 bp, Glycine max
  Probeset Number=SeqID_10447
acattattttcatttgtctcctttgtacaagcttctctttgagctctgtacctttgtgtggcaaagtaccccttgtaacataacattacctgtaaaattattgctgttaatatggcttctcaaatgattgctcaaatgaacggtgctgaaacaatgctcaattccctttcatacgacgccatgttagaggtgctttcccatctctctgtgcaagaattaggacgtctctcaattgtctctcagaatgcaagagactttgctgatgatgagattgtctggagacgtctttgcagacaaatggagactgactggagcaaaatattaaaagacccttcccaacaacaatccgtcgatgccagtggaacatggaaagaccagttcaagacggaacgtgatcgcctcgcctgcttttccaagttcgtgggattgtggagtgagaagtggtgtgatgtgcatgttatgcaatccacccaaattgaaactgatggaaccaatttctttgtcacttacaagaagaataagttctctgcccatttccaagcattcgatggtgagactctctctttccaattagagggaggagacagtggatggtcatttgtttattctctcaagcctctctctgagaatctccttcaactcactgtgttccgatctcatgataagaaatccttcaccgggttctatacccgtggttaagatactagaattaaataatggcaccgagatagtggaggaagaaataacttaaattgcggatttcaataataataatatctctttattctttatcgttttctctcttttcttttccttcttcttctcctctctctttgcctccaaaacttttacttagtttttatacccccctccttcttcccttccccttcttctttgaacactgtcaacagttgtggtgtggagtttattgttggattactttttgttatcttcaaaaatggaattcagctatttctcttttctctccttctcttcttttagagagctagagtttaagcgttgatggacttttgggcagtctcctttctttttttttgtttgtattttttgaagagaaaaaaaataatgcatggaatagaagataataaccaacacaaaaattaaagggcgtcctataataataataatcaacttggcttactgctagaaacaacaacagaactttctttcgaggttatgttgttgtattatcataactgtacaggtagaaatttatgtataaataaataattgtatacggttaaccgaatgctcttgtttctaactttgtaaaagtaataataataacatgt

SEQ ID NO: 669 - DNA, 927 bp, Glycine max
  misc_feature (57)..(63): n is a, c, g, or t
  misc_feature (65)..(65): n is a, c, g, or t
  misc_feature (67)..(67): n is a, c, g, or t
  misc_feature (69)..(69): n is a, c, g, or t
  misc_feature (71)..(71): n is a, c, g, or t
  misc_feature (74)..(76): n is a, c, g, or t
  misc_feature (78)..(81): n is a, c, g, or t
  misc_feature (83)..(83): n is a, c, g, or t
  Peptide Sequence Number=SeqID_8940
  Probeset Number=SeqID_10448
gctcttctttctccagggaagaacttgtcaacactgtcttgaaattctagtttaggnnnnnnngncncncnccnnngnnnncngagccccccgacatttttcaacttttgagacacacgcacccgacaagtggcccaacgggacatgacgagcctttgagccacctaaccaggcgtatcgcgccgcattaaaggccacgcccctcatgcctctgccgcgctctaccttgtcacagcaccccgctctcccaccacctacgccccaagctacatcaatagccaccagccccccgaatgcgcaaccaccccgccttcggcgcaccgcccgcagccggctcatccccgagcaccagccccccgtagaacgcagtcgccgcccgacaccacttcacacactgtttttccccgcaaaaactcgctccccacccactggtatacgcgcttcttcccccccgaacgcggcccatcccctatcctcacaaacggctcgcccccagagctcaaccctcctcctcgcacactccctatcacacccgggcccactccgcccgcccccgccccccttcttgtcaatgcctgcgcaccctccgcccaaattcgccaccccccgtcgcgtctcctcgcgccctccctctgccgacagaaggccgccctcaatctaccccagtcccgtatcttgcctactcctctcccgatcacatgcgccgcgcccttcacatcacgctcgtgtcctctatgcctccgtcccgctcactcttctccgtgcactccctcgggctccttccccactcgtacactgtacctcatccccgtactacgcacgtccccacgacccttcactcatccccgcccccgaccaccatctcccacagcacccaccctcctcccccggacgccctgcgccagctacacgtgttctcctcaacag

SEQ ID NO: 670 - DNA, 1541 bp, Glycine max
  misc_feature (19)..(19): n is a, c, g, or t
  misc_feature (51)..(51): n is a, c, g, or t
  misc_feature (86)..(86): n is a, c, g, or t
  misc_feature (1224)..(1224): n is a, c, g, or t
  misc_feature (1389)..(1389): n is a, c, g, or t
  misc_feature (1395)..(1395): n is a, c, g, or t
  misc_feature (1398)..(1398): n is a, c, g, or t
  misc_feature (1406)..(1406): n is a, c, g, or t
  misc_feature (1409)..(1409): n is a, c, g, or t
  misc_feature (1484)..(1484): n is a, c, g, or t
  misc_feature (1541)..(1541): n is a, c, g, or t
  Peptide Sequence Number=SeqID_8941
  Probeset Number=SeqID_10449
aattctgtatgttaaaacnaatagcactacatagaaatcataaaataccanagtaataatgaggtagagagacaccccacccccanacccacaaacctccaaacctcgacctactcaacgccgggagagggagactggatcataaatactagaggcgcatccccccgggcgtgtcgggtaagtgagctacgaagtaccatctacactaagctatcatcgcgtacgtcgtagtgaggacgtctacctccccctgtcccgccccattttcctacacattatgtaggcagcctctcatagagtcctcggtcggatgagtgcgatttacgaactcacgtataaggagacattcctagatggactaccatatcgcccggcatcacgtgcagagacgcgttccgatatggatagtactaatatccacagcagcagaatgagtgattgtaaacatcggaaaaacgataagaggcaccgacggcacaataaagtaagagaagagagctaattgaccaacactccatcaatatgtacgaacgtacattaataccatcccgtatttgagattcacaccacaatggatatacattaagtaacacaatcccgacaagaagagaagctaagctgcgcattgagaatcatcccacctatgaatactatcacattacatgtgattgaatacaccgtccgcactcaccgcgtccgcggctgtattgtaccgacaattaggatgcgtgtggcgcccctcttcccctcagaaatataatcgtatgctaacaccgcagaacccgtgacgcccactcaatacgtagatcacgcaactagagacaccactccacacgtcacattagtgcagtgctggtgtgaacatctgtgaatgcgacgaggacgatcggcgcaccctcccgaacccagtgtggctacgtgcacacgctctacacgctctcgcctcgctcgtgcccgccaacattaatagaccgatggatggccgacgatgaccacgcgacactaggtatatgaattaactcacttccaccattccctcaccaacctccgagcgccactctgaggtgagtctcggcacactcagaatttagacctgtcatacttacaccacaccaacatatcagataagtactatctcgtatcacagcgaacaacatgcgtagatcagaaataataatacaacctacacacatcgaagacagatacacgggcgtcgtccgcaanctgtcgacggtattgcttgcgttattgtatgcgcgggaaccgccgagcaccaccgcgagtctctgagtggtctactcgaacatggctcgaccgctgccgctagtggactgtccactcacgctctactcgcatatccattcgtacgacaactgtacgtgacggaancacgangangagagctncgnggaagcggtggcgcgcgtcgtaattgacacgtaggcgtagatgctcatgcgctcgatgcagtatagtacgatgtnacgaacacaacagtgtatggctataatcgctgatgacgcgtatgatgacgtatatan

SEQ ID NO: 671 - DNA, 432 bp, Glycine max
  Probeset Number=SeqID_10450
attaaaactctccggaattcaattttctctgcacagttcattctcaaattccaattttttaattccatcccgtggcttatttaaaggccgtttgtttccctcatgtggaaaaaaaaaattaccatcgaattgtgacggaaccgatatggcatcgccgaacaggatcgaacgctcccaccatatgtaccgcgactgacgttacgaagaggcgttagggttctacacggatgcaatcgccatggccaaaaccaaccctcagaacatcactttgcatatcaaccaatccacgtgctatctcaagcttcacgatttcaaaaaggcagcataagagtgtacttcattgcttgaacttgatcacaagcacagttgtgcattgatgctgcatgcttaaacgctattcacccttaaagagtaccattcatcactttttga

SEQ ID NO: 672 - DNA, 624 bp, Glycine max
  misc_feature (94)..(94): n is a, c, g, or t
  misc_feature (141)..(141): n is a, c, g, or t
  misc_feature (207)..(207): n is a, c, g, or t
  misc_feature (214)..(214): n is a, c, g, or t
  misc_feature (290)..(290): n is a, c, g, or t
  misc_feature (293)..(294): n is a, c, g, or t
  misc_feature (296)..(297): n is a, c, g, or t
  misc_feature (307)..(307): n is a, c, g, or t
  misc_feature (459)..(459): n is a, c, g, or t
  misc_feature (601)..(624): n is a, c, g, or t
  Peptide Sequence Number=SeqID_8942
  Probeset Number=SeqID_10451
cttgtctttgcccgtggtgctcctgttgataacggagaagctccttctttatcgtttcccttttttcgagaaccccaatcccgttaactcgtanaaaaaaaaaaaaaccagagcccttctcgtcctctcaattctctcagnccaaggggctgcaaattttctggttcttttcgacagattttgagccattggtggagatggcatccntatctantcagccacagttccgttacactcagccggccggcaagggtgtttcattcccccgacttgggggggggggggggccnaannannaaccttattnaactttggaaaccccttttgaaaagttgttaaccccaagggggggggtggggggaaaaacaaaatccaggtttttttggaatttgggaaattagaatccgcgcccttgccatggaatacatactagtgcccccacccgcgaaggctgggtangatacaaaggagaaaccggaatcccaccaaatttcccaagggggggggagaatgggggggtgtacacgccggcgcggaagggctcctcggggaaatgtatttcggtttagacagaggggagcacccacagaaagacgccctnnnnnnnnnnnnnnnnnnnnnnnn

SEQ ID NO: 673 - DNA, 334 bp, Glycine max
  misc_feature (33)..(33): n is a, c, g, or t
  Peptide Sequence Number=SeqID_8943
  Probeset Number=SeqID_10452
gctgtaccgttttcttgttcggaggactggtantaacttcaatgccatcatcctcaaacaccttttcataagcaaggtcaacaagcccccactatccctctctagattaattcgttacaccaaagtaaaagaagataagataactataatagtctaaaccataaccaataacattataatatataaagtccctactctaaaagtaactaccctaaagttcactaaaactaccataactagaattaaaaaaactaataacaaatacctcacctttaatcaactaactcttagagctccactcaaccaaaatacgattcttcttagaatcccaaga

SEQ ID NO: 674 - DNA, 1454 bp, Glycine max
  misc_feature (1)..(1): n is a, c, g, or t
  misc_feature (78)..(78): n is a, c, g, or t
  misc_feature (87)..(87): n is a, c, g, or t
  misc_feature (139)..(139): n is a, c, g, or t
  misc_feature (298)..(298): n is a, c, g, or t
  misc_feature (677)..(677): n is a, c, g, or t
  misc_feature (804)..(804): n is a, c, g, or t
  misc_feature (807)..(807): n is a, c, g, or t
  misc_feature (827)..(827): n is a, c, g, or t
  misc_feature (859)..(859): n is a, c, g, or t
  misc_feature (866)..(866): n is a, c, g, or t
  misc_feature (1000)..(1000): n is a, c, g, or t
  misc_feature (1246)..(1246): n is a, c, g, or t
  misc_feature (1360)..(1360): n is a, c, g, or t
  misc_feature (1397)..(1397): n is a, c, g, or t
  Peptide Sequence Number=SeqID_8952
  Probeset Number=SeqID_10453
naggagggaagttgagccgcagcgcatccatacacttacaaaaaatgataaatatatgataacaaacataaaacaaanactagctcnttctttttgcctttctaacactattacagatgaacctaagagttgttacctnctacaccacgacatatccacccgcagccgataacaccaacaagatcgcaaggagagcctttgtctgtgtgtgtcctgacgcacatacgccacctcctccccactaatcttctactctccatttcaatctattacgagtagtctttatgtacctatcagntcactgaagcacacataacaactattaatttattatcttacctattctctactactttgtttatcgctgttgcctcctcatcttcaccgggtcatccctacggttccacatatctcttgtcgcatgtcttctcttttctcctcacccactcacgaaccataccatcctgaaacaaataacacctatacacatcactaatcatgtctattagtacgccacataattcataggttctgatatatagactacgctcattcgaagcacacgtcatcgtctcttatcgttgcgccatcaccaccactctttataaccctgcatcctgtcctcacacatgctcgatcaccgagctctactactctactgataaccctccagacanacatattcgtgacatgaatcacatcgtgaaataacacacagaagctgagttaagatgccgtagtcggtgtcttgactacacattcatactatattttattttatatatattatcaccccacaaatanaanaaaaccaataaaacaaatcnacaacctcactaatatgcgttagaataaacgnatgaacnaccccacacccccaacacccactccctccttatgagtctatatgtaatacatctctcactgaatacactctgtaatatatcatcatctatatatatttcactaacagttgttatatacatccttatctacttgnttgctgcagacgacactgcttacactgcacacataacacaactaatctctcacttctctaccggatctatatctctccgctctagtcgctagctacctagcatcccccgcacatcagtccggcacgctgctgtcctactcgtgaacgcctctactcgcatcacacctgtcgttatgtcacttctctcactctagaccagctatctatctctctcttccttatacatcatcgtatctagtatcacantctcatatatcactacgctcgcatcttacctgcttctactcacccttcacattacgctcaccacatgctactaaacctcgcttatatccgacacatacacctctgagctatctnttcatcctaatattatgagtatccgtctctgatatcnttccttagattgattactttcttagctctacgtctgcgctgcactcctcatcgttac

SEQ ID NO: 675 - DNA, 479 bp, Glycine max
  misc_feature (405)..(405): n is a, c, g, or t
  Probeset Number=SeqID_10454
taacaaaacatggctcctctcactcccaggcttgtagtgcccatagatgtaaagaagcagccatgggagcaggaggttcctctccacaaccgctggcacccggatatccctccggtcgccgatgtgactcaaggggaattattccgtgttgagatggtcgattgcaccggtgggcaggttagagatgatgactcggcggacgatatcaaatctctggattttgcatcgcctcactatctcagtggcccccttagagtagtcgatgccgaaggggttccagcttcacctggtgatcttcttgcggtggagatctgcaacctcggcccgcttcctggtgacgagtggggttatactggaacatttgaaagggaacacggaggcgggttcttaactgaccacttcccngagtgcaagaaaagccatttggtatttcgaaggaatttacgcgcactcccctcagataccaggtgttcggtttc

SEQ ID NO: 676 - DNA, 180 bp, Glycine max
  Peptide Sequence Number=SeqID_8953
  Probeset Number=SeqID_10455
ggcggggggtaaagggggtggagcaaatgggtccgatcggtcctgggagtttgattctgattgcgattgtagcgctcattatttttgggccgaaaaagcttcctgaattaggaagagcagcaggagatacattacgtgaattcaaaaatgccacaaaaggcttagctgatgatcaggaag

SEQ ID NO: 677 - DNA, 1553 bp, Glycine max
  misc_feature (253)..(253): n is a, c, g, or t
  misc_feature (274)..(274): n is a, c, g, or t
  misc_feature (533)..(533): n is a, c, g, or t
  misc_feature (535)..(535): n is a, c, g, or t
  misc_feature (657)..(657): n is a, c, g, or t
  misc_feature (717)..(717): n is a, c, g, or t
  misc_feature (895)..(895): n is a, c, g, or t
  misc_feature (917)..(917): n is a, c, g, or t
  misc_feature (919)..(919): n is a, c, g, or t
  misc_feature (1102)..(1102): n is a, c, g, or t
  misc_feature (1173)..(1173): n is a, c, g, or t
  misc_feature (1255)..(1255): n is a, c, g, or t
  misc_feature (1315)..(1315): n is a, c, g, or t
  misc_feature (1320)..(1320): n is a, c, g, or t
  misc_feature (1344)..(1344): n is a, c, g, or t
  misc_feature (1411)..(1411): n is a, c, g, or t
  misc_feature (1413)..(1413): n is a, c, g, or t
  misc_feature (1475)..(1475): n is a, c, g, or t
  misc_feature (1478)..(1479): n is a, c, g, or t
  misc_feature (1482)..(1483): n is a, c, g, or t
  misc_feature (1485)..(1485): n is a, c, g, or t
  misc_feature (1494)..(1494): n is a, c, g, or t
  misc_feature (1505)..(1505): n is a, c, g, or t
  misc_feature (1517)..(1519): n is a, c, g, or t
  misc_feature (1538)..(1553): n is a, c, g, or t
  Peptide Sequence Number=SeqID_8954
  Probeset Number=SeqID_10456
acgtgagtgcgagaagtggcagagacgcgttcgcgagagccactgaatagtgacgtacaccgacgacgacgcgcatcgttatattacctctactctcatttatgctcctcatcgtatgtgcggtatgctggcgtccgggtcgtgagtcatacgagtggctggcgtgctcggaggtggcggagagtgcactgcgaactccgcgcatctctcaccggagaccaagaggcgtgtagacggttgtggtcacgcgtancacatcggcacatccgcagcngcttgtgtctctcctatccgcgctgctcttagcgtgggtgtcctgagtatagtgtagtaagagcgcgggtctatattgctcttagttgcatgatgcgcgcgtacgatgtattcaagatactatcgtgtcataagctgtagaggggctactagcgatcgacatcatccacgtcacactgctgcgccgtcgcgctcggtgcgatatcgtcatcggtggcgatgtgcgtgtggtcggcagtgcgcggcagcgtatcgcggangnacgtgttgaggtgagagttgtgtatgtataaatagtgtcacgtctcgcggcggttgtggtgtgaggagtctatactctacgcgacgcgacgcacacgccgctcgcgccgcgcgctgcatcancccctatcaaattcatcacgtccatcaaacgcgtcgcgtattcgttagatattgtatcgnatacatgctaagaagaatatcagcagagcgcggcgcgcatcagagcacgaagagacgacgacgcgggagaaggacggagacacacagcaccgggcgcaagacacgccaacttacactcgcgcgcgtcagtatgtccgatgcgcgtgatgagtgagccagttactcattgcgaccactntccacgagtgcgcgatatatcntncacgctccgtctgctagagcgctatatctgacatattttaattcctgatcgtggtatgtgtagcttatatgtgatataagtgctaatgcgcctagtcttatttatgttggtatatttatttgtatatgcagtattcgagtcgtctctagctgctcggtctctattcagctcgcgcccacgggnccctcctgtcctgtgtgttctgtcttgctctgtctccacgggactctccatcttgtctcctacgtattctncctccgtgtatcgctgtcgtcgcatctcgccctgccgctcgtttgtagtgtgcgcgtcgtcgcgagggttgagggggggagngagaagtgctcgcggcggctcggctgcgtcgctcggcgtcgatacctgtcgctcgtgccnccggncgtaatatgcgtttcatatcaatntcctctcgtcatcgctcagcgtctatctgttcacgtgtgcgctcagggattatacgaatctactacncnggtgacgcgtgcggctgtgcatggttcgagtgggctgaaggggcgcacgcgcgggacccgtngtnntgnngnggcggtgtnggtgtgccgtngtgtgtgtggtnnngggggggggggtggggggnnnnnnnnnnnnnnnn

SEQ ID NO: 678 - DNA, 1362 bp, Glycine max
  misc_feature (5)..(5): n is a, c, g, or t
  misc_feature (21)..(21): n is a, c, g, or t
  misc_feature (25)..(25): n is a, c, g, or t
  misc_feature (53)..(53): n is a, c, g, or t
  misc_feature (62)..(62): n is a, c, g, or t
  misc_feature (71)..(71): n is a, c, g, or t
  misc_feature (86)..(86): n is a, c, g, or t
  misc_feature (97)..(97): n is a, c, g, or t
  misc_feature (120)..(120): n is a, c, g, or t
  misc_feature (124)..(124): n is a, c, g, or t
  misc_feature (147)..(147): n is a, c, g, or t
  misc_feature (161)..(162): n is a, c, g, or t
  misc_feature (195)..(196): n is a, c, g, or t
  misc_feature (219)..(219): n is a, c, g, or t
  misc_feature (313)..(313): n is a, c, g, or t
  misc_feature (317)..(318): n is a, c, g, or t
  misc_feature (325)..(325): n is a, c, g, or t
  misc_feature (357)..(357): n is a, c, g, or t
  misc_feature (362)..(363): n is a, c, g, or t
  misc_feature (370)..(370): n is a, c, g, or t
  misc_feature (414)..(415): n is a, c, g, or t
  misc_feature (418)..(425): n is a, c, g, or t
  misc_feature (433)..(434): n is a, c, g, or t
  misc_feature (477)..(477): n is a, c, g, or t
  misc_feature (486)..(487): n is a, c, g, or t
  misc_feature (501)..(502): n is a, c, g, or t
  misc_feature (512)..(512): n is a, c, g, or t
  misc_feature (522)..(522): n is a, c, g, or t
  misc_feature (524)..(524): n is a, c, g, or t
  misc_feature (544)..(544): n is a, c, g, or t
  misc_feature (546)..(546): n is a, c, g, or t
  misc_feature (550)..(552): n is a, c, g, or t
  misc_feature (555)..(556): n is a, c, g, or t
  misc_feature (561)..(561): n is a, c, g, or t
  misc_feature (563)..(563): n is a, c, g, or t
  misc_feature (567)..(569): n is a, c, g, or t
  misc_feature (578)..(578): n is a, c, g, or t
  misc_feature (614)..(615): n is a, c, g, or t
  misc_feature (617)..(618): n is a, c, g, or t
  misc_feature (622)..(622): n is a, c, g, or t
  misc_feature (633)..(633): n is a, c, g, or t
  misc_feature (645)..(645): n is a, c, g, or t
  misc_feature (657)..(657): n is a, c, g, or t
  misc_feature (659)..(659): n is a, c, g, or t
  misc_feature (685)..(685): n is a, c, g, or t
  misc_feature (701)..(702): n is a, c, g, or t
  misc_feature (846)..(846): n is a, c, g, or t
  misc_feature (878)..(878): n is a, c, g, or t
  misc_feature (888)..(888): n is a, c, g, or t
  misc_feature (1124)..(1124): n is a, c, g, or t
  Probeset Number=SeqID_10457
attgntagagtcgagctctanacantgatgtctcactctccagcgcgcggcgntgtgtcgtntcctctctntatgatatcgatatncgtgcgagagnaggacgaaggagcggagagatanctancaccagtcactacaatagatctntgcacatacatcgnncgtctcgccttccggacggactccgcgaccgcnnccgcgatgatacatgagaggcgngtgtacaatgggtaagctatgacgctagttgcacagacacgaacgccaaggcgcgatatgaaggagggggcaagtgtacggcgcgctgaatcgncgcnncgggggnccaattagatacagccgctgggcccggggtgncgggnncgccacncaccaatcactccagggagcccacgggcgcctcagacaggcttnntcnnnnnnnnaccacccnncaccatgcccccgacgacagtgaggtgggccgccctaacttgnctgtgcgtnncttaagaccacggnngcgcggcccnctcggcggangnggggcgcgcttcaggcccangnccannntcnngcgcncntcgnnntgcggcgtncttaagagtccaagggagatggcgcgtgggtggagnngnngganagtgttttggnaatcagaaaggncttagtcgtgtncncggtggcggtcccaccccgttccccncggccaagtgtcattnngaggggggggggtgtaatctctcaattccaacacgaccgggcgcgtctgcgtgtcgtactcgctctccacgtcacgggcgaagcacggcagtcgagcgtctctcgctcgatggccgggactaccgacgagggagtagtaccganttatatcggataccctgcggtacgctcatatnagatgcgatntcgtctactaataacattctatacctgttcgtacaatcatacgtatcttaggaggcgaggcggtcaaggggatacatcctacgtgagttcgtcgcggaacggcctctagagtggatagaccagacagagagtgatagcgggtgacgtaaccactgtgtgaactctactgactttctgcactatacttctagtgttctggctgcgccggccataataaaggctataatatcgtagcngagagaatatccactacacaggcctcgagagagagggtataagaagggtatatgttgtggatactggcctgcctcggacacggcgcgcggaggtagtatagtttgccaagaatgctggcccagcaccgacgggcagctggaagaggcctatacttctagacataaccgagagagaaggtgcattcaaactgacagtggcaagaaccggagagaggagagtgaggagggagaggggagt

SEQ ID NO: 679 - DNA, 894 bp, Glycine max
  Peptide Sequence Number=SeqID_8955
  Probeset Number=SeqID_10458
atcaattttcagtgcgttaaagatattgaaacagagacgattcttgtttgtcaattatctctgtgtttctgtgattcttctgttccattcgattcaaccctgaagccaaagaacaacaaggataagccttttaactagttttgtgcgttggatcatctgtttaagctcggcttaatcttaccttcaacacttcacaaggctgctcttgcgttagactgtgtttgaagaagaaccaaagatgtcatcggatgagaagaaccttatagagatcttggaggaaggccacaaagtcgatatagtcaagtacatcgattacgtcagtgcccctcaagccggcgccatagccacattctctggcactacgagagacatgttcgaaggcaaagcagtcttggagctaaggtacgaagcgtacgtaccaatggccacgcgaaccctcacctccatctgcacatccgctagatcaaactgggacatccacaagatcgctgtcgctcaccgtctagggccagttcccgttggagaaaccagcgtgttcattgcggtttcatctgttcaccgtggggatggtttagacgcttgtaagttcttgatcgatgagctaaaggcaacggttccgatttggaagaaggaggtgtacactaatggagagatctggaaggagaatagtgagtttctggagaagagagacggtctagtgaagaaagaacataaaagaagttgctgtggaagtaaagttagagtacaagaagatgaagaagagcataaagataacagttcttgattacttatagcaaagagcaatgtttttttttttttttctactctcgataagcaaattgtcttaaaacacacattgttgaatctaaagacttcaaattccaattcagttgc

SEQ ID NO: 680 - DNA, 1377 bp, Glycine max
  misc_feature (12)..(12): n is a, c, g, or t
  misc_feature (73)..(73): n is a, c, g, or t
  misc_feature (91)..(91): n is a, c, g, or t
  misc_feature (960)..(960): n is a, c, g, or t
  misc_feature (1098)..(1098): n is a, c, g, or t
  misc_feature (1150)..(1150): n is a, c, g, or t
  misc_feature (1244)..(1244): n is a, c, g, or t
  misc_feature (1343)..(1343): n is a, c, g, or t
  Peptide Sequence Number=SeqID_8956
  Probeset Number=SeqID_10459
tgttctattccncactctcctgactctcatccctcagagctaagtgggtggtgcggttgtctcttcattattntataccacatactcctgncctcagcgccatcgactcctatatgttgtctggggcactctcttctttgtggaggatgagagtaacttcttatattattctcatgtattcttatctggtcattatagtggcagcagctcgcgtggggctcaccgtgctcctcactaactccatgtgataactcagaagtaatcgccggaggtatgcacttatacctcacacgtcctcgtacgcccagctcctatagtactagcgagacatcccggatgatgtatatatagtcactaatttgattggtatgttgatggtcatttcatcaaactgcgctagcctgatgattcaggcagtcatgtagagtgatctatgcaatcataaaacagacacacatgatgtagtcgtcaagtagcttacgcgtgattgctacacgtggggagcgtagacactgtgtagtattctctgctctcgagccgacgatatgctattctaacaacactcacgatctacattatagcctctcgcgccaatgcagtcatgtacgcgcgacacaacaatgcggtgcgcgtactgaggtctgtgctctgctattatggtgttgtagcagtactacactgtgtcttacctattctattatactttactcgcgcgcgtgtgttaatacgcccgagtgcgccacaccacactagatattactattaacgtagttgagatccgtacatatctccgcacatgcggatcactgccgatctgcgtcgctgctagcgcgtaagagtagtgagcacccgtttagttaattatgacgactcgcgtcgctcgaactatattatcattctacaggttaacgcgcatctgtagatatgaacagagagaaagactctgcctactgaccgcgntaacgtcgcactctactgaccctcgtacatgccgcgcgatcggtgcatgtgtccaatcactgcactccgtactatcgatagacgtctctcactacgtctgaccaccaatcgatagaacgctatccgtagctcagacanactagcacgggcggtcgcatgtacgctcgacatggatcgagctgtcacgcgntactgatgtatgatatcatacagatgtgtcacacgtgactgcgtattagcgagtcacaccgcaaaacactgcatcgacatctgtccggtatcgncacttgagatacattgctcatctatattacactattggacatccactatctgtcgctctcaacgctgatgctatgttgtcatacgagatacacgattgnccgtagtcgctcatgattgcagttcgactgtgtg

SEQ ID NO: 681 - DNA, 1712 bp, Glycine max
  misc_feature (9)..(9): n is a, c, g, or t
  misc_feature (40)..(40): n is a, c, g, or t
  misc_feature (47)..(47): n is a, c, g, or t
  misc_feature (67)..(67): n is a, c, g, or t
  misc_feature (116)..(116): n is a, c, g, or t
  misc_feature (144)..(144): n is a, c, g, or t
  misc_feature (177)..(177): n is a, c, g, or t
  misc_feature (232)..(232): n is a, c, g, or t
  misc_feature (378)..(378): n is a, c, g, or t
  misc_feature (380)..(380): n is a, c, g, or t
  misc_feature (416)..(416): n is a, c, g, or t
  misc_feature (457)..(457): n is a, c, g, or t
  misc_feature (489)..(489): n is a, c, g, or t
  misc_feature (568)..(568): n is a, c, g, or t
  misc_feature (738)..(738): n is a, c, g, or t
  misc_feature (874)..(874): n is a, c, g, or t
  misc_feature (976)..(976): n is a, c, g, or t
  misc_feature (988)..(988): n is a, c, g, or t
  misc_feature (990)..(990): n is a, c, g, or t
  misc_feature (1039)..(1039): n is a, c, g, or t
  misc_feature (1048)..(1048): n is a, c, g, or t
  misc_feature (1184)..(1184): n is a, c, g, or t
  misc_feature (1246)..(1246): n is a, c, g, or t
  misc_feature (1270)..(1270): n is a, c, g, or t
  misc_feature (1276)..(1276): n is a, c, g, or t
  misc_feature (1319)..(1319): n is a, c, g, or t
  misc_feature (1372)..(1372): n is a, c, g, or t
  misc_feature (1421)..(1421): n is a, c, g, or t
  misc_feature (1435)..(1435): n is a, c, g, or t
  misc_feature (1489)..(1489): n is a, c, g, or t
  misc_feature (1493)..(1493): n is a, c, g, or t
  misc_feature (1509)..(1509): n is a, c, g, or t
  misc_feature (1678)..(1678): n is a, c, g, or t
  Probeset Number=SeqID_10460
cgtctagtngagcatattcgccgcgcaattacgtccatanagaggancacacgcctgtgcgagtgantagtaatatatagtagtcgctcgtgtactatatgcgtcaagcggagtgncacaagatatgacgcggatgagtacgtntaattttattcgtacatcgtagctcccgctacncgctctgatgatcaacgataccgcgcatacaatcatcgccaatactagtatgaantgtagacgcgccgactgcgtagcgcgattcgatacatatcatatattagccagttcgctctcacgacatcatgctgctgacgcgatcgtcactgtaaatacgctattatccggtataacgcgaacatatatcgacgcagtgcatgnancgcgcgtcgagctatacaacagtatatgtaacaatngataccgtacgacatcgatagttatctcactgctacagatncgcgtggtgtcgggttagagctcgcgtatacntatctcggcgcgtaccgcgcagtgacggcgcgggtcgcgtcgtgacgtattacgatgattctacgtatctactatctantatcacagtgcaatgaaaaatagctatatatatcgcacgcgctaacgttagcgcggcgtgtagtctcacgacaccgtatggagtcaacatcacgatatagcggaacgaatttccttatagctgcgtgccgcgtagcgtatcggtgtataattagcgtgacacacacgcanataacattaacacacgctcaatgtctcgctaactacagacagcaccactacaactactcagcgctatacacgcgcgacaccgtcgtagagcgatgtgcgtactaacttcaacgctatatatcggctcgcggccgantatatacgcgatagagcacgctacgcgtaaacattcgcgtgctacggttcactacacgcccgccatacactatacacgcgctacaccgcgtacgcgtacgancctcgcctgccngnagcagtcggtggtgagagtagggtggtgaggagtatcgtgtcagtgagngcagcgacncacgtaagcttaacaacgtatcactcaacatcacacacgcgcgccacacatattcctatattacagtacgtcgtgttcgagctgcggctcgttcgtccgacgagtaatccaatatctcacccacatgtatctaatnccaccgagtatcatcgacagagcgccaccgctccacgcacgtaccgctctgcgacaatcatnactgtcacgtacatatagagacanttatcncacgcgggtgataacacacagatatatatgcagcgcgtcgatntactgagataggagctcggcgaatcaccgcagctatgtctatcacaccacgcnactaccgtcgccacaccattgcgtcccaagcgagtgagcggcgattatnttcacacagtcgcnaccgatccgcaaaccagcacacaataacaagcggcagcgcaccgccgagatggngagnagagcgagagatcatnaaatcgagaatatcctcgcatcgggagggtgagtcgaagacgtagtatatgttcatgcacacgacacacgctgttcatatcgcatatatatcctccccgtcttctctcgccgagctggccgacgtatttggagggtcgctcgaccgcaccaccagatatgacactatancgtcgcgactaacaacacggcggggcgacacact

SEQ ID NO: 682 - DNA, 568 bp, Glycine max
  misc_feature (487)..(487): n is a, c, g, or t
  Peptide Sequence Number=SeqID_8957
  Probeset Number=SeqID_10461
catttacttaaaatgtcttatggtgccaaggtgttagaaattatagctgattttgcaaagcctactgcaccacttcctggtgtttcaaaaaaagttcacatgtatttacgtgtctccttttttaaattatttaaaattgatttataaaaatatgttaaattattaaaaattgatttataaaaatatgttaaattattaaaaattgatttattaaatttatcatattgttaactaaaattaacactttaattattctttatagaaaaatattaataaatgtcctaatgacactaattaaattattaaaaattaaaagtaattttttttattaaaagatgcaaaattacatttcatataaaatttttatttctcgtattatgatttacgtattaattctttcaaaaaataatttacatataaaaaatttctttcaattttttttcttttttcgtttttttattacaagacaaatattttggtatagcanagattttatactctattcaggattgggaggatgtcctgatctgcatagaagtcagtcaagtcacagatacgggcagcagca

SEQ ID NO: 683 - DNA, 415 bp, Glycine max
  Probeset Number=SeqID_10462
cacggcaacagcagctgccacctcgtgctttatggggacgcgtctcctggaggctcactcctgggcggggcgagtgcactcccgattctgcttctgcactaaaaaggctcccgcctcatagaaaacctccaggggatctggccgagacaccgacagacccctttggtatccggtcgaccgagcgcccgaatacctacatagcagtcttgtcggagatgaccggttcaatccgttcgtgctatggacacacacggagtgcctgcatttcgagctgaactgttctgaaccagaccctgcgcgatcaacgaggttggtgactatcattgtaaccaagaccgatctcgcggacgtgaatgtctaagcgtgattcagcccttcagtgatgtatgtgggcatcagatgttcacgtgagtgc

SEQ ID NO: 684 - DNA, 582 bp, Glycine max
  misc_feature (509)..(509): n is a, c, g, or t
  misc_feature (518)..(518): n is a, c, g, or t
  misc_feature (540)..(540): n is a, c, g, or t
  misc_feature (545)..(545): n is a, c, g, or t
  misc_feature (578)..(578): n is a, c, g, or t
  Peptide Sequence Number=SeqID_8958
  Probeset Number=SeqID_10463
tcgagccgctacgtaggctccccccccccccgctatttattcatttgtctgccctctctctctctctcctcgtatctctcatctccttgcatccatgccctaatacccttttctgcataccctctttcccccttttccattcctctcatgcaatccctctccctgcttctatttgatccatagcccacgctgcaggattggtgcaggctattgattctacgtttctaactttccataatacaaggatgcatatatgaacaatgaaagaaaacaaatcatcagcacctaaaatgcttaacaggaactgggttttaaagcgtaagcggagaaaacttcctttaggactagatcagtcatctggtaaagagcaatccaatggtaaagaagaaaattcactaacatctgaatcttctagaaatgcttcagctaaacgtgtgctaaagaccgaagtagctactgatcaaatttcatctaagaagaaaggaaatgatgggtattactatgaatgngtgatctgngatgttggtggcaacttactgngctgngacagttgtcctcgcacttatcatttacaatgncttg

SEQ ID NO: 685 - DNA, 1366 bp, Glycine max
  misc_feature (1)..(1): n is a, c, g, or t
  misc_feature (13)..(14): n is a, c, g, or t
  misc_feature (19)..(19): n is a, c, g, or t
  misc_feature (31)..(31): n is a, c, g, or t
  misc_feature (33)..(33): n is a, c, g, or t
  misc_feature (52)..(52): n is a, c, g, or t
  misc_feature (69)..(69): n is a, c, g, or t
  misc_feature (113)..(113): n is a, c, g, or t
  misc_feature (239)..(239): n is a, c, g, or t
  misc_feature (465)..(465): n is a, c, g, or t
  misc_feature (695)..(695): n is a, c, g, or t
  misc_feature (798)..(800): n is a, c, g, or t
  misc_feature (802)..(802): n is a, c, g, or t
  misc_feature (1366)..(1366): n is a, c, g, or t
  Peptide Sequence Number=SeqID_8959
  Probeset Number=SeqID_10464
ngggtgggaggannttccnttttagttagananacgaggcaaacataacttntatcaaccgaagcactncttccctttgtccatacggaaggactggaggactccctataccnaccgacggcgagacggcacccacgaagaagttgagtggagggaaacttatcagggagacaatccgactcatagaagggataatcatatgatctacgcgctgtagttaccgtctttgagggggcccnacaccagcgcgacagtgttatcgtggaaacagtcgtcaatattgttatatttacgttgaagcaaatatttcgtacagtcgaactaataacgttcatgtttctaatctttatccacaaccttatcttaggtcgttctcaggagaggtgagtaataaaaaactgcttgtgggtgtaggtgccttgaagaccgtacacccgttttatggaatcgggaatcatggatgtngcctcccggtcccgtctctacccacctcgcactcatttaggtctataattgtgcgtgggtgaggacggttcaggaggcgtcttatactatgtgttccggtcgtctacctatctgaatgacccacaatatcctgattctttaattacgagtgctcacccgcgtagggagtgagcggtggtgttgcgtctctgcgattcctattggcttagctcctctcgccggacccatantactataataaggcgatgttaagtagagaactggggggatgaagtctcgcaactgtagctgatgttcgtatgctctaatcctattttacaaaaccccctgtgnnntntttatctatatcataataagaaataattaatcatcacaatgtgctggagataaaaagagggcaccgacgtagatgtgtagaagtagtgaagctgcagtgcgagcattgtctctgtccagtagtcgtagctgcgagtggttgtagtgaaagagtacacatacctccatcacctttaagatcagataacctccaccaaccaccacacacacaggcccaagcacaataataattgatcataaattcacgttgctcggacactccgcacagtattgctcaattgtagcaggcagcacacgcgagatgagtgagagcgcagtgtcggctacggcgctaacgcgtgctgtagatcgcgctcctgtaccgctctattcttcccctaggttcctgtaccacattctcacttctaggtacgtccttcgtgcggtgcgtcaatcagcgtcgctagagcgcctctgactagcccacgcgacgcgaagtgtgttctccattcaactactatacatgcagtaagtcatatcatgacaagctcttgattagtccacgcacagagccgacgacgccgcn

SEQ ID NO: 686 - DNA, 726 bp, Glycine max
  misc_feature (539)..(539): n is a, c, g, or t
  misc_feature (726)..(726): n is a, c, g, or t
  Probeset Number=SeqID_10465
cccgagccggaggtggacgaggtaagaagaagcagccgcagccgcagcgcgaccccgcgaggaaaccctaccgccgccgcagaaggagcagccatgggtatcgacctcgtcgccggcgggaggaacaagaggaccaagggcgtcgcgcccaagtccgacgatgtctacctcaggctcctcgtcaagctctaccgtttcctgggtgaggaggaccaagaggaagtttcaccgccggtcatcctcaagagggctctttctgaacaaaaattaaccgccccgcggttctccatggcgccgcctcttccaacttcatggaggggaaagggagggaaaaaaaactttttgctgggggttggttgggaaccattccacagttggccttgggggattcccaagagggccccccagcaaagtgaagggttacccgctttctcgaggtgttcacaagaaacacggggggggggcaaaggaattttgtccaaatggcttgggggggcgaagtgcccctccctttttttgaaccaggttttggcaccctncgtggccctccaatgtgggggaaaaaaacccttttctttggtttgggggggaaacccccaacaaagggcctcggtgggagggggtttaacctcctctttccgaccaaaaggcccctgtgggtgtggcccgcaaaagtctcttagccaagtgtccttttttttgtctcctcccacgaggggtaaaatn

SEQ ID NO: 687 - DNA, 1344 bp, Glycine max
  misc_feature (10)..(10): n is a, c, g, or t
  misc_feature (18)..(19): n is a, c, g, or t
  misc_feature (1166)..(1166): n is a, c, g, or t
  Peptide Sequence Number=SeqID_8960
  Probeset Number=SeqID_10466
ggcccccccncccccccnncccccccccgtccgccccccccgcccgccctccccggcccccttcccccttctttttgtttctgcatgacttcttacctacaggaaaacttctttttgaatattaggttttcagcaatgtggtatcaatctcgtgagctgcctactaacactagtatacgtatgtatgaatttatttccccctactgccattctcccccacaacaccacactgtgataataaaggaaagccccataccaactgaatgctctgacactataatcactttattttccgcggtatagttcccgccccgcgcgctgtcagggtgggagacccttttctctcgcgccgccgggggcgtcgcgcgccctcccttacactatgcgcgcccaccgcctcggccttatatgcccgcgtctccttctccaaccacgtccacagacgcaacccgcgctaaagctgcgtgccccccgcccgcgcaccgacccctagtcctccacataaatgactaaaaccatactgtttcttcttgattttcagaagttatgatggataaagtttgctaaataaacccacccaacatgtcagcgtttaagataagggagaaggatggggtctaactttgctgttcacgattacctcactgtacagacaggcgtttgccgtgtcttcttcatccacactcctcctcgatcctctgtctttctgtatataaaaactgcgtctccttctaacccacccactcgctaatttatcactaaatactgtctccccatttgtcgtttgttgatcggagaacgccacattactatcgtgtgctcctctaatcacccggactgcactcctacaccctctacgctggttttgtcacataaaaaaacgcaacagtcacacctatacacttcttcatccacattcatcctccgatgacgtcaggtaatgaatgtatcttccagtgtcgactcctctcttaaccgctagttctcgttcctctatgctcctcgatacgcttgcgcgcaccagtccttctcaccacctaagcgatcactgctcctttcttgaaaccgacccacccccacaatcgcacaggcccagaatatttctcactcttctttcagttgtcaaatgccgatagctccacgacaagaacccctaacaacccttntctcctccgttcaattcattactataattctgactaagcgggatactacacatacaccatgagtccgctgatccggtagcactccatctgtgatatatatacatctgtagtttatcccccctccacgccgtggccctgctcccgcgcagagctacgctgtcatgtgctgaacctctcg

SEQ ID NO: 688 - DNA, 1169 bp, Glycine max
  Probeset Number=SeqID_10467
atttagaagttgaatcggtgctacggggtatggaggcgaagacacatggcgaggatgaatccgcataactcaaccgccgatcttctttcggaatctctccaagctgctaacgagccgtctgatgtagccagcaagaaccttagttgcggtcaaatcaccaacgaggaagatgaatctcttgacaagcaaaacaagtgttgtagtgacattgtctctgacagttgtaaagatgattcaaattacaagacaggactcaattgccatcaggaggaccagcggaggacgagtctagtagcatcgattgtggagacatctcacgacgctcccactaggagaaccattgatcttggtcatggaagtgacctcatctacatccagaggtttcttccctttcaaaagtcttggactttatttgattatctcgacaagcatattccttggaccaggcccaccatccgcgtctttggtcgttcttgcctccagccaagagatacatgttacgttgcaagtagcggattgactccgctaatgtacagtggataccgacctgatgcctattcttgggatgactttccacctctcaaggacatccttgatgctatttgcgtagcgtttcctggaagcagattcaacagcttgcttttgaataggtacaacggcgccaacgactacgttggttggcatgctgatgatgaaaagctttacggccccactcctgaaattgcttccctctcttttggatgcaaacgtgactttgtgctcaagaaaaagaaacttcaagactcttcccgtgagaaaagaggagagggtggaccagcgaagaagaggttgaagaaaagcagcagcggagaggaggatcagcatagtttcgcattgaagcatggatcgttgctggtgatgaggggatacactcaaagggactggattcattctgtgccaaagcgtgcaaaggcggagggcactcgtatcaacctcaccttcaggcttgttttgtaaaccatgcatcattcatcattcatcatcatcatcaacaagcttagcttgatctcaagtcacattgattgactaggcttttctcatcttagttcttcgacatgagatataacatataagttggtgtagacattttgaaaaatcttaattactaattaacgtgaagattattaagg

SEQ ID NO: 689 - DNA, 1768 bp, Glycine max
  misc_feature (111)..(111): n is a, c, g, or t
  misc_feature (125)..(125): n is a, c, g, or t
  misc_feature (307)..(307): n is a, c, g, or t
  misc_feature (311)..(311): n is a, c, g, or t
  misc_feature (372)..(372): n is a, c, g, or t
  misc_feature (566)..(566): n is a, c, g, or t
  misc_feature (674)..(674): n is a, c, g, or t
  misc_feature (1364)..(1364): n is a, c, g, or t
  misc_feature (1368)..(1368): n is a, c, g, or t
  misc_feature (1414)..(1414): n is a, c, g, or t
  misc_feature (1463)..(1463): n is a, c, g, or t
  misc_feature (1473)..(1473): n is a, c, g, or t
  misc_feature (1514)..(1514): n is a, c, g, or t
  misc_feature (1626)..(1626): n is a, c, g, or t
  misc_feature (1631)..(1631): n is a, c, g, or t
  misc_feature (1738)..(1748): n is a, c, g, or t
  misc_feature (1757)..(1768): n is a, c, g, or t
  Peptide Sequence Number=SeqID_8961
  Probeset Number=SeqID_10468
ctcatgaatgataggagaagcagcgagacacatatatctagatcagaagacgatagagatgagagaagtatgatagacggaccggtaagtgtgcgtagtatagaatcgtgntgctatgtatttanccatttatcaactagtaatctatgagtctataatcgtcagtgtcacatcagttcggacatactcataccaatcacatgtgatgacgatggatctgttagctggacgttgtgatgtgtgactggttgctaggctgtgagatgtactctgatactgacgtgtgtgatgagcatatcatcattangctntacctaccatatcgtgaagcgctgtggttataggtttctgtggtagcgataggaagtatanactcatcttcgcttactatctagagatcgctctcgtatatcatctcacacgagtatgtgtcatatacgctcacggcgtggttgggagatgagtcatatgtcacacacgacgtgaatagcacgtgcagcgaacagccgacaaagcacacgaacaccatatatactatattaactgctatcatgtagagagcaagncaggcacgttgtacgtataggatactaatctatctcatctacgtgatcgaggagtgtggaatgagcaggagaggtgaggaggtagacagagaatgcagccgaagtatnataataaggatagtagggtcgttgctgagtagaggcgagagtgtgtgtgaagaagtgtgtcgtggtcatgtagatgtggcagagatagagaagcagtgtggtgtacggagatatacgataacgtagcgatagatatttattaatatatatctacagattagcataacatgacaaatagatttatacgatccgcaagctacaagtaagatacatagttaccacatatagtacaagtacgcatagttattagtgatgtgtgtgtgaggatggtcgcgtgggacggtgagtttgggcactcgcctcggcgtgagttatggtttgctcgcgtgtgagagtggtatcacgtagttgtggccgtcgcgtgtagtgattgtgctgcccgcgctgtaagtcgtgactatcgttgcgagcgagttgatcggtgggctcgtgaagtgcgacgacatacttgtcgtgccatttgtataatccgtgtttctctcacatcactctcataagcgtccactctccggagtaggatgacgtctcgcactcgcgataagtctagcacgctcgagttatcgtaagtatcgcgcgagcactggatatattacgtatgtatgatgattatgattctcctcttatcattatagtgtcactagtctacctgcgtgtctaacgtcgtccaacaacctctattctacgaagaantcancgcaattatagtatcacccacacccaatcaaaccccaatcatcacnatatcaagagaggaagaccggcagaaagtatgtaatatacatcatctanatagaagaanagaaagtacgataacacacactcaacacaacacaattaatncaagataccaattcaattccatcagtaggcagacagagtctattcgttagtattagtgtgtgcttctccgactcccgccatgttccgtctctacacatccgctctgctactntcttncttattatacatagaagctccgtctcggtccctcaccttcgttcggattcgtcacaatctatttgtatctcttcttcctctctcttatcctcttccctctccctttnnnnnnnnnnntcccccccnnnnnnnnnnnn

SEQ ID NO: 690 - DNA, 937 bp, Glycine max
  misc_feature (26)..(27): n is a, c, g, or t
  misc_feature (29)..(30): n is a, c, g, or t
  misc_feature (38)..(38): n is a, c, g, or t
  misc_feature (130)..(130): n is a, c, g, or t
  Probeset Number=SeqID_10469
gcggcgcccccacgcggccggggggnncnnctcaaggnattcatcttggaggtttcttaggggggggggcggggggtaccctaaccagccccgggcggggggaagtacacctacagcggaccgagggcanccgaaccgaaaaaacttcatagcaaaaacgttttctcaaaacaagcagggccacgcagctgaatcatattcactccaaaaaaaaaaaaaaagctcagagagagagaatggggaaaagacaaatcccagaccctccgaactttaagaaatacggcgttcctttctactccgttgcgtggattccccaacacgttgtcaaatcgcgccaaatcgaaaccgccgatgagtcctcggactccgatcacagcacttcgccggcgaccgaggcggagaaggaacccgcgacggtcgccggtaactacctgctgctcgccggcggcggcggagcaggccacagcggtatccccaatgctttggttattgcgcacttccatgtcgcgtcgaattctctctctgatcaaccggcgtggaagccaggaactgattctgaatcgccttataggatggccctaaactctaatggagatggccttacttgggcaacggaaacgcccatgggttggacagggtttgactgggatccaaacaagagctcggaaatccaaagctgagtctgaaggtgacagagaaagggctcctcccggttggagggagccggccagcaattaacattggcacccaacaaagaagggacctgcacaacctgctgggtggggaggagggcaatcaaaggggcttcagggggccaaacaagggaaatattctcacaaaaacaaaggcccatcctcttggaaaggctcaaattccagggccgggggaaaaaacccgcccccctgggaaaggggggcccctgccaaggttgggacct

SEQ ID NO: 691 - DNA, 1519 bp, Glycine max
  misc_feature (3)..(3): n is a, c, g, or t
  misc_feature (23)..(23): n is a, c, g, or t
  misc_feature (228)..(228): n is a, c, g, or t
  misc_feature (250)..(250): n is a, c, g, or t
  misc_feature (255)..(255): n is a, c, g, or t
  misc_feature (262)..(262): n is a, c, g, or t
  misc_feature (292)..(292): n is a, c, g, or t
  misc_feature (344)..(344): n is a, c, g, or t
  misc_feature (447)..(447): n is a, c, g, or t
  misc_feature (511)..(511): n is a, c, g, or t
  misc_feature (550)..(550): n is a, c, g, or t
  misc_feature (556)..(556): n is a, c, g, or t
  misc_feature (581)..(581): n is a, c, g, or t
  misc_feature (663)..(663): n is a, c, g, or t
  misc_feature (681)..(681): n is a, c, g, or t
  misc_feature (754)..(754): n is a, c, g, or t
  misc_feature (839)..(839): n is a, c, g, or t
  misc_feature (853)..(853): n is a, c, g, or t
  misc_feature (1053)..(1053): n is a, c, g, or t
  misc_feature (1152)..(1152): n is a, c, g, or t
  misc_feature (1174)..(1174): n is a, c, g, or t
  misc_feature (1291)..(1291): n is a, c, g, or t
  misc_feature (1343)..(1345): n is a, c, g, or t
  misc_feature (1348)..(1348): n is a, c, g, or t
  misc_feature (1373)..(1374): n is a, c, g, or t
  misc_feature (1396)..(1396): n is a, c, g, or t
  misc_feature (1413)..(1414): n is a, c, g, or t
  misc_feature (1416)..(1416): n is a, c, g, or t
  misc_feature (1426)..(1426): n is a, c, g, or t
  misc_feature (1428)..(1428): n is a, c, g, or t
  misc_feature (1433)..(1435): n is a, c, g, or t
  misc_feature (1450)..(1450): n is a, c, g, or t
  Peptide Sequence Number=SeqID_8962
  Probeset Number=SeqID_10470
canccgagcacgctctagccacngtttgtgtatttggtgcgtgcagcgcgcacacatgtggatagagagtagagtgtatagtaagagtttcacatctcataccgcgattgtggtatgtggtggtgtctatgtatgaaccatatcacgcatgtgtgagtatgaaaatctagtaagccggagagtatgtgttgttatgacgacatagcataatatatgatatccaacgtngtgatatgatcgtcgtggtctngtgtnttaattntctatcgcggcttgtgttgtatcatgacgncgcaccacagacaataccttatataacatatcgagggcaggtggtgtctctnttgatcataaggacagatggtgaatagtgcgcacatactaccacggtatatgtcaatagtaattatactcacgcagagcgtatatatcatcgtgacgcgtgangattgcaccataagacagcatgagagaatgggggtagtacttaaagagagcgagatgtgcgggntgtattggtgccgcgcaagacgtcagtgtatttagtatntgtgtntttatgagtgtactataccacatcngtgttgttgtggtcgcatcactatatattatcaccgcccggttacatactaccgaccgtgctctttatgactacaagttgtngttgtgagtgtagtatgntatcatgcacggaggtgttgaagacctatcgaggtgtgagtggtatagtatactcatgccggtagttttgatnaccatataataaataattatcaccacatatacaagtctccaggagcgctttgtagtttccggaggggtgtttgtcgcacgggttnttgtgatatgtagnaatgttgtgattgatgtattgaatagttatagtgacgatattgaatatattatatatataatacacctatattgcgtcttggtgtgtcgtcgattgcttgtgtgcgttttttttatttctcgcgtgtgttagatagaccgacagttggtggggtggtgaacagaagaagaaagtcaaagtagaggttgtcccaccgcccnctcgtagtgtcgggttttctccatggccggcgcgccctgcacacgggcggcaccggccacagcgagcagaaatggagggatacgcccgacgaaagcganacacagatatagcacaacgcgngagactaacgagtagtcatgtcccagagtgtatttcactcctctcatagagtccgatttggatcacttaattcaattttatatctcgcgccgcagatttagaatcgcccagctcatntacaacccagattatcgtcaacctaagtgcacaccaatatgttattgtgtcnnnttntgttccacaactattacgtaaaaanngacaatgttgatcaacacaaangtttttgctcgtcgcgnncntttgtttttntntttcnnnttttttaagcgccgncctgtgaatgcagaaatgatgaggtagtcagaagaagggagggggcacaccacaaacaaaacaaaacca

SEQ ID NO: 692 - DNA, 1476 bp, Glycine max
  misc_feature (19)..(20): n is a, c, g, or t
  misc_feature (22)..(26): n is a, c, g, or t
  misc_feature (28)..(30): n is a, c, g, or t
  misc_feature (34)..(34): n is a, c, g, or t
  misc_feature (50)..(50): n is a, c, g, or t
  misc_feature (70)..(71): n is a, c, g, or t
  misc_feature (75)..(76): n is a, c, g, or t
  misc_feature (79)..(80): n is a, c, g, or t
  misc_feature (82)..(82): n is a, c, g, or t
  misc_feature (84)..(84): n is a, c, g, or t
  misc_feature (86)..(86): n is a, c, g, or t
  misc_feature (88)..(88): n is a, c, g, or t
  misc_feature (91)..(93): n is a, c, g, or t
  misc_feature (96)..(96): n is a, c, g, or t
  misc_feature (101)..(101): n is a, c, g, or t
  misc_feature (250)..(250): n is a, c, g, or t
  misc_feature (254)..(255): n is a, c, g, or t
  misc_feature (477)..(477): n is a, c, g, or t
  misc_feature (505)..(505): n is a, c, g, or t
  misc_feature (512)..(512): n is a, c, g, or t
  misc_feature (689)..(689): n is a, c, g, or t
  misc_feature (854)..(854): n is a, c, g, or t
  misc_feature (1033)..(1033): n is a, c, g, or t
  misc_feature (1182)..(1182): n is a, c, g, or t
  misc_feature (1215)..(1215): n is a, c, g, or t
  misc_feature (1347)..(1347): n is a, c, g, or t
  misc_feature (1374)..(1374): n is a, c, g, or t
  misc_feature (1407)..(1407): n is a, c, g, or t
  Probeset Number=SeqID_10471
ttttgggggccccgggacnntnnnnntnnncctntctcctctccttctcngtctgcccccattccccccnntccnnacnntnantnanatnnnaanactantagggcgagtcgcactaccattcgggtaggcgaggaaggcagggtgtgtgagcggggagtgtggcgagtggagagaggcactgacggagaggtgccaggcccctcccccttgggctcgctcggcgctcgccacggcggggagggtgggnatanncccccgaccgcatatatctccacatttattacggtctaataactctacgcgggacaaggagtaggaagggggagagggacggcggagaaagggcggagggatagagggtgagacgcatcgggcagctggagaaagaattacgagggagacaagcagactcaataacatagagaaagacatcgaaataacggcgagtacaactcgtactctctcctgctgagntctcttaaatctagctcacggagtttanaatacantgagcgaagatgacaagtagtgcaactaacgcacgactctctacgtgactcacatacaataaaccacaacctctaccacttggtgaacgctgcgttatcatgttgggctggcgctcgtgctgctcgtggttctatcgtatacgtggaagtagaagataataggtaagagaacagtanataggatggagagtcaagacgacgaggatgctgcgacgtagctacatgaactctggtacgagcctcgcggacgcgcactccgaccagacacatatcatcatacatcaatgtatatccttgaacttcaacatgctatccattcgtacgttccgccgatgtctatangtgtgcataccgcgcaccgcagatatcacatggagcgtgtaggtcagacctcgcgcgtgcgagtgcagagtgacgtacgagacggcacgcctcgacgttgaaagagagatagggtggagcgagcaatatctagtagagaggatgtaacaagacgtcgtcatgcgcgtagaagagttgtnatggactataacgttaagacaaacgagtgcaacactcaagaataacgagagaagagatgagaccacgcgcaccttattgacctcagaacgcctactgcgctactgcttcatgccaccatatacggtcaacaatatacgatactggacanatacatccagtagaagagcgcagtgagctgaangcgcaattgatgaatagtgtgcgatcatgtctgtggttatgataatatcaagactcgatacttggtaagactgccgcacgtatatcagcacaatcacgacacaatatgaacaagataggtggataggaatgncgtagcacataattacatatatttatntaactgtatgatgattgcagcatactcacacantggacagagacagatgtgtaagctgaaacggtgatgtggtatgagcgctactcacatcttcactacttg

SEQ ID NO: 693 - DNA, 461 bp, Glycine max
  Peptide Sequence Number=SeqID_8963
  Probeset Number=SeqID_10472
aattttgatcggagaaatgatcaaattgtgaatctcgtaatctttatcttctctcaatctcaatctcctaatctttttcttctctcaatctcaatcgcttaaacaccgttgaataatcatgtctagttcttctcaatctcgttttgccactcggatactgttgggttctccacaatctcgttctctcttgcgagcattgtttgattctcccaaaacagttggcgttaaggttcgtgaaataacacatcctggtgtcaaagtgtccaggtttgtgttagaattttccaacctgccggaagaagaatcggatcgacggaaaagactactgaatattctatcgacaaagttgagaggcggtgctagaacaaatgcagatactcaggaacaccccgagtgccaaggagatagatatagtcacaagcgagtgcgtactttgatgtccatgaggtgatttttttatc

SEQ ID NO: 694 - DNA, 1938 bp, Glycine max
  misc_feature (1624)..(1624): n is a, c, g, or t
  misc_feature (1629)..(1629): n is a, c, g, or t
  misc_feature (1754)..(1754): n is a, c, g, or t
  misc_feature (1805)..(1805): n is a, c, g, or t
  misc_feature (1809)..(1809): n is a, c, g, or t
  misc_feature (1813)..(1938): n is a, c, g, or t
  Probeset Number=SeqID_10473
ttttactgctcctcaccagcctgatcatattgtccttatcacagcggtaagtgtattcatcaacattagtagatcatgtcttttatctgaatttgtgttgtccaatattgaggtcgtacactttgtgattgtaatccgtaatcaatcaattttatttacattgagaagcttaaaaaattaacaatggtctgtgtttgtggttcattgtttctatcatatgaccctccacagaactatcatatgtgactagtctagtgatatttgttttacttgtttatatattataattgataccttgtgtagggaccacaaaatcgggaagtaaagctttgggtctcagcaagtgacaaaggttgggtgctcccaagtgacactgaatcatggaaatgcactcagacattggagttgaagagttcagctcaaccttctatggatgcattctttaatcaagttgcagcattgtctcatgcagcaggtctgcttttacttgcaaatgcccagaggaatgctatatatgctgtgcatttagaatatggttctaatccagaatcaacacgcatggattatatagccgagtttactgtgaccatgcccattctgagttttactgggaccagtgatatattgcctcatggtgaacatattgttcaggtttattgtgttcagacacaggctattcagcagtatgctttggatctggctcagtgcttgcctccgccatatgaaaatgtgggactagagaattcagattccagtgtttcacgcgatcctagtactgttgaaggattccactctttagattcttctgcaggtagaacaactgaaatgtctttagccagttctgctcccaaaacaatgttacaaacaagtagtaatgagggtggacttgtggcacgataccctttaagctctggccatgttgaggcacctatttctagaggaatcagcagttcaaatactgaagacacacttactagattatcattctcaggctccactcgccttctcgcgccgccgcttccgccggacatcgttgccattggcgttgtcattaccgcctttttcttcacgccctaatgcagttaactctagcttctgcacaagatagattatgagagagggcttttataaaaaatattccaaaaatcaaaacagccggcagccactgcttcaacagcgtcgccgccgtcgtgggctcgtttcactgttgccacaccttaagccatatctcgacgcgccgtcacggttggtttccctctcacccaggcttattgctggctcatcactggtcagttcaggattgacgatggaagcgatagtgaaaaaatttcagtcaaaattcaggaaagttagggaagaaatgagtcgatgggatgagcttcaatcttgcttaatttcacagtttaggaatgcttctcatattgttgataggttgcaggtgcttcaaaattccaacaattatggtgttctaaattgtgccagtggcctgaaagatgctcttttggtaaagcagattgaatctttggaggaacatcttggtttccatgagaaagacattggaagaatttcattgtattgtcttatctctttgacaaaattcaccggggatagtagacaacaaggngaaangggggttcttgtcacctggaacatggaaacaattgcagcaacaaattggcatcaaacctagtcttatttattgcttggataagcctgatgtttatacccgagatatacaactctggggtatttanttaaaggcatcagtggatctcacccctatcagaaatggccttaaggcccgngggnaggnnnnnnnnnnnnnnnnnnnnnnnnnnnnnnnnnnnnnnnnnnnnnnnnnnnnnnnnnnnnnnnnnnnnnnnnnnnnnnnnnnnnnnnnnnnnnnnnnnnnnnnnnnnnnnnnnnnnnnnnnnnnnn

SEQ ID NO: 695 - DNA, 1502 bp, Glycine max
  misc_feature (58)..(58): n is a, c, g, or t
  misc_feature (70)..(70): n is a, c, g, or t
  misc_feature (190)..(190): n is a, c, g, or t
  misc_feature (246)..(246): n is a, c, g, or t
  misc_feature (789)..(789): n is a, c, g, or t
  misc_feature (1213)..(1213): n is a, c, g, or t
  misc_feature (1215)..(1215): n is a, c, g, or t
  misc_feature (1217)..(1217): n is a, c, g, or t
  misc_feature (1225)..(1225): n is a, c, g, or t
  misc_feature (1345)..(1345): n is a, c, g, or t
  misc_feature (1416)..(1416): n is a, c, g, or t
  misc_feature (1488)..(1488): n is a, c, g, or t
  misc_feature (1497)..(1497): n is a, c, g, or t
  misc_feature (1502)..(1502): n is a, c, g, or t
  Peptide Sequence Number=SeqID_8964
  Probeset Number=SeqID_10474
gtgttatggtgtgctctaacctatcgcccctgctctggcgcggcggtgcacgacaacncctatatctatnatctctctattaactaacaccttccctgagcgatatgcttcgcgaccataggtctcccctctatcttctcctgatatgacattcgaaggcagtatgcgcccacagcgcgggaaacacatnggtgaggtcttggatcgtcatgctggagggcattctgagtttctccggcgcgcagncggttacgataaatatgatagtagctcgtatgcacttgtaatatcacgccgccctgcgctcaccacacagcgctgcttgtatctattcgtaatattatacacgacgaccacggccgtgagccacgtgactgtgtgcgctgcgttattaattttatctatctatttatagctcgctgtcgctccactcgtttatgttcgtccgatcgccgtctactcgagatggaagataggcgtgtggtgtgtaggttgaatgttgtgttcgtgcatcacaccgagtaaataataacgaggagtgtacacttgacaccgtcgtcgcagcagtgtagtgtctgtgcctgctgtcagtatgaacgctctcataccttatattattatatatatcacaaactcgagccttgcgtgagtcatgagtgtctacagggcgtacgtctcgttcctcgtattgtgctcgcggcggagtatttatatgtgtgcgcctgtctaatcgcggcactatgtcacgttacactacacgtgagtcgacgtttgtgatgcggtatcccncttgtatacgcggtctccatgtttcgtgattatgatgtatgttgtagcgcgccggtgctacgtctgtgtgtgctcattccgaattaatatgataagaagatcgtataggagtaccaggtgggattgaggttgtagagatacagcccatcgtggcaccagcctatttgatcgagccgtggagtgctgtgtcgccacacatacattatatccgcttcatgctgtataccactgtctagcccgtgtgtactcactataggtggttggtgtcgctgactatactgtgtcagaccgacacgtcagctgtggtggcgcgacacctgctcctcctaaacgaaatattttcttcctcgcaacatatcgaggcgagtgtccgcgaggcggctccattgttgtgcgccgcgcgcttgatttatcccatactacnanantgaatatnatcgatgtctggccggatcggcgatgatgtggtagcgtgtatactgctacgcgcgagtcttcgctgtgagcgagaatcttatatacgatgttcgcgatacgagccgtcgcatggcagcgncagtccttcagacgaaatctgagatctgatgtacatagttagatctgtagtgtgtaagtactgactcctgncctgtgtcattgtaggcatccaatgtacactggtatagagatggtgatgcgacgcgcgtatagcgacgatcncatcgcgcncagcn

SEQ ID NO: 696 - DNA, 1805 bp, Glycine max
  misc_feature (1)..(1): n is a, c, g, or t
  misc_feature (12)..(12): n is a, c, g, or t
  misc_feature (126)..(126): n is a, c, g, or t
  misc_feature (132)..(132): n is a, c, g, or t
  misc_feature (207)..(207): n is a, c, g, or t
  misc_feature (219)..(219): n is a, c, g, or t
  misc_feature (289)..(289): n is a, c, g, or t
  misc_feature (333)..(333): n is a, c, g, or t
  misc_feature (482)..(482): n is a, c, g, or t
  misc_feature (521)..(521): n is a, c, g, or t
  misc_feature (1056)..(1056): n is a, c, g, or t
  misc_feature (1348)..(1348): n is a, c, g, or t
  misc_feature (1369)..(1369): n is a, c, g, or t
  misc_feature (1417)..(1417): n is a, c, g, or t
  misc_feature (1545)..(1545): n is a, c, g, or t
  misc_feature (1549)..(1549): n is a, c, g, or t
  misc_feature (1590)..(1590): n is a, c, g, or t
  misc_feature (1620)..(1620): n is a, c, g, or t
  misc_feature (1727)..(1727): n is a, c, g, or t
  misc_feature (1747)..(1747): n is a, c, g, or t
  Probeset Number=SeqID_10475
ntatatatatgntgatgtatatacagctgcgttgctcgcgatcagtaggtgcgtctcaatagcgtgtacatgtagtatcatagaattgcagcgtgtatcgaggaggtagtaagatacgccaccgancgctcncactcgtagtcgaatgtaaatgtaagtacgatatgttgagatgcggtgtagacatcacatatcgtgaatacaatnctttctcgagancctcgtcgtcgtgtgtatactgtatcgcgagcgtattactatactatcatacagagtagcatctatatgntgctgaatacattctgctacgatacatacatctcagatctctgncgtgtgcgtagtcgacagagataataaacaagcgcgtaggtgtgtagtggactatatatatatagacgacatacgcgcagaacaggtttcgacgtcaacgtacagtatctgaacgctcactatactgcatgaagcactatatgtcagantgacgatactacgcgctgtcttgccgtcgacatgaatantaagaggcgtatgtcattcacgtccaatatgttcgtaaccacatagatagtataccatacagtatgggcgatgcgtgaggtgccgcataggtagtacagacacatgtacttctctatcgtaaatattatctatttactcactgtactcgtgtcgccctatcctgatactaatgaagacaggtgcactgagtgacgaaatatcgccgaatatagtcatagtagtcggcgtcgatatagtgtgacatatgctgcagcgataatacgcgtagcaacacgccgcatctcatactccgcgcggaatatagagagtgtacacggataacatagtatgttaaatgcagtctctacgtgaggcgcttcctcatgtctctgcgagacacagtgtgcacggatatcggcacaattctatatacccagtcgcatctcatgatgcaatttctcgccgtcatgtcatctgagttacatggcgatcgggctgtgtctgtagtgtgatgattacgtctgctttatcgtggatacttgcgtcgagcagaancgagatctctcacaagctccacagctagctacagcgtcttatatgcgcgctcagcgtgtcacgctctcggtagcgacaccgcagcgaggtgccgcgagcgtgctgatctgactgtagactactcgttcatgcagacttcacacagcagcgagcgtgagacgcgtgcacgtagtatgatctccgagatcatacctacactaacttacgacgccgtcgtgtgatgacgtatatatgtcaagtgatctgcggcgagtagctgcgtatgcgtcatcttagtatatgtacatgtgcntccatgcagcgatcgtcactngtaggtttagataatgacgttccatacactactatcacatctgtacanagtgctatgagatagcgacgcagcagagagtgaggagagctatatataaagtcgatagcgactcaatcatattgctcatacgcggcgcgcgacagcattaatatatatcatgatctgagtgaagttgngagnagctacttgcttacgaagtatccgtgtgctgcgtcgcatanactcatgatctgcacgtctgtagcagtcgnctcgacgaccatcctcagcctcgtgatagtatagtatacacggatgccacgcgagacagcagcgatgagtagacctgcgtgacgtatgcgtgttagtaatacattantgcgctcgcgcgtcgtttgnaggtcgtatgtgcgtgttgtctgcgtgtctacactgctactgttccttacatcattac

SEQ ID NO: 697 - DNA, 1458 bp, Glycine max
  misc_feature (1)..(1): n is a, c, g, or t
  misc_feature (67)..(67): n is a, c, g, or t
  misc_feature (153)..(153): n is a, c, g, or t
  misc_feature (479)..(479): n is a, c, g, or t
  misc_feature (582)..(582): n is a, c, g, or t
  misc_feature (584)..(584): n is a, c, g, or t
  misc_feature (592)..(592): n is a, c, g, or t
  misc_feature (606)..(606): n is a, c, g, or t
  misc_feature (633)..(633): n is a, c, g, or t
  misc_feature (816)..(816): n is a, c, g, or t
  misc_feature (837)..(837): n is a, c, g, or t
  misc_feature (1065)..(1065): n is a, c, g, or t
  misc_feature (1109)..(1109): n is a, c, g, or t
  misc_feature (1196)..(1196): n is a, c, g, or t
  misc_feature (1241)..(1241): n is a, c, g, or t
  misc_feature (1255)..(1255): n is a, c, g, or t
  misc_feature (1383)..(1383): n is a, c, g, or t
  misc_feature (1402)..(1402): n is a, c, g, or t
  misc_feature (1405)..(1407): n is a, c, g, or t
  misc_feature (1411)..(1412): n is a, c, g, or t
  misc_feature (1418)..(1418): n is a, c, g, or t
  misc_feature (1443)..(1443): n is a, c, g, or t
  misc_feature (1451)..(1453): n is a, c, g, or t
  Peptide Sequence Number=SeqID_8965
  Probeset Number=SeqID_10476
ntatatatattagtataccgtagctacgcatatgtagatagtcatctatcacgcgagagtgcgcgangggtgctgagtgtcggtagagacgacacacactcacgcgacagaactatgtcggtactttgtatgtgtgacacgtatatgtatgtntatcataattctgtaatcatgcgtaatctcttttttttttatatctcgcacgagatagatgctcgctgcactatgtgtatagatgctagacgaacatatggagaagagactcggacattatgtctttctatcagagatcggtttgcgtgctctcgcccgccgcccgctatctagatatgatatccgaggccacgacgacatcgaatgacactgaccactatattgttttctggctcgtctctgtgtgtttattctcgccgccgatacagcgcggacacacagttacatgttagtcgtctgtgtttgcgattaagatattgacgagncccatgttgtctttactttttcatatcttctctatctcgtcactcgcacgctagtgtgtatatacacattgtcacatgcgccacacaaacaccaacacaaatngntttttttntttgtgtggtggcngcgtttgggtattgttatataagcccnctctatttgttcccgcgccgcatctattctcattattatttatattcgactctctcttatttctctgtgttcttcccactatccgttcactttctttgtgcttttgccttgtctgtttttatcgttatgaattgcaatgacctacgcgagtctttatcttacatgtgtattttgtatttattntattttttctcgctctctatncttttatatctattttattcttatggtatccacccatctttattgttctcacaccctatttatattatatttatatctatcatatattctgttatcaataccacaaaaacatacgacatccgacgcaccgcaacgaaacataatatacagaccacccccctgatatatctatagggtgtattcacgaccgattttattctctattattatattcaccaatataatatncctcaggtgcacaagtgttggtcgtttggctgtgtcttatcacntctctgcgtttagtttagaattattcttattattcacgcgcgcacacgggcgcgggtgttttactcggaggagcggtggataagagnttataggagatgaagtagggatattgtagtaagcgtggtgcctgntcttgccataattntatggatgcgtgttttctctgctgaggagtctggttgacgccgacggttcgttgttttcgtttacaaccgcgatattttctaatctctattttaaatctcctttgttctttttttttttttttagtantgtggtgttggtgagaatnaannncgtnncatcgntaaaaagaaaaaacatcaaccaaanaacccccnnnttttt

SEQ ID NO: 698 - DNA, 441 bp, Glycine max
  Probeset Number=SeqID_10477
aaaacaatctcggaaaaagatgatcgtctgcgtcgccgtcgtcggccaccagaacaatccgctttacattcagagctttacggaagctgaagatgcgctaaagctccaccacatcgtccactgctccctcgatgtcatagatgagcgagtgaacaatccgagcaagtcaggaacgacaatgaacgaggcatttctaggtctgctatacccagcactcaactacaaagtgtatggttacttgactaacacaaaagtgaagttcatcatggtcacttctgatttggatgtccgagacaccgatgtccgaagtttcttcaggaagttccatgccgcatacgtcgatgccgtctcaaaccctttccatgttcctggcaaaaagatcacttcccgaaccttctccgaatccgttaccaacattgttagctcttactctttcaactg

SEQ ID NO: 699 - DNA, 394 bp, Glycine max
  misc_feature (42)..(42): n is a, c, g, or t
  Peptide Sequence Number=SeqID_8966
  Probeset Number=SeqID_10478
ccaaaaagagagagcccaaaaccgaggacgagcagaagggcnacgacgcagccaacacgggcaaagaggcaacggagacgagcaccgcggcacagggggcaagcagggaccgaggaaaacgagcacaccaatttttttttttgttaatgcggctgacattgtcacaccacttttcttctgtggcataattgatcaggctgattctggctgtgctggtaataacttttactcccgagatgcttttcttaatgctttcaattcctataatgactttggtagactcggttcctaggatgactccaagcgctagattgctacttcttttgtccatttcatacttgatactggacctttttgcccccttgcagatattactggtgcatcgtccgacttc

SEQ ID NO: 700 - DNA, 470 bp, Glycine max
  misc_feature (456)..(456): n is a, c, g, or t
  Peptide Sequence Number=SeqID_8967
  Probeset Number=SeqID_10479
cctccacaaaaaaaaccctaaaagaggctaccttccccatttcccggcgcccagcagggaagacgaagtacaacccacctcccaccgcatgaagcacgaagaaccgcacggctcaccctccagcctcgtgaggcgcgtcatgagtcaccctcagctcgcctccctccaccgcccttagcacgacgtacaacgtcagatccacgcccatgacgaaggacgacgagtccccggtcgtccccaggaccgacaaggagcgcgagtgaaggggcgtccacgtgtaccgtcgctagtgggcgattcgaatagaaaggagcaggagggagacggcacacgggaccacggtgagcgtccgcctgcagccgtcgaaggtaatgataacgaggctgaggttaggtaagggcagtaggtcgctttgggggaggaaggcaaggggcctgtgccgcgccgggggagganaaggggggaccaat

SEQ ID NO: 701 - DNA, 1347 bp, Glycine max
  misc_feature (37)..(37): n is a, c, g, or t
  misc_feature (73)..(73): n is a, c, g, or t
  misc_feature (949)..(949): n is a, c, g, or t
  misc_feature (961)..(961): n is a, c, g, or t
  misc_feature (1092)..(1092): n is a, c, g, or t
  misc_feature (1195)..(1195): n is a, c, g, or t
  misc_feature (1236)..(1236): n is a, c, g, or t
  misc_feature (1240)..(1240): n is a, c, g, or t
  misc_feature (1255)..(1255): n is a, c, g, or t
  misc_feature (1288)..(1288): n is a, c, g, or t
  misc_feature (1305)..(1305): n is a, c, g, or t
  misc_feature (1312)..(1312): n is a, c, g, or t
  Peptide Sequence Number=SeqID_8968
  Probeset Number=SeqID_10480
tgtgcgcgcctccatccttgtgtgttctcgtctacanaatctatacttttccctgtcgccgtacgcgccaccnactaatatcgtcagcgtcgagcgcggagaggacgagaagttatttatacgatatataacgtatgtaagtatcgatgaacggcgctcccttgcgcgccgcgcgccgacgcgaggtgatgcgtatatgatgccgcgcccgacgccatgctaccgtgcggcgcttaatatatatgatcataccaatgaaccagctcgttatagactccctctttgttttacgtaccgggacctcaaatagcgcgcaataatagctatggtagtggtcgcatcgtgcgccagtcgcggatatattgttggctcggcgcttacgatagtcgcatatactcggcgcataggcagtcttcgcatatcgatacgcgtaccatacgtgcaccatgtgttgtattgtcggatattagatattcgtcatacacgcgtcgggtcgctgtgtagcgttattgcgccgtgcgtgcggtgtgcttatgtcgtgccgtggggaggcgctctttacttacgctatcacccacacgccgcctcgctccaccgaatggatatcggcttacgtacggcgctacgaatcgtatcgtacattcgggtcggcgtgcattatacggcgtcggatgttcgtgtgatgtgatttacgtactgaatccgcgcactcgcctacgatcgcgatttaggtacacatttagtaggttatcatctcgcccggcggctaacactcattcgccccgccacgacataaattaaccatcactatgtaatgcgctccttcttgtgtgttatcgtcagcttcattacgacgcgttatcattgatctcacagcgatcgtctatatatagctgatccatatgcgcgcgcgctccagctacgtctggtcgcgaatatgaggcgtctnatacgtcttccncgcattggtcagagaccacgcggcttataatgtaatacatattatatccgcgcgcccgtagtgtagatcatattattggtgatacgcatgaatatacattgttcgatccactccagtatagcgtgcgcccntctgttttatatatgttcgcagccgcgaccgtcgagcgccacgactacactaagtatactactgtattggttgggtgtgacacgtgctcacgacgcaacgatncgcagcaaagtactgtatactgaccatctacgctctgcctntgcngcgccgctaagtcgnattgctccgaccgatagacagatatatagacanaatcgtcgacgcatgtngcgcatncgctcagatagcggacgctactggcactagcatgg

SEQ ID NO: 702 - DNA, 1622 bp, Glycine max
  misc_feature (1)..(1): n is a, c, g, or t
  misc_feature (109)..(109): n is a, c, g, or t
  misc_feature (128)..(128): n is a, c, g, or t
  misc_feature (130)..(130): n is a, c, g, or t
  misc_feature (138)..(138): n is a, c, g, or t
  misc_feature (153)..(153): n is a, c, g, or t
  misc_feature (177)..(177): n is a, c, g, or t
  misc_feature (194)..(194): n is a, c, g, or t
  misc_feature (207)..(207): n is a, c, g, or t
  misc_feature (248)..(248): n is a, c, g, or t
  misc_feature (305)..(305): n is a, c, g, or t
  misc_feature (307)..(307): n is a, c, g, or t
  misc_feature (338)..(338): n is a, c, g, or t
  misc_feature (345)..(345): n is a, c, g, or t
  misc_feature (386)..(386): n is a, c, g, or t
  misc_feature (530)..(530): n is a, c, g, or t
  misc_feature (694)..(694): n is a, c, g, or t
  misc_feature (702)..(702): n is a, c, g, or t
  misc_feature (726)..(726): n is a, c, g, or t
  misc_feature (921)..(921): n is a, c, g, or t
  misc_feature (932)..(932): n is a, c, g, or t
  misc_feature (1001)..(1001): n is a, c, g, or t
  misc_feature (1086)..(1086): n is a, c, g, or t
  misc_feature (1244)..(1244): n is a, c, g, or t
  misc_feature (1293)..(1293): n is a, c, g, or t
  misc_feature (1309)..(1309): n is a, c, g, or t
  misc_feature (1510)..(1510): n is a, c, g, or t
  misc_feature (1519)..(1519): n is a, c, g, or t
  misc_feature (1524)..(1524): n is a, c, g, or t
  misc_feature (1526)..(1526): n is a, c, g, or t
  misc_feature (1529)..(1529): n is a, c, g, or t
  misc_feature (1532)..(1535): n is a, c, g, or t
  misc_feature (1575)..(1575): n is a, c, g, or t
  misc_feature (1577)..(1577): n is a, c, g, or t
  misc_feature (1587)..(1587): n is a, c, g, or t
  misc_feature (1591)..(1591): n is a, c, g, or t
  misc_feature (1607)..(1607): n is a, c, g, or t
  Probeset Number=SeqID_10481
nctatatatagtatagttggcgcgtcagattcgtcgagcgcagatctatatcatcagacatgattgtatctgtcgagacatcgatgtgtgtgcgagacatagtgctgangatgtctactgatgcgcgngntagtaganttcaggcagaagagnatgtagtcatcgacgctgtgccgncctgcgggtagctgagntcgtagatatgtnaattatagaaatatatgcgaccgctccacgagacgagacangcggtagtattcatatgatagagataatgatgcgcatgagcacggcgaggagatcgngntcgatgtgtagtccagtgaggagtactcctntcctacntctagcgatcatcacgcgcgcactcgcacaccgtgacgcanagacgcagtggcggacaggtgagcacattcaccgctacggaggcattgataacagagacgccatgacagtagatgtgtgtcatcgttcatctatacatctatatactacgatcgacgatacctcgtgcacacgctgtctagagngtatgggtaggtagtggggatcgcgagtaactagcgtaaatagtgtatggtagatcatcgcagcgcattacgtgtgatatatcaggatgtcgccgcgcgatcacattatagtaacgtgcgcgacacagactaactaaatggcgatcgaacgcgagacgcgtctnttgtacantagtcgtggacgtgtgtgagtatntaatatatcatagtgacgatatcatctatatacgctgacatcactactttctatacatgatcctaccatgacagacttatgtatagattctgcttcgtcgtcggcgagacattacacacagatcgatattgattctctactcgttaatataatcacccattctcactacgcacactcacaccactactcaatacnccaccaatcancctatgagcagtagtataaccgaggactcgtaagccacttataagtagatagttagtatacctgtgaanaacgttacgttatagtgattgatgtgttgaagttcgagtagttgatgattatattagatgtcgcctgcaatagtatagaggaggnggtaggatgtggctctgttgtgagaataatgtcgagacataacgtggtcgtctgcgtcttcgtagtctgtctctctgcggtggtccgcgttggggtgtagatgagtggctatgtgtagtgcactctcctatctgcagtggtttccagcatttgtagtntagagaatgatttatacactacaatattgacatatctatagtcaacganaaccacagatacgatncgtgagagggagacgtcagcgatagatactgttcgtattgacatttgtcgggttgatgtactgtatactttaacaatatatacccagagtccaggagcttcgaagcgagttggatggggtgttatggctttcctcgttcgccgtggtttacgctaggcctatatactctctaccgctatctcgatatattccagttctgtncttgtattntttantnagnttnnnntgctgtgagacgggtagtgaagagagatgaggggagatgngnatgaagagantagngtagagagataccacnaaacacacaccccac

SEQ ID NO: 703 - DNA, 721 bp, Glycine max
  misc_feature (1)..(118): n is a, c, g, or t
  misc_feature (719)..(721): n is a, c, g, or t
  Peptide Sequence Number=SeqID_8969
  Probeset Number=SeqID_10482
nnnnnnnnnnnnnnnnnnnnnnnnnnnnnnnnnnnnnnnnnnnnnnnnnnnnnnnnnnnnnnnnnnnnnnnnnnnnnnnnnnnnnnnnnnnnnnnnnnnnnnnnnnnnnnnnnnnnnnaggggtgggggcggtgggggagagtggaatggaggggtcgttttgtgttgagacgggggcgaaagagcggggtgtgctctggcaaggtggggggggtagctgggggattttgtccgcccgcgcgggaggggccgaggaaggagttgtgggggcgagggggagcggagatatgtgggtgtggatgggaggtttaaggggcctgggggaaaggggattgggacgggggggtggctgaaatatgaggtatagcaccatttggagacgggggggggtgggggttgacctgctccggggggttgtgttacgggggtcggggtcgggggaaatgtcccttttttaaccaatctggttgtggcccccttaagggaggtgcaaacgaacggtgccatgcttggttcctgtaggaggttctccggggtatggcaattctagagacacttgtgtgttgggggttcttttttgcgcggggagggatggcaaaggaggcgggaactgaagccaggaaagcgagtcccagcaacagtaatgggaaccgtgctctcatcatagtatcttaaattatttattaaggtatactaggaaattgaactagttctcgatnnn

SEQ ID NO: 704 - DNA, 884 bp, Glycine max
  misc_feature (1)..(83): n is a, c, g, or t
  misc_feature (810)..(884): n is a, c, g, or t
  Probeset Number=SeqID_10483
nnnnnnnnnnnnnnnnnnnnnnnnnnnnnnnnnnnnnnnnnnnnnnnnnnnnnnnnnnnnnnnnnnnnnnnnnnnnnnnnnnnttccccatgatgggtgccctgtggcgggtgcaaggggccgagcgcctagggcggcacaggcgccgggttccgctgcacgggccatgacggccctcgaaggcaccccggaagggcgccgcggcctggcccgtggggggccccaacgtgcggcccaccatagaccgcccatcgagccggaattcctcggttggcaagttcggcggcgagagtagataggagggccagcaagaggccgccgagacttcgcagttctggccggacagggcctacggcgtggcgcagtacggcaaggagtccgccgtcgccggcaaggacaagaccggcagcgtgctccaacaggccggcgagacggtggtgaacgccgtggtgggcgccaaggacgccgtggccaacacgctggggatgggcggagacaacaataccaacaccgccaaggacaccaccaccaagaagatcaccagggatcactagactagatgcatgcgctcgcgcttaatttgctttcctttccttctcttgatacacattttacgttccagtttcatgatttccggacaaacatcttgttgtaaactctgctgctcagtgtcttggcctcttttcggtccgtatggatgtctgacgggagatgtatctttgtgttcgtcagacttctcttttcaagttctattttgctgtaatagtactagtaataaagatctatttgtgtcaaaaaaaaaaaaaaaannnnnnnnnnnnnnnnnnnnnnnnnnnnnnnnnnnnnnnnnnnnnnnnnnnnnnnnnnnnnnnnnnnnnnnnnnn

SEQ ID NO: 705 - DNA, 1476 bp, Glycine max
  misc_feature (251)..(251): n is a, c, g, or t
  misc_feature (409)..(409): n is a, c, g, or t
  misc_feature (618)..(619): n is a, c, g, or t
  misc_feature (621)..(621): n is a, c, g, or t
  misc_feature (635)..(635): n is a, c, g, or t
  misc_feature (650)..(650): n is a, c, g, or t
  misc_feature (741)..(741): n is a, c, g, or t
  misc_feature (819)..(819): n is a, c, g, or t
  misc_feature (845)..(845): n is a, c, g, or t
  misc_feature (969)..(969): n is a, c, g, or t
  misc_feature (1254)..(1254): n is a, c, g, or t
  misc_feature (1386)..(1387): n is a, c, g, or t
  misc_feature (1395)..(1399): n is a, c, g, or t
  misc_feature (1403)..(1403): n is a, c, g, or t
  misc_feature (1405)..(1406): n is a, c, g, or t
  misc_feature (1423)..(1423): n is a, c, g, or t
  misc_feature (1426)..(1426): n is a, c, g, or t
  misc_feature (1433)..(1433): n is a, c, g, or t
  misc_feature (1438)..(1438): n is a, c, g, or t
  misc_feature (1440)..(1440): n is a, c, g, or t
  misc_feature (1465)..(1465): n is a, c, g, or t
  Peptide Sequence Number=SeqID_8970
  Probeset Number=SeqID_10484
atagactacacatacaatgatattatatagatcaccccgtcacccatcaccacgaatctcaatcacgacaatacatatgatcagcatggatatatgtctcatattcagcggtccgagctaggcgacacggaggcgtactaagtattgtagtcaacacacatttattatctgttagtgtacttcactgagtcgacgattaaagatgaaaatatacgcagcgtattaccgcgcggcggagcgctgacgagtcncgcccgcgcgcccgcgacacccctcactcccgcccgcacgtcgtagtcctccagattttcttcgtacatgcgtctcgagtgtgcgtcgctctcgatcatgatagataacactagtacacagcaatagagagatgcagccaagtgaggcgcagagatgnagagacggcaaagcatacgtcatactgcatacgtccagtatatacactcacggacctcaacctctaccgtatctgatcagcgtcacatcgcgcactctgcgtcgtctgccacctcactgtgtgggagtgggtgtgtgaggtgcggtaaccaccgcacaggtacacagttgagtagaatggttgtccgcctcttccacgtccgttggttnntntttcttcttttgtnctcatctcgctactntgtcgtcgttcagccatgacatacaatctgtacgatcgcactctccacccacattcctgataggactatatgtgtgttgatgtgtgttganttcggtgtgctttgcgtgtccactatatatttcctcggctccagtgttctaatcactcgtgcctcctctgactcacangcttactactctgcgtgctggtgtcnggcggtgagcatcatgcactctatcgtgctgcgtgggtgtagcgtgcggcgtcgctcccgtgcgctcagcctcttcgtctacgtcgcgctctctcggaagctcatgcgctggtgtgccgctgtnagttcgtatatattagtgctacattcgcccgctctgctgtatctcctcgtccgtcggatcacacatcagtgctgcaaatcatcatacacacgatagttgagttagtagagagtccgatcgtcactctacgcccacacgcatgtctcgatgtctactcactctacagatgctacgaccaagagagtcgtagcgtgcacgtagcgctgttctgagatgagcgttgtgggtactcttccgcgtggacccagtagttagaggagggatcgccaatacattataagaaanaaagagattcgggttacagtaagatatatggtgagtgtatgtgaattatatatataaagagagatagagtcggacgaagcgaggtagaagtaccaagtcgacaaaccataacgagaggacgcgaacacaaannaagcgggnnnnngcgngnngacgcggcggagtgcgnggngcgcagnggggngnggttgtgaggggcacatcacaacanaacaaataaac

SEQ ID NO: 706 - DNA, 414 bp, Glycine max
  misc_feature (40)..(40): n is a, c, g, or t
  Probeset Number=SeqID_10485
cgaccttgagcaatgcatcattatcgttcgtgtaaagcanacacaacactaactcggttcagtgggagggccacaagctcacgagcaacatccttgaactcgagaactcctccttctttgcattttgatagcaaacgtgccgcttcttaccacgaaaattcatgctactcaatgatccaatattgttttgttttctccaaatgcatcctgagtttacgtaacttctcatcattggtctaatcttgaattatgaaatgttataagtccgcgaactgttccatttttctcactcagttggcttttgatagtgaaaacagtttttgcatcgctcaaattcgtactatgaataacacatttgcacttatcgtaatttcagccccaccagaaccatacttctttcccagggcaagtacc

SEQ ID NO: 707 - DNA, 462 bp, Glycine max
  Peptide Sequence Number=SeqID_8971
  Probeset Number=SeqID_10486
aatatttatttggaattgacactttgagggagttaggttaagactgagagttagtgtcatgattgcagtgtttgaatagagtcattgctcaaattactttttcgttcaaattatagttgttacgttttaagttactttacagttaatttcattgttgctaaaaattatgaatcttgtgttaaactagtttctccagacaagcacaaataggccacatatttgtatctcaaacttaatttaataatcaagatgacgagcattacactgggtatcagactttctttgtacgatttccagagagtcaaaattgaaaatgtggatctgcacactaaagttgagaatttcaaggtggaagtttccaaaaaagctaatttgccaaaggaaagtttagaattagtgtactgtggcaatatacttgatgatgaggccactttggatgtctgcggaattaagtctggggta

SEQ ID NO: 708 - DNA, 1465 bp, Glycine max
  misc_feature (7)..(10): n is a, c, g, or t
  misc_feature (32)..(32): n is a, c, g, or t
  misc_feature (52)..(52): n is a, c, g, or t
  misc_feature (59)..(61): n is a, c, g, or t
  misc_feature (166)..(166): n is a, c, g, or t
  misc_feature (181)..(181): n is a, c, g, or t
  misc_feature (191)..(191): n is a, c, g, or t
  misc_feature (427)..(427): n is a, c, g, or t
  misc_feature (685)..(685): n is a, c, g, or t
  misc_feature (688)..(688): n is a, c, g, or t
  misc_feature (867)..(867): n is a, c, g, or t
  misc_feature (924)..(924): n is a, c, g, or t
  misc_feature (995)..(995): n is a, c, g, or t
  misc_feature (1420)..(1420): n is a, c, g, or t
  Peptide Sequence Number=SeqID_8972
  Probeset Number=SeqID_10487
gggaaannnngcgggtgtgttgcttgtttttntttctctttcttgctcctanccccggnnncacacgcgcggtctctcgcgtgcgcctcttggtccttgccacaacatcaacaccggggggtgagacagaccctcctgtccttcttctcccttcattacttctttnctctcaattccacanccaaccctancgcctttcccaccccacccagcgcgcggttgcgcgcaataaacatattgggtggctcttttcggtgtgatagcgggggtagtgaaattatattctgatatcaaatactgcgtctatcttatccgcgtggggggccggggcggggtgtgaaataataccaagtggggggtgtgtgcttgaaatatctccgcgccggtgggcgtgtctttgtgcacaaataaagtggggtgagaaagncgcagatgaaggtcgttataatgtgaggctttcgtgcgctacggctcccgctgtctctcaaacacctatctatgacttctcacatttatcgtgcttcactcctaacaattaatgggtatgattgaaatagtatgttctggcggctgatacgtgttataaacacaaatcatcgagaattgcatttctatttgttactcacttttgtgccctaggtctgtgtaaataaagataataagtggacggtgagaatacgtgagntangaaaaagacacacacctgctgcgtgtggtctctttccttctactccctctcttctgctgccgtttcaccacgttcctccgtcttctactattacatcatgccgtgcatcgtcccaactcatactcttctcgtctggctgtgtgtgcggcacctgtctttgtgttccccacctccgcccncactctttcgccgtctttctggtctccaacacacgctccgccccctccacgctgcgnctgatgcctgagtattgacatcgccaccagcacctactacacctcctaccctccactactcacaatcacantctcagatccacatttcccttgacttcctatgtgtgtctcagcctcttcgtctgtgtctatccttcgttcttctctcttcggctgatatcgtgtgtcattgtcgccgccgcagcgtctgtagagatggcgcatgcactggtcgcacaataactcttccgcgcggtgtgtgtgtcttgtgcgacatcattggtctgtgagattcaactctcactctgactcgctgtgtaggtgtagtgcgtctgtgcactgatgacacgtcgcttgtgtgtgagtcgactatcatcctgcctacctctcttctgtcatacttctgtgttgtgtctctcgtcatccagcgccgacaactacaaccctcacacacacaaacacgcgtgtcgaggtatgacagacgagcggctgaggagctacatgcccgaacaataantcgcgtgtctctctcactatacctctgagtgcagtcagtcgtact

SEQ ID NO: 709 - DNA, 1554 bp, Glycine max
  misc_feature (8)..(8): n is a, c, g, or t
  misc_feature (19)..(19): n is a, c, g, or t
  misc_feature (23)..(27): n is a, c, g, or t
  misc_feature (30)..(30): n is a, c, g, or t
  misc_feature (34)..(38): n is a, c, g, or t
  misc_feature (43)..(43): n is a, c, g, or t
  misc_feature (68)..(68): n is a, c, g, or t
  misc_feature (126)..(127): n is a, c, g, or t
  misc_feature (129)..(129): n is a, c, g, or t
  misc_feature (135)..(135): n is a, c, g, or t
  misc_feature (190)..(190): n is a, c, g, or t
  misc_feature (235)..(235): n is a, c, g, or t
  misc_feature (237)..(237): n is a, c, g, or t
  misc_feature (296)..(296): n is a, c, g, or t
  misc_feature (298)..(298): n is a, c, g, or t
  misc_feature (303)..(304): n is a, c, g, or t
  misc_feature (315)..(317): n is a, c, g, or t
  misc_feature (329)..(329): n is a, c, g, or t
  misc_feature (331)..(331): n is a, c, g, or t
  misc_feature (342)..(342): n is a, c, g, or t
  misc_feature (368)..(368): n is a, c, g, or t
  misc_feature (485)..(485): n is a, c, g, or t
  misc_feature (503)..(503): n is a, c, g, or t
  misc_feature (527)..(527): n is a, c, g, or t
  misc_feature (533)..(533): n is a, c, g, or t
  misc_feature (693)..(693): n is a, c, g, or t
  misc_feature (707)..(709): n is a, c, g, or t
  misc_feature (715)..(715): n is a, c, g, or t
  misc_feature (827)..(827): n is a, c, g, or t
  misc_feature (904)..(904): n is a, c, g, or t
  misc_feature (1171)..(1171): n is a, c, g, or t
  misc_feature (1217)..(1217): n is a, c, g, or t
  misc_feature (1310)..(1310): n is a, c, g, or t
  misc_feature (1354)..(1354): n is a, c, g, or t
  misc_feature (1449)..(1449): n is a, c, g, or t
  misc_feature (1508)..(1508): n is a, c, g, or t
  misc_feature (1534)..(1534): n is a, c, g, or t
  Peptide Sequence Number=SeqID_8981
  Probeset Number=SeqID_10488
gtgtgttngtggtgccccncccnnnnnccncgcnnnnngtggntgtagttatatgcccgagtggaagntctacatgtgccccagcccccaacagagcaggagatgagaataagtaaaggggcgccnngnccaccnctctgatcgccttgcaacgttctgatatatgatagaggttctattttttatattntgttccacttctgtagttgcctacaggaagagagaagtagaaacnangatataagacgatctaaacaagaaatatgtgtatgtgtggtgtaggaaagtgaggctgnantaccnngcgggagtggnnntgtgtcgtgatngnctggcgcttgngttatagcgacgataacactacaccnaaatgatagaaatatatgtagtcacacaactattagcacaacatgatagagaaggaagacgaatcagacaccacatgagagctaactgacacgagtatgcgcgctcgaacgtggccncgaacgactgtcttgcgntgcggtgtgtgtcttactcatcanatgagntgtgtgcgttacccgcctgcgtgcgcgatgcttgaactatgaatgcgaacagaagaaaggagagaaagaactggcctctgcagtctatatcatgtacgccactggactcgccatccgacacccacatgcataataagtagagaggaagcgcctacataangatggtgatgggannnaaaaanagacatagtatgaaatgagaagataaaacaagagcgagagaatgacaagacgtactactctatcgcgtgctaatcactactatacaagtaaataataatacaatacagaagnttcgtcttagcttctctactctgtgatgatgagtggtgtggccaagcgcatacttatctagtctcctgcgatattantctagagcgtgtggtagtatagagcttgagtgagtcatgctcagagacagcgcccccgacccgccctgtactcttcatcgcgtagtaaagtatagatacatatatattacaccagtacgtgctagtgacctgcgaatagaacacagcacgatgccactcccatgacagtcgccgctcgctctactactgcatgctactatgctcgtgtactggacacatcctcgtgctcgtgccatgccagcgactagtgcacacaccccaccaccncactacactgaagtacagccaagcacgcgcatagagtctgggacgnggtcagatgacgacgccacgtatcactatccaacactaatgcagtatacataatatcgcgcacggtgacaacacacactgccagtgactgtgngacctctatcgactacgcgacccattgaccactcgataagtacnatgcgaccaactctcgcaacacacagccttatccgcgccccacctcgcacggaaacattggctacgcgcatctaagacacatcacatagtcatantacaccgcagcccgcataccaatatcatagcaccagagagcgacgtgcgcagagcgagnacagatcgcagcaatatagtctcgtncatgactccccacgcgctcg

SEQ ID NO: 710 - DNA, 632 bp, Glycine max
  misc_feature (10)..(10): n is a, c, g, or t
  misc_feature (573)..(573): n is a, c, g, or t
  misc_feature (614)..(632): n is a, c, g, or t
  Probeset Number=SeqID_10489
tcagctacgnaggccccccccccccattgacaacgactcctttagaagacagaaaattcttgaagagtgaaatgaccaatgatgcaaatttatcccgagttaagcctttggcatctgaaatccctcacaaagattatgcggatagatttgatagaaaaatctcgcaagtcggagaaatcaagtatcatgaagaaccagatgaggaacttgtcagacattacaagcgtcttccaaatagtatccttacagagcaatctcttaaagatatgctttctgattccctcacttcactgaatctagctaacctcaagtgggtgaaaaacgaacatttgaataagcttggttttgttgctccaaacttagtggagcttaatatttcaggtaccgttgctaatgacaccacccttgaagaaattggcaagacatgcttgaatcttaagtcaattgacatttctcattgtccggagcttactgagaaaggagtccgagcatttttcgagaactgtccccctattcaaaaattctgggcatcaacttgtcccaattctgtaacagatgagtcattggcctatntcacaaatgctgaagaattaactacattcaatatcgaattnnnnnnnnnnnnnnnnnnn

SEQ ID NO: 711 - DNA, 406 bp, Glycine max
  misc_feature (106)..(106): n is a, c, g, or t
  misc_feature (143)..(143): n is a, c, g, or t
  misc_feature (277)..(277): n is a, c, g, or t
  misc_feature (280)..(281): n is a, c, g, or t
  misc_feature (284)..(284): n is a, c, g, or t
  misc_feature (297)..(300): n is a, c, g, or t
  misc_feature (303)..(303): n is a, c, g, or t
  misc_feature (305)..(306): n is a, c, g, or t
  misc_feature (317)..(317): n is a, c, g, or t
  misc_feature (323)..(323): n is a, c, g, or t
  misc_feature (334)..(334): n is a, c, g, or t
  Peptide Sequence Number=SeqID_8982
  Probeset Number=SeqID_10490
gcctgcaggggcttctgttcttgaaacggtgaaagaattagcaaaagacaatgattcttcaaaggagaaaaatcaagttcaaccagggcttagtggtcctctgcgnccgcgccttccgccgctcgtcgactctcctcctcgtnctcgcttttcatcgaccgcgaactcctgaagagccaaaatcgtggatttagcaggaaagttgtctcgtctcgcgccgccccgccgagagagtcccgttccgcgcagttttgctcgtcctctcaccgtcaccggntcnnganggcttgaagaagnnnnccnannggcccacattncctcanctttactgcanaggagaccttcttggcgggtgtgacatatcccttgctttacatcacagtttggacctgaacgaccctttcac

SEQ ID NO: 712 - DNA, 1452 bp, Glycine max
  misc_feature (1)..(6): n is a, c, g, or t
  misc_feature (24)..(26): n is a, c, g, or t
  misc_feature (29)..(33): n is a, c, g, or t
  misc_feature (52)..(52): n is a, c, g, or t
  misc_feature (57)..(57): n is a, c, g, or t
  misc_feature (62)..(62): n is a, c, g, or t
  misc_feature (67)..(67): n is a, c, g, or t
  misc_feature (84)..(88): n is a, c, g, or t
  misc_feature (213)..(213): n is a, c, g, or t
  misc_feature (371)..(371): n is a, c, g, or t
  misc_feature (403)..(403): n is a, c, g, or t
  misc_feature (407)..(407): n is a, c, g, or t
  misc_feature (410)..(410): n is a, c, g, or t
  misc_feature (417)..(417): n is a, c, g, or t
  misc_feature (634)..(634): n is a, c, g, or t
  misc_feature (694)..(694): n is a, c, g, or t
  misc_feature (713)..(713): n is a, c, g, or t
  misc_feature (769)..(769): n is a, c, g, or t
  misc_feature (790)..(790): n is a, c, g, or t
  misc_feature (799)..(799): n is a, c, g, or t
  misc_feature (840)..(840): n is a, c, g, or t
  misc_feature (869)..(870): n is a, c, g, or t
  misc_feature (889)..(889): n is a, c, g, or t
  misc_feature (911)..(911): n is a, c, g, or t
  misc_feature (915)..(915): n is a, c, g, or t
  misc_feature (923)..(923): n is a, c, g, or t
  misc_feature (954)..(954): n is a, c, g, or t
  misc_feature (959)..(959): n is a, c, g, or t
  misc_feature (969)..(969): n is a, c, g, or t
  misc_feature (998)..(999): n is a, c, g, or t
  misc_feature (1010)..(1010): n is a, c, g, or t
  misc_feature (1012)..(1012): n is a, c, g, or t
  misc_feature (1014)..(1015): n is a, c, g, or t
  misc_feature (1056)..(1057): n is a, c, g, or t
  misc_feature (1109)..(1109): n is a, c, g, or t
  misc_feature (1111)..(1111): n is a, c, g, or t
  misc_feature (1183)..(1183): n is a, c, g, or t
  misc_feature (1186)..(1186): n is a, c, g, or t
  misc_feature (1215)..(1215): n is a, c, g, or t
  misc_feature (1231)..(1231): n is a, c, g, or t
  misc_feature (1270)..(1270): n is a, c, g, or t
  misc_feature (1285)..(1285): n is a, c, g, or t
  misc_feature (1298)..(1298): n is a, c, g, or t
  misc_feature (1321)..(1321): n is a, c, g, or t
  misc_feature (1328)..(1328): n is a, c, g, or t
  misc_feature (1366)..(1366): n is a, c, g, or t
  misc_feature (1387)..(1387): n is a, c, g, or t
  misc_feature (1431)..(1431): n is a, c, g, or t
  misc_feature (1452)..(1452): n is a, c, g, or t
  Probeset Number=SeqID_10491
nnnnnncctttttaaccccggggnnntgnnnnnggcttctgctcgcttgccntgccnttacncttcnttctctcttctctcctnnnnnggatggtttatctgtttcgctctagtcttaatttatcactcttctgatttcccgcctacacactttactacaatatggggcgagccgtacacagcaatctggtatctgcacgatgcgctactctntcgagattcccagcacacgacattctaccccgacaccgtaagatccctagtaggctggccaggtgatagtccctggcgctggtcctacacgcagcaggtgttctcactcttcgcgcgtagacacaatagctccaactccgcctgctgggtccatagtnttcacgggacatattattgtgtcgacttatcntacnttntggcccnattatagtacacttgtattgaggcagtttgtatcactgcagaggtatccatcggcctcttatctacctttttagtatccatagacaccggtccaaaacatcgttcgcgtccagcgaggccaccccaagagttagtgtagtgttctatactcccaagtgccccccaaaggggaataggtatagtctatatgctccgcaacacgatctcctctcgttgngtttgtgtttgggttgtcagtaccttcatgtccatacgatataacattgagggtgtcccnccgccggccttattctagnccaaaagaattatttgttggggaggggcccttgtgcgggcacgcgggccgcgccancacctagggccaaagagagtntggaaaggntggaacagagccggggccgcggaaagtaagcagaatgtgangaagcatttttcttggggggggaccaccnncaaaaaatatatatgccgngcccagaagcaaaaagaatccnttanatggagcntcgtgagacacccgctacccacccacaatanagatngtgaacttantccatatgcaccgaggccgcctctagtannccgtgagaccncngnnctcggacgccatactttcttatctccagccgtcgtgtaaannaagagtaaacacactatctgcgactgtaatattcgatcatactattgtagtngnataatgctagggtgacactatttcatacttgtgctgtcacgaaacagtgcacacacaacataatcattcagnagngtttatgacacctaccgaccaccacaatnttagacgtactcccgntgttgtgccatgactcttcgccgcgtatccactcggccnagcccgtgctcgcanccggagacttaancaacctcgtacgacgtgcttctncactctnttctcgtttatctagacattacatctagagtccgctantatagactgctacctataggnctagttaccgcttgcgcacgctagctcgtatctgtctactgagnatgttacgcgaccttatgtcn

SEQ ID NO: 713 - DNA, 2087 bp, Glycine max
  misc_feature (126)..(126): n is a, c, g, or t
  misc_feature (166)..(166): n is a, c, g, or t
  misc_feature (212)..(212): n is a, c, g, or t
  misc_feature (244)..(246): n is a, c, g, or t
  misc_feature (325)..(325): n is a, c, g, or t
  misc_feature (340)..(340): n is a, c, g, or t
  misc_feature (458)..(458): n is a, c, g, or t
  misc_feature (522)..(522): n is a, c, g, or t
  misc_feature (534)..(534): n is a, c, g, or t
  misc_feature (620)..(620): n is a, c, g, or t
  misc_feature (627)..(627): n is a, c, g, or t
  misc_feature (685)..(685): n is a, c, g, or t
  misc_feature (788)..(788): n is a, c, g, or t
  misc_feature (873)..(873): n is a, c, g, or t
  misc_feature (875)..(875): n is a, c, g, or t
  misc_feature (1084)..(1084): n is a, c, g, or t
  misc_feature (1378)..(1378): n is a, c, g, or t
  misc_feature (1381)..(1381): n is a, c, g, or t
  misc_feature (1399)..(1399): n is a, c, g, or t
  misc_feature (1417)..(1417): n is a, c, g, or t
  misc_feature (1428)..(1428): n is a, c, g, or t
  misc_feature (1467)..(1467): n is a, c, g, or t
  misc_feature (1470)..(1470): n is a, c, g, or t
  misc_feature (1486)..(1486): n is a, c, g, or t
  misc_feature (1559)..(1559): n is a, c, g, or t
  misc_feature (1656)..(1656): n is a, c, g, or t
  misc_feature (1734)..(1734): n is a, c, g, or t
  misc_feature (1774)..(1775): n is a, c, g, or t
  misc_feature (1788)..(1788): n is a, c, g, or t
  misc_feature (1813)..(1814): n is a, c, g, or t
  misc_feature (1849)..(1849): n is a, c, g, or t
  misc_feature (1891)..(1891): n is a, c, g, or t
  misc_feature (1893)..(1893): n is a, c, g, or t
  misc_feature (1900)..(1900): n is a, c, g, or t
  misc_feature (1903)..(1905): n is a, c, g, or t
  misc_feature (1907)..(1907): n is a, c, g, or t
  misc_feature (1909)..(1912): n is a, c, g, or t
  misc_feature (1941)..(1941): n is a, c, g, or t
  misc_feature (1945)..(1945): n is a, c, g, or t
  misc_feature (1969)..(1969): n is a, c, g, or t
  misc_feature (1994)..(1995): n is a, c, g, or t
  misc_feature (2008)..(2008): n is a, c, g, or t
  misc_feature (2015)..(2015): n is a, c, g, or t
  misc_feature (2018)..(2018): n is a, c, g, or t
  misc_feature (2020)..(2024): n is a, c, g, or t
  misc_feature (2032)..(2033): n is a, c, g, or t
  misc_feature (2036)..(2036): n is a, c, g, or t
  misc_feature (2038)..(2038): n is a, c, g, or t
  misc_feature (2040)..(2052): n is a, c, g, or t
  Peptide Sequence Number=SeqID_8983
  Probeset Number=SeqID_10492
ccgatgtttgtctggagcatgagtcatggagcacggtgcattaagttattacgtaatcgtatcagttgtacgtcttgatgactagcatcgatgtgttgcgcgtgatgagatttgaggagtgatgtnggagatgtcgatgagtgagattactgcgagcggtggacanggcgagcgttgcatgagcgctggttgggagcgagtgagacgtcgantagtgtaatatatggtgacgtagcgctatacnnnacggattcgctcgacaggcacgacagatcgtacgagtaatgagagaggtcgagggagtaagcgaggatgatagggagtncaagagaacgtcaanctagtgtatagttatgtctgtacactgtgttgtgtcgttgatataatgtagatagtatatgttagtgtgaatgtatgagacatgtgctttatagtatattgatgttgattgttgtgangatggtgtgagtagtgtgttgcgatgtgggtgcatattagcggacgcacatgttgtgatgtatntcgatgatatangtgtggttttagttgtgcatcgcggtgtcatccgcgctgatggtgtggagtgtgcgtgtcggttggcgagcgtatggtgcggtgcnggcgcancgtagagtgggcgagagggagcacttgctgaggcggtgatatgagtggacacagggtnagtggtgcgcgtgtatgataacgcagagtaatagcgcgagtatcgtgtttatgttgtgtggtcgaatagatgctactgatacggggtgtcaactagtgatggntatcatcatttcgtgcgcgtgtagctgtgtatgtgagactgggatgctatgtatttgtcatcgtgatagtctatgagagttcacncnagagtgcacagtagtgtgtgcgcgccacgcgtatgccagtcccacggctgctctgcaagccgcgcgcggtgatatagagcgatgtacgatcgagaggagagagagaggcgaaggagtcgtcgagatggcattgttgtcgcgtgagtagtacgtcgtgcggcgtgtgcgtgtctgcaccggtctgtgtgaggtgctatgggaggcgagtnagcgccgcgaatgtgcgagtatgaaggtagtatagagcatgcatatatcagtaaagtattgtataattacagtaatgacgatcgacaatagatgtgagagatacaaacagacggacacccacgctggagttgcgtagaggcaccgctctggagcgtggggtctgttacatgcaggacctctatcgtatcgtgcgctgcattagctggttcactacatctggtctgcggagtcgcttgtgtgtgcgtaagtcttgtgcgtcgtcggtgtttatccactccgctcttcgctgcgtngtntgttctggcgagtattcngtcgcaggtcactcctcngtgtgctcgcnctccactcgcggtcgtgtctctcactacataatgacatntancacactgtcatcattnttgcagctaagacactgaacacgacgcccacgtagtagagcacgtcatacgggtagatgtgacgctgtgcagngagcctaagccgaggggcggtgcgcgtcgctggtgagcgaggcgggagcaagacgagcaagcgcggcttcgcagacgtgagtggcgagcgcatgtgnttgttggtgtgtgggtgtgtgttttttagtaattgtagagtgattacttgtcctctctccacttacactcgtgctccntcctgtgtcttagtcctcgtgtctcttcctcttctctcanncactcttttctantggtgagatatgtgagtggtatgtnnagtagcacgcacacaccatatcttccctaatgacntacgtacccttagaaagatttagtaagaaaggaagagacagnanaagacanccnnncncnnnntgagaggcgagttgttgtgtgtgtgggtntacnactggtgcgcgtgagagttgtttncgctgttgtttttgtgtagtatgtnnggttgtttttgtnagtgctntancnnnnngttgtccnnccncnannnnnnnnnnnnngatatggggttgtaatagagtgagagagagagagt

SEQ ID NO: 714 - DNA, 576 bp, Glycine max
  misc_feature (233)..(233): n is a, c, g, or t
  Probeset Number=SeqID_10493
gaatgaatgattttaattgagcggcggcgcagaggaacggcctcagttttggagcttgaaagacaaaatattgattgcagctgagttctaatgagtaacgaatacgattacctggtcaagcttctcctaatcggagactcttccgttggaaaatcctgcttgcttctcagattcgctgatgactcctatgtcgactgctacataaggaccattggagttgatgtcaaaatcanaacggtggagctggaaggtataaccgtcaagctgctgatttgggatacagctgtacgggagcgattcaagactatatcagccccttttatatgagagcacatggaaatactattgtctatgaggtactgaaacgaaaagcttaccatgccccaaccgggttgatgacattgacgaaatggaaatgacctgtattccagcttctggggggaaaaatcttgtcccgtgaaaaaaaggtttgagacccctttaccccccaggcttttccgggagacccttgggatccctttcccttggaaaaaaggggcaaaaaacccccccccggggggggaaaggtttttttat

SEQ ID NO: 715 - DNA, 1187 bp, Glycine max
  misc_feature (1187)..(1187): n is a, c, g, or t
  Peptide Sequence Number=SeqID_8984
  Probeset Number=SeqID_10494
ataagttaaaaacgcgcctacgccgcccaccgcggaggcgcgtgctgtagagacagctggcgcgcgcatgttttcaagacagtaagaaggggacagagaaaacacactggcaaatagatgtaagtagagcgccccccatgaacgcccccccaggcgcttccccctttatcagtgccgcgcacggtatggttgggggagaattttgagcggataaccaatatcccccccgcggaaccgcgttagggaccgtgatttacgccaaggcggcccattaacccctccctctaagaggggaccaagagccgggagcttccgcccgcggggggcggccccgcctctaagaaataggggggttcccccggggttgcaaggaatttcccccggggcgccattccttaggaacatccttaatctacaacatcctaatcgaaaagtttgtgttgcaccctcacacaagagagcactcttctcccatagaatgggttaaacagttggatgaacttaagaaaggcaatttaagagaaagtaggggaggactaggcttgtttacgccttatcctggggatcttgattctgttgttctgccaaatgtaacaagaacatcaaaagcaggctgacattttgattattgttttaacatattcattttgttatgtattttttttcaagaatttcttgatgtttattttgtttaatcttaatgaaagtaaagataaggcgcctttatattgatgcacgagcctttgagacaaaaaaaaaaaaaaaaaatatcgccaccccccgacctcggggggggggccccggtacaacccggcccgaccctccggggggagagagcgcccccaaaaaaccacaggatgcgccgcgggacgagcgggacagcgcgaaataaggcgcgcgcgggcaaccgggcgcggcgcggattgcagacgcgagggccgacgacccgggaaacagacccggcgccgcgccaatccgacgcgagagccctcgcctctgtgacgcgagtcgccctcgggtggcgcgaggccggggcggaatagacccgcacagtcctgccgcgaccggcgcgcccgctttccacaacagaattgacccggcagcgccatgcgactagagacacaaaccacaccgggtccataatctcgcgggccgcgcggggcggacgctcggcgcgcagaccggcn

SEQ ID NO: 716 - DNA, 1415 bp, Glycine max
  misc_feature (24)..(24): n is a, c, g, or t
  misc_feature (41)..(41): n is a, c, g, or t
  misc_feature (50)..(50): n is a, c, g, or t
  misc_feature (79)..(79): n is a, c, g, or t
  misc_feature (152)..(152): n is a, c, g, or t
  misc_feature (196)..(196): n is a, c, g, or t
  misc_feature (271)..(271): n is a, c, g, or t
  misc_feature (345)..(345): n is a, c, g, or t
  misc_feature (418)..(418): n is a, c, g, or t
  misc_feature (502)..(502): n is a, c, g, or t
  misc_feature (1191)..(1191): n is a, c, g, or t
  Peptide Sequence Number=SeqID_8985
  Probeset Number=SeqID_10495
cgttgagatgtcggagcgcgtcgnatcactgactcagtcgncggagagtntgggagatcacactaggcgagaggcgcanagacaattatgatatatagataactcacgcgacatagtcgcgatgcgcgtggcaattgtgaggagtgagagantatgtgtgagcgagtggtgacgcagcataaagttgaccgatccntgatacggagagctgatagtcaggcaagcaccatctctatgtacggtcacttatcagagcgtggatagcagatcncacgagagagcgcatcgcactgtatgataccgcataggtggtacgcgccctcatgcggtagtacgctctatcanctgtatgcacagtggcggcgccgcgctcacactctctcataccacgccatagcacgacgacatgtggaacagnagacgcggcgaggagagcgctcaacggtaagacgtataaagaggagatctgatagagtatggagataacggtcgcacaagtagnagaatcaggaagcggctgtcgctcataacgaggtgtggtaggcaagcagagtattgacaactcgcacacccacacagatgtctagatctgatagtggtaagtagagggaagagaaatcatagtaaatacagatgcacagccgtagagcgggaagtaaatcggaacaacagtggtagaatatgcatgtgtctcgtgtcgtgactgcgattatgcgttagggcattctcatctaacacaatccactaaccctcgctatacgcagaccagagaattagaggagcaaagtgacacgcgatgtcctcggttttgatctgtaattctgtgatatatgcgccacgagggaaactcgaacataactttacaggcgtacgtagcccgtgcgaatgctattgagctctcgatatgttagtgtactgctagaggtagagacaggcatggatcagaagcacagaaagaaacgtgatgcccgtacttgatgcgtccatcgacctcacaccttctgcgtctgtagaagagtgatgggcgaggacgtgcttgctactcacgtgatgtttggatagtctagacaagacagacggatgagcggtcatatcgccaacaggcgggcggcggatgtactgacactaagggcgtaccaaacactgagatacccacgataggcgtgcacgaccgtggttcggagagaagcnggcgctcctggctaggccgaatgaataggaaaggctccaacctgattggacgggcgcaggcggacgagagacgcagataaactacccctcgcgctcggggggagaccgctataaataagaaaaaccccccctcccccccccatcggaggcccaccacccttttattcctaagcgcgcgcgcgcagcaaaggccagcgaaggaagtagaggaggggggagttacc

SEQ ID NO: 717 - DNA, 1362 bp, Glycine max
  misc_feature (273)..(273): n is a, c, g, or t
  misc_feature (406)..(406): n is a, c, g, or t
  misc_feature (495)..(495): n is a, c, g, or t
  misc_feature (580)..(580): n is a, c, g, or t
  misc_feature (583)..(583): n is a, c, g, or t
  misc_feature (653)..(653): n is a, c, g, or t
  misc_feature (1092)..(1092): n is a, c, g, or t
  misc_feature (1170)..(1170): n is a, c, g, or t
  misc_feature (1196)..(1196): n is a, c, g, or t
  misc_feature (1231)..(1231): n is a, c, g, or t
  misc_feature (1252)..(1252): n is a, c, g, or t
  misc_feature (1280)..(1280): n is a, c, g, or t
  misc_feature (1303)..(1303): n is a, c, g, or t
  misc_feature (1330)..(1330): n is a, c, g, or t
  misc_feature (1342)..(1342): n is a, c, g, or t
  Probeset Number=SeqID_10496
ttggtcccccccccgttgtgtacttgcgggttctgttcacgctggcgattaacttggaccaccacaagataaataccaactagcttcgggcgtcgcgcggccccgtcctggattttggcacgtatgctgctatcggcgatgcggggcggcttctgaatggctgtgtctttgctctctgcctttcctgcttgtgtgttacggctgtagcccagccatcccgtgtcttacgtggagcgtgagcacaaatcagaggttctctctattgacttgctnacgaggatacgtcgcatacgtgctgcagaacactctaagtgttctctccgggatgagaaatagtagcacactagcgcgccgtgcagtagcgcatgccagtgtgtctctcgtatagctcagttcacttgagcgncactctcgatgtaggaatctcatgctgtctctactcgcacgacttgctatagactcatcttcgccttgatagagagcaatagtgcactnactagattcttccacgcatggtacgacctgacctctctgacgctgtcagtttatgtatgctcgtatggctctcagggtagaggancantcataggtaggtggtgagtcggtgatgccatcgtcctgtctctcatctcctactctccctatggtatagnatatagatgtatcattcgatgtcgtcacgagtggttccgctagacacgctgcttacataccagctgggtgtgtactagggtattgtggggagtgtgggcgccgcacccccgcgtggtgggtgtcctcatgtttaacgctgctacttgatcttacacctccataactcatgtatcgacatacatctattaaatcatagattagttgcttcactatcgcccatatacgctcgtcgccttcctgctagatatgaatatgatatcacatgtgcgatgatcttccggatggtcgctgatattattaatcatttgttgtgacctcaatgacgtctcaatacactgctgcatgacgatctctcagtccgcgcattagcatgctcgatcatgattacgtaaatgtcgcggtactatcaacatctatgtcgctcccgtctgtccgacncatactgcctgcctgacactgtctgactacccaggtgaatatctctgttctctctcctccgtgtctatgtctgtgtcntagtagtgagcgtagcgcgtgcgcgncggacgtctcatactgcgacatgtcttccatcgcncccatctctccggagtcgagngctcgtgcggtatagctcgagcatgatntatctgacagctgataatgacgnatcaatatgactaacgacgttatctantctgtagtaatnaaggcaaagctcatacttca

SEQ ID NO: 718 - DNA, 505 bp, Glycine max
  Peptide Sequence Number=SeqID_8986
  Probeset Number=SeqID_10497
aatggctgtataacactgcgtgttgcaaggcaaagctgtgctggctcaggagcaccaaatgaagagacagattctgacctggtgcctgaaatgacgtatgacctgcgctgccagtgtgatgctattcgagtgacaaaaaccgttcgcccttatagcatatcatgctgccccatcaatgagaacgtagctgctttgatcatcagcgatggccgtatcatgatttgggaattgaagtccagtgtggccggcaaaagaatgagcagcataagtcccagcttgggtgctttatatgctcccctctcattttgtgggaagccagtcggacccttgcagaaaaagctacccgatctttcattggacagcatgatagctggtcagagcatgcttgctggagacgctctgaactctgggggcccactccaagaagtgcacctcaagtttttactgacaggcctcatctctgggcttccacaaccaccgtttgtagtgagaatgtgccccccgc

SEQ ID NO: 719 - DNA, 1664 bp, Glycine max
  misc_feature (1664)..(1664): n is a, c, g, or t
  Peptide Sequence Number=SeqID_8987
  Probeset Number=SeqID_10498
tcagctacgtaggccccccccccaataattaaatctttaatccgagcatttcattttgatatttcatcattcccatggctaaacatgatgattgcggtcgtatgattgacactaagggtggacaatccttcgaaattgaaatgaaaggaagccctgctactcctactcctgctgctacacaagatagtttcaaaggtggagtcaaaatccaacaatcttccaacgtacaagcttcctttactcttttcaaaagtttccttggtaccggagtcctagcactcccttatgcttataaaactgccggccttggtctctctttgattgttctcataatcgtttctgcaatgactactcgttgcttctctttacttctcgatgtagcagctcaaagaatcggaactggcaaaatctcactccagaaactcactcaagatgtcttgggaaccaagggaaaatatgcagtccaagcttcaatcatgatcatgcaattgggatgttgtattggtattttgatctttactagagatttcttgaaccatatcctttgtgaatttggtatcagctctctctgtaacaatacccttttcaatgtcctcttttgcttggctctgactgtccctttgactttgatcaacaatatgcattatttctacatcccaagtcttgctgccaacttctttatcttggtcggacttgccgctcaaatgttttacaacactcaagtcttacaagataaccctgaactcagatcaactttaggcactcatcttaaagaattcaactggaaagatttacctctcttctttggtattgctacatatgcctttgaaggtgttggtattatcttcagtatcagaagctcaatggaaaagccccaagactttaaattcctcttaaagaatcaaatgttgatccttactttgatctatgtcatcttccctactttctgctatattgctttggatgacagattaacagatattattttctttactctccctactgatgatcctttctaccttttaatccaaatcttttatgctatctctgctcttttatcattccccgttcagttcttccctgctattcgtatcatggaaaactccaaaattatgagatatagactctttaatgaaagaggaaaatgcaataataaacccctcagatatggaatgagaatggctgttattggtgtggtctttcttgttgcttataccgcgaccagtttccatcttttcttaaacttgctgggatcttgtgtattcacttttgttggatttatcttgccagtctggatctattctgtccatttcaagggaaagaccggcatcgcgaaaagacttatcaattatacaatgcttactgttgctgtcgtctttggagcagctggttttgttatgtcaatcatggaaatggttaacaaaagctctgaagatgttgcaactctctaaagtaaaattttttcttaactgactcattctatgaaaactctgtacttttttaactgtagtcaaagttgtaaattatatttgtgtaattgattgtatgtctttttaataaaaaacctctccttggatatgtctataatctgatccccgtatctaaataacttacaaaaataatgccatatcatttaaaatttactcaaaaaaaaaaaaaaaaan

SEQ ID NO: 720 - DNA, 1417 bp, Glycine max
  misc_feature (29)..(29): n is a, c, g, or t
  misc_feature (59)..(59): n is a, c, g, or t
  misc_feature (62)..(62): n is a, c, g, or t
  misc_feature (71)..(73): n is a, c, g, or t
  misc_feature (122)..(122): n is a, c, g, or t
  misc_feature (152)..(152): n is a, c, g, or t
  misc_feature (200)..(201): n is a, c, g, or t
  misc_feature (488)..(488): n is a, c, g, or t
  misc_feature (810)..(810): n is a, c, g, or t
  misc_feature (941)..(941): n is a, c, g, or t
  misc_feature (1072)..(1072): n is a, c, g, or t
  misc_feature (1313)..(1313): n is a, c, g, or t
  misc_feature (1395)..(1395): n is a, c, g, or t
  Peptide Sequence Number=SeqID_8988
  Probeset Number=SeqID_10499
acaagggtggagatgtgggctacaaacancgggcgggcccccccctccgggcccgcccnaanaaacaaagnnnaggagcgcgctctttcctctgccccttctctatttcccatcccgccccngaccccctctctcctatccctaatactccnattttttttaccgcttcgcccgcctgagatttacccttcgccgggccnnccaacggccgtgaacaaaaaatagtgacaactaaaatatggtaaaaatgaccactgctggggcggccaccctggcgggcgcgaaacggaaaacggcggcaattggggtacaaacggcggccgacacacattgtgtccaatggtgggaaattgtccacactgttcacacatgggatcatactaacaccgcggctgcgtaatccgccactgccctacggggccgcctggcacccactccaccacagggtggtgtggcgcaaccacgcggcaccctggcgccccgcctgngcactctcctaccactggttggctccagccgcccccttgtgtgtgttcacccccgacgaccggcgcccgtgcgacacccccttcacctcctgacccaacacaccgcgctgcgggacggggcgggcccaccccaacctctgtgtgctcgggctccgctgcgcccacgcggcccacacccacccccatccttgtggggtctccagctcgccaccacatgtggtgcgcgtcaaacaaacaccactctgtgtgaggaacccacacctctcacggactaacaagtcggttgtgtgtccacctcccaccgcccactcagctggccctnccgaccatcttgtctgtgcgcttgcacgtgtgtctctcgtctgctctccactcccccatccctgtcgtgtctgtgcgccactcactgctctctacacatctcgaccaaatcaccgcccgccgccacctccntctgaccacattcgtactgttcaatatatttggtgtgttattttattttgtgttcgtacgtcacttatctctcactaccctctgctgtgtgccatgtcctgttgcttttgtgctgatgtgcctgtgccacntgtcgcgccatgtgctggttcacactaatacaccacacacacatcactcgccccgcctcaccacgcggccgcacactgcctgtaccacccatacatgcccccttgtgtgacgcatcgccctcctcccgcctgttgccgattcctctggcgctctgtctgtctattcatgtatcattgcctgcccctgcctgagcgcctgtcttctgttcccacacacatccattccgatctaacaacgcgngtgctgcgcctgaggattgtcctcttcgctctcactataacgtaccttgcgaggccacacctcacccctgcatcttactaanacccgtgtgcctctggctcccc

SEQ ID NO: 721 - DNA, 521 bp, Glycine max
  Peptide Sequence Number=SeqID_8989
  Probeset Number=SeqID_10500
atggttgttgagcgcgcccccagtgtatggttccaggcacccgtctagttcagccccgaaccattaggatggcggtacataacatgagttatgaggaactacttgcacttggtgacaggattggctatgtgaacccaggaatctttgaggattcgcttaacaaatgtttgacggaaacaatatattgttcatctgagcaaagtcaagacgaaggaaactgcgtaatatgtctggaagagtacaagaacatggacgatgttggaacacttaaaacatgtgggcatgactaccatgtgagctgcattaaaaaatggttatctttgaggaaattatgtcctatctgcaaagtatctgctttgcctgaggatacgaaggataaataactactctagtataaaattaatctcattttgtgtttatatttgaacatccctcaaaattgaggaaacatattgcttttggaaatgttgtaacaggaatactgctttatgtcaatgaatttgtttccggcttcgatctcc

SEQ ID NO: 722 - DNA, 604 bp, Glycine max
  Peptide Sequence Number=SeqID_8990
  Probeset Number=SeqID_10501
actcactctgaaaccctaaacatgccgccattagcgcctctgcatcttcggaagctcttactccgttctcgttccttatcattcacttctcccactccgattcaccctcctcctctgtttccccaacaaccttcttcccatttccattcccgaaccctcctcactccttcttcgctcttcataatcagacatttctcatcggaaacccaaacggatcagattgcgcactccctctcctcagagcttctcaaagagccagactcggacgctctctccgtctcgcagcgccttcacctgagctttctccacatcactccaaccccccattttgatctccaaacccctaaactcctcccacgatctgggcgcactggattagggtccatcaatggctcccttccaaccccattttcccaaagggggaaaattttttcctattcgggaaataatttgccgcggaagggattagggcaagttgaagctttctcgggtttccccgccggggccaaaacctaacccccggataaacccctcgccgcggggggccccccaagggggttaatttttaaggaggggaaaaaaccgggttaaaggggttggtttc

SEQ ID NO: 723 - DNA, 594 bp, Glycine max
  Peptide Sequence Number=SeqID_8991
  Probeset Number=SeqID_10502
tgcctgcagcatcattctctctgtatacaagcctgggacctgctgactccattgccatgggcatgactgtaggattttcccctatagcaagagatgcaatatgaccgctgaccgagatacctgggggcagccactgcccctactgagggactacgcgctgagcattctgggttgttatcctcacatcttgcatatgcatctggattgaggtgaccctacatgatatgctctctcggatccatggatgctaatggatctgagcctgagggagaggctccttccgactggccttgccctaacgaggccttggaagccaaattactgacacaccacaagacgagcgatgtgaaccataggagcgagtgacttccagctcggggcttgctacaggaaagttacactttgcagaacctattgattaaccgaacagttaaccaacattacatgaattttctcttcaagatgccatgcctagggcatgttcagctgaaggaggatcattatacatctcctgaataggacatgactaccaagaggagggtacgttctcgcaaccgatttgagaatacgctgcataggcatctaatccgtgat

SEQ ID NO: 724 - DNA, 1954 bp, Glycine max
  misc_feature (30)..(31): n is a, c, g, or t
  misc_feature (35)..(35): n is a, c, g, or t
  misc_feature (38)..(39): n is a, c, g, or t
  misc_feature (43)..(44): n is a, c, g, or t
  misc_feature (48)..(53): n is a, c, g, or t
  misc_feature (55)..(55): n is a, c, g, or t
  misc_feature (73)..(73): n is a, c, g, or t
  misc_feature (82)..(82): n is a, c, g, or t
  misc_feature (87)..(87): n is a, c, g, or t
  misc_feature (90)..(92): n is a, c, g, or t
  misc_feature (94)..(99): n is a, c, g, or t
  misc_feature (102)..(103): n is a, c, g, or t
  misc_feature (107)..(107): n is a, c, g, or t
  misc_feature (142)..(142): n is a, c, g, or t
  misc_feature (228)..(228): n is a, c, g, or t
  misc_feature (307)..(307): n is a, c, g, or t
  misc_feature (323)..(324): n is a, c, g, or t
  misc_feature (350)..(352): n is a, c, g, or t
  misc_feature (365)..(365): n is a, c, g, or t
  misc_feature (379)..(379): n is a, c, g, or t
  misc_feature (383)..(384): n is a, c, g, or t
  misc_feature (390)..(390): n is a, c, g, or t
  misc_feature (417)..(418): n is a, c, g, or t
  misc_feature (471)..(471): n is a, c, g, or t
  misc_feature (477)..(477): n is a, c, g, or t
  misc_feature (485)..(485): n is a, c, g, or t
  misc_feature (557)..(557): n is a, c, g, or t
  misc_feature (652)..(652): n is a, c, g, or t
  misc_feature (654)..(655): n is a, c, g, or t
  misc_feature (658)..(658): n is a, c, g, or t
  misc_feature (685)..(685): n is a, c, g, or t
  misc_feature (767)..(767): n is a, c, g, or t
  misc_feature (785)..(785): n is a, c, g, or t
  misc_feature (787)..(787): n is a, c, g, or t
  misc_feature (850)..(850): n is a, c, g, or t
  misc_feature (872)..(872): n is a, c, g, or t
  misc_feature (901)..(901): n is a, c, g, or t
  misc_feature (944)..(944): n is a, c, g, or t
  misc_feature (947)..(947): n is a, c, g, or t
  misc_feature (1034)..(1034): n is a, c, g, or t
  misc_feature (1089)..(1089): n is a, c, g, or t
  misc_feature (1092)..(1093): n is a, c, g, or t
  misc_feature (1095)..(1095): n is a, c, g, or t
  misc_feature (1141)..(1141): n is a, c, g, or t
  misc_feature (1145)..(1145): n is a, c, g, or t
  misc_feature (1147)..(1149): n is a, c, g, or t
  misc_feature (1172)..(1172): n is a, c, g, or t
  misc_feature (1178)..(1178): n is a, c, g, or t
  misc_feature (1262)..(1262): n is a, c, g, or t
  misc_feature (1269)..(1269): n is a, c, g, or t
  misc_feature (1272)..(1272): n is a, c, g, or t
  misc_feature (1301)..(1301): n is a, c, g, or t
  misc_feature (1344)..(1344): n is a, c, g, or t
  misc_feature (1355)..(1355): n is a, c, g, or t
  misc_feature (1359)..(1359): n is a, c, g, or t
  misc_feature (1367)..(1367): n is a, c, g, or t
  misc_feature (1374)..(1374): n is a, c, g, or t
  misc_feature (1377)..(1377): n is a, c, g, or t
  misc_feature (1398)..(1398): n is a, c, g, or t
  misc_feature (1555)..(1555): n is a, c, g, or t
  misc_feature (1569)..(1569): n is a, c, g, or t
  misc_feature (1572)..(1573): n is a, c, g, or t
  misc_feature (1581)..(1581): n is a, c, g, or t
  misc_feature (1616)..(1616): n is a, c, g, or t
  misc_feature (1705)..(1705): n is a, c, g, or t
  misc_feature (1711)..(1711): n is a, c, g, or t
  misc_feature (1724)..(1724): n is a, c, g, or t
  misc_feature (1759)..(1759): n is a, c, g, or t
  misc_feature (1768)..(1769): n is a, c, g, or t
  misc_feature (1789)..(1789): n is a, c, g, or t
  misc_feature (1791)..(1791): n is a, c, g, or t
  misc_feature (1886)..(1886): n is a, c, g, or t
  misc_feature (1954)..(1954): n is a, c, g, or t
  Peptide Sequence Number=SeqID_8992
  Probeset Number=SeqID_10503
gtttggtgtgggtgggtggccccccctccnncccngtnnggtnncccnnnnnncnccaagcgcgcgccgcccntcttctctnttttnttnnngnnnnnnacnncccncacccactaccaaatataacactgagaggcacggncgccgcacatcagataggaggaaatacaaaacactacatgacagagatgtgtacttgttcccaccgcgcaacacaacacacatcgntaatggagagacctcgcattgtcctggtgggtgtgggacgcgagggcgcggctcactacgcgcacccaactaaccacanctaatttctcctaccnnaacgccgccctcctcaccccactccnnncaacagcgaggancagccggccaatantatnnaattcnatctacaactctacaactcacgtcaannggatagtactacaaaatacataactgtaccactgtctccgagccgttgctcangcatgncagatgtntgtactgaccccccattcgctcactcgtgtgtcgtcttctcgcatcgcgcggccccacctcgacgtctcgantattgtctagcgccgcagctacaatatataactacagtatcacatacaaactacaccaatacacatatcagacagagcagatcgacatttccaancnngancgcgacgcgccctgcgaactgtagtcnatgatatatatactctacactgtatgttgatgattatatgtgtttcgtacttgtgctctctctcgcccatcgaacactcatncacgaatatatatacatntnaaatgctagcataattatgtgatatctctcactataacggacacacaggagctgtgagagagntagtgtgtcgagtggcgtaagntggaaaagataataaaacgtacacatagngggttagacacaacaaccaacacacactgagatgtcgtgtacnctncacgctgcgaccatctctcttatctcatatctcatatgctcgaacctcgaccgatggcagacgatgcttgctacgccgagtgtgtgnacacgccccctctaatctgtatgagtgtttagttagtaagaacacccagtgggtnggnnantgacagtagacacagacactagagaatgatgcttgatacagtatgnaggnannnatagagatatgtaaatacaccanataacncacaccacgagagaatccacacccctcatacttctcgcgacctattatctgctgtgatcagccttcatgcgcgatctctatatnctgagancangatacgtattagcctcgcgagccagccgnggctcacctccctctactgccacacccatcccccaccccacanacacacaaccncctntccaaaanaccaaangantataaaatatgagaactgcanatgatgtacatatccatcatgctattgctcacagtcacgcgataacaccatccctcctatcatatgttctatgatactctgcgctagacgacacaatgtacgtcgagatatgtacccggtgtaatttgtactactcttactgtctcctctctaccantaaagaattaagtnatnngtgcaagngtcacactcttctctatactcgtgcgtgcagcgcncacaatatacgactcgcccatgggtcccaatatctcatagtgtaccgtagattcatgctagcatgccggcgtcgtacggccacgcacgnccgctntccatctgatccncgctcatacaatcgtactagttatctcggcatctntctcatgtnnatatggagtacagttgttgncnactattttctgtggtatcatcacgtgcacctgactgtctactgattgtcagcattgcttctctctactacaatttcttctcgtgtcggcctccgnattatacctcttgtctttatatgtctgatattggtctgcaccaccgtcaccacacgcgacgaacgctn

SEQ ID NO: 725 - DNA, 1836 bp, Glycine max
  misc_feature (29)..(29): n is a, c, g, or t
  misc_feature (31)..(33): n is a, c, g, or t
  misc_feature (36)..(37): n is a, c, g, or t
  misc_feature (48)..(49): n is a, c, g, or t
  misc_feature (59)..(59): n is a, c, g, or t
  misc_feature (65)..(65): n is a, c, g, or t
  misc_feature (81)..(81): n is a, c, g, or t
  misc_feature (105)..(107): n is a, c, g, or t
  misc_feature (149)..(149): n is a, c, g, or t
  misc_feature (158)..(158): n is a, c, g, or t
  misc_feature (174)..(174): n is a, c, g, or t
  misc_feature (233)..(233): n is a, c, g, or t
  misc_feature (250)..(251): n is a, c, g, or t
  misc_feature (286)..(286): n is a, c, g, or t
  misc_feature (308)..(308): n is a, c, g, or t
  misc_feature (386)..(386): n is a, c, g, or t
  misc_feature (543)..(543): n is a, c, g, or t
  misc_feature (621)..(621): n is a, c, g, or t
  misc_feature (703)..(703): n is a, c, g, or t
  misc_feature (732)..(732): n is a, c, g, or t
  misc_feature (814)..(814): n is a, c, g, or t
  misc_feature (888)..(888): n is a, c, g, or t
  misc_feature (1221)..(1221): n is a, c, g, or t
  misc_feature (1528)..(1528): n is a, c, g, or t
  misc_feature (1559)..(1559): n is a, c, g, or t
  misc_feature (1574)..(1574): n is a, c, g, or t
  misc_feature (1712)..(1712): n is a, c, g, or t
  misc_feature (1723)..(1723): n is a, c, g, or t
  misc_feature (1741)..(1741): n is a, c, g, or t
  misc_feature (1755)..(1755): n is a, c, g, or t
  misc_feature (1781)..(1781): n is a, c, g, or t
  misc_feature (1783)..(1783): n is a, c, g, or t
  misc_feature (1814)..(1814): n is a, c, g, or t
  misc_feature (1827)..(1827): n is a, c, g, or t
  misc_feature (1836)..(1836): n is a, c, g, or t
  Probeset Number=SeqID_10504
ttttctgtgttgtttttggtgtttttttntnnnttnnttattttatgnntttcttactnattttnctctatcttcctcctnttttacttattttctatctcctcnnnctcgcctgtgttcttatgactcgtcatcttcgattttcccangaggcctcncgtagtacgatgcgcngcgaggcgagggagatagactcgagacgtgtagaacacacgcagatacgacactcgacnctatctgtatcactctnncaagatatgcagatatgaaaataaacaccaagatngagctatatgatagactgtaantgtatctagcatgtagagactagtcttgtctgctcgaactagagagacgagatgactagtgcgttgatgtagtacganagtactcgatgatgaacagttacgaggttctctacgtgctaaattagtgtgaatcaatgacatgatgagctgggaatactatacgagaaggacgagagagttgttgtcgttgtgtgcgctgtcgctagtctcgtctgttgtgtgtcgtcttgtacanagtgcgcacgtagatgtacgtgatgtcatcactgcaggctgtctctaattgtattgtagcacgttatcatatcagtcnatgtagctgatcagtgtactgtcctgcgctgcgacgctgtgctagctgtgaactcgtacgcactggcctgctcgcatctcgntactatatgggccgcaagctcgtccctgnctgtcgccaccagtctatgtctactaccttctagtgctgcagttagagagctcctatcatctccgaagatgtacgctactgnctctagagatatgtctagctcatcgatacacatatgttctatatcgtgctctgtcaatcatagcaacgtagcancgacgacgatgtaacaacacagcacacctatcgataagctcatcatagcctcccttacttcatctgacggacggcaggcaacgagtcacgaacagtcgatggctcgatcgctcgtcacacatcacatgatcacacctcctgctctcagattctctcggctattctgtgatggtcactcacatgctgcctgcgcttctcatgctgtagcgcggcaagatactactctgatacgacgagtatcatgactctatcacaccattgcgctctcctgctacttcagtctgctgttcaggtagtctgtatgtgtgctacgataatcctgataagagatgnttagtaagacaaggatcgacataagtagtgattgttattcatagtcctctcaatagtcttgcttaggtgatatcgtctctagtatcgctcaccgagcaacgtatactatatagatatatatatatacatataatcttatactctctctcacacactctatctctaagtcatgacaattcgctacgatatatcgtggtgtacgcgcgatatctacactcagtgttatgtcgtctcgtctctattacagatagaccgacactgtccacacatatcgcatacatatcatatactctctaactcgctcgtnacttcatcatgcagcatacataattaacatnccgttactcgtcacnactggttatactaaatatgatcgatgtctgtgatcactcgatcatacgcagcagcacacgacgtgcccgtctgtcgctctgtgacgcatctctcttgtcgtgctctcagtatttctgtacgctgcgtctgcatctgantatcgctgtcncgagcgtctccgtctctncgactttgctctcncactctgtcacttctgactcgatacncngctgtcacgagatatcatcacacttatctanatatcacatcacncagaatacn

SEQ ID NO: 726 - DNA, 1726 bp, Glycine max
  misc_feature (1)..(1): n is a, c, g, or t
  misc_feature (1726)..(1726): n is a, c, g, or t
  Peptide Sequence Number=SeqID_8993
  Probeset Number=SeqID_10505
ngtcttctcctcattcgaagtttgctgtgcatagatatggcaaaaccgcgctttttggtttcgacgattcctgtgtctgtcagttttcagcttggttcctaggcacattcatggcaaactatgctttggtggtacaaaagttgaacctctagtaaaaatcaggcacacattctgccctagcaggataagagttgccgaagaatatcaagaaggtttgtctgatgaagatgatgatctctgtcccgtcgaatgtgtaagagaattcaccactgatgaagagttcagcaaaattctggacaaggctaaagaaactggatctttggtggtggtagatttctttcgcacctcttgtggaagctgcaagtatatagagcagggttttgcaaaactgtgcaagaaatctggtgatcatgaagctccagtaatctttctaaagcataatgtaatggatgagtatgacgagcaatccgaggttgctgaccgacttagaatcagggccgtgccccttttccacttctacaaagatggtgtcctgttggaagcattcccaaccagagacaaagataggattcttgcagccatactcaagtactcatctcttgaagctgaagatatcttaggttaacatcaagggatggtatggtcatggcaccctccgagacagtggtgcactgcagggaaattagtcaagtattgtacgtgacaaagttcgttaaacatgttgtatactcaaaataataatacacttcagggcttgccaacctaattcactttgttaggatacaatatttgcttgcaaagtatctagtgaagagtttaatgctaactatgatactcccttctctttccccagaggtcataaataaaattttctttctgcttaaaaaaaaaaaaaaaaaaaaaaaaaaaaaaaaaaaaaaaaaaaaaaaaccaaaaaaaaaaaaaaaaaaaaaaaataaaacaaacaacaaccttacacttaaaaaaaaaaaggtttttttttccggtcgaacccccagggggggggccccggcccccccattcccccctaaatgggaaaggatattaacaccgcctcaccaggccgcgctgttttaaacaccccccggcctgggagaaaaccccggggccttgcccccacctaataccccccttgggaagaaaaacccccccttttcccccaaggggggggcaaaaaaacaaaaagaagagcccggccctcgattatgcgctctttccccaaacagactaggcccactcccccgaatgggccacaacaggaaaaactggaacacgcccaccaaaacaaatttgtatataaaaaccaacaccccgcctacaaaattttctttttttaataaaaacccaactccatttttatttttattctgactaaacgcgccccacacaaccctacccaatacgacccgctactttaccaatacacgaagaacaaaaacaacccccgctcacaaccggtctcttgagggtgtggttgtccccccccttcttctcgaaccaccaaaaaaccaccccccacataatacaacaaaaaaccgggagcacctccccacaccctccacaagcacggcggagacaaacctattcttcttctcggagggaggggggcacgtccggacacgggagaaccacctctccaccctaacaccaataatcctttcgtgtgttgggtgcggagagcgccaccggcaacaacccaacatan

SEQ ID NO: 727 - DNA, 1550 bp, Glycine max
  misc_feature (44)..(44): n is a, c, g, or t
  misc_feature (55)..(55): n is a, c, g, or t
  misc_feature (57)..(57): n is a, c, g, or t
  misc_feature (60)..(60): n is a, c, g, or t
  misc_feature (89)..(89): n is a, c, g, or t
  misc_feature (133)..(133): n is a, c, g, or t
  misc_feature (138)..(138): n is a, c, g, or t
  misc_feature (368)..(368): n is a, c, g, or t
  misc_feature (431)..(431): n is a, c, g, or t
  misc_feature (594)..(594): n is a, c, g, or t
  misc_feature (705)..(705): n is a, c, g, or t
  misc_feature (746)..(746): n is a, c, g, or t
  misc_feature (844)..(844): n is a, c, g, or t
  misc_feature (869)..(869): n is a, c, g, or t
  misc_feature (979)..(979): n is a, c, g, or t
  misc_feature (1134)..(1134): n is a, c, g, or t
  misc_feature (1182)..(1182): n is a, c, g, or t
  misc_feature (1284)..(1284): n is a, c, g, or t
  misc_feature (1421)..(1421): n is a, c, g, or t
  misc_feature (1532)..(1532): n is a, c, g, or t
  Peptide Sequence Number=SeqID_8994
  Probeset Number=SeqID_10506
tcatttctatcccatcgtgtcgtggatatagagtatatgagtgntatcacaatcngncgncgttctttcacttcccagtctatcgcgcngcggcgcgcggcgcgagacagtttatctggcgtcgatcgtagtntacanatagtcatagcatgtgtagggtctagactaaatgcacgaacgttcttctcatacgaatatggtatgctgcgtctcttgtgtgtatataacgcgagagacgcgacgccagcggcgactgtcgctagtcatatgttggcggacggtaatgaggcgatatatatataagagggaggaggatataacacatcagcatttatctactgcagacgtctatcgggcgcggacgaacnacgcggcgcgtgcgagtgtggtcaacgcaagacggtgagtgtactggtgtatatacggacgtnatactacgcggcgttggtgctcggctataaactaacatgtgcgagatgcgttgcgtgcgaatactcattcgatagtatggatgtgatgtgcgtgagccgcacgtgttcactctattgtgtgtgtgctattacatacctactatgtggtggtggacataagcgngtgcgctcattgattatcgatatgacgcgtgtgggtgtagcgtgtagtctatgattcagatgcgcgtagcgtggacgtcatgtagccgatgtagtaatcgtgcgcgtcatnaccgcacctctcactcggtagctagtgtgtcctcactcacnactcctgttctgtcagtacgagatcctcatgatctgcgcgtcacctcgtgtcgttgtgtgttacgatctatatccacgagcactcctagccatataangttcggcgacttagacgtgacgtgngcgcactcgcgtgctctgcgtcttgttgcgtcgtgtgaacattactgtccgttacgagttttgtacgttacgaggagtatagtgctgcctatactatcggctcctactcncggacatcatgccgacagtgtagaattttctctatgtgtttgtgtaatcttatttgagtcgtgtcgttaagtggtctgtgtaccaggagactcgcgcgcgggcgcatagacttccatagccgaacccccaccagctttcgttgagtaagtgttangagtgtttagtagtggtggtgacccttttctggagtatagaatgtggngtaggagtgagtcccataaaattcagacacaagtatatgatacgcacgtactgcttcctacaaactatataccccgtgcggcatccagtgcgcatgtactancagtatcgttgagcgactctctgataccatctcacacacctgtatacacgggggaggaggggagcgctcctcacctgttaccgcgcttctgcgtaggggggagggagcccccgctacctccgctattactgaaccgncccgtccgtcctgccatttcgttttctcctttgacaatatctcttatttcggccggcggctcgacgcgcgcgtggtccccgccgtcacgtgactcacgcgcccagcaccancctcgcgctcttgctcac

SEQ ID NO: 728 - DNA, 1589 bp, Glycine max
  misc_feature (233)..(233): n is a, c, g, or t
  misc_feature (588)..(588): n is a, c, g, or t
  misc_feature (591)..(591): n is a, c, g, or t
  misc_feature (678)..(678): n is a, c, g, or t
  misc_feature (716)..(716): n is a, c, g, or t
  misc_feature (803)..(803): n is a, c, g, or t
  misc_feature (1054)..(1054): n is a, c, g, or t
  misc_feature (1101)..(1101): n is a, c, g, or t
  misc_feature (1118)..(1118): n is a, c, g, or t
  misc_feature (1176)..(1176): n is a, c, g, or t
  misc_feature (1190)..(1190): n is a, c, g, or t
  misc_feature (1240)..(1240): n is a, c, g, or t
  misc_feature (1255)..(1255): n is a, c, g, or t
  misc_feature (1303)..(1303): n is a, c, g, or t
  misc_feature (1305)..(1305): n is a, c, g, or t
  misc_feature (1321)..(1321): n is a, c, g, or t
  misc_feature (1324)..(1324): n is a, c, g, or t
  misc_feature (1374)..(1374): n is a, c, g, or t
  misc_feature (1381)..(1381): n is a, c, g, or t
  misc_feature (1407)..(1407): n is a, c, g, or t
  misc_feature (1412)..(1412): n is a, c, g, or t
  misc_feature (1462)..(1462): n is a, c, g, or t
  misc_feature (1468)..(1468): n is a, c, g, or t
  misc_feature (1505)..(1505): n is a, c, g, or t
  misc_feature (1588)..(1589): n is a, c, g, or t
  Probeset Number=SeqID_10507
ccagacacccctcaccgctgcgtcgagcagacgcctaaccgacatgtcagtatcctcatgagcgtcatcgcttccgcaatctgagtgtgagcgatggcctccctcccctacgaagtgatcgtacgtgtctactcggactaaagccatctctctttcttctctcttctcttgtgttcgacacacaccaagactctctagcctccatcgcatcttctatgtatctatgcactgtncactcacgccacaacacgcccgcgctacgtgaaagcatgtgctgacaccactcgatacaccgacgtgagtcgtgcatgctgcatcactacatcatactgctgatagttctacgaactcacatacacgtagcgcacacccgtagcgtccggatggctcgatcctccgatcataggagcatcgcgctcatcactagcctaattcggactcctgctgatgactgtatatctgcacttgtctagcattctcgtggtgtatatgcgctacttatgctgtactcacgcacactgtactcgctcatacgctggcgcgctagtgagtgcatcgtcgagcgtatatgttgtatacgcatctctntancgtcgcacgcgtgcatcatactctggtccgcacgcttctcgggtaagcatacactactattgagatactatcacactctctgcagtncgaccctccgcagtgtagtcatactctagaatatattntcccgtggtgacgtagccacgtctcgcgatcttctgatacgtaactaacgtcatcgcgcgcgggagcacgtttagttatatatggtntggtcacaccaccccctcagccgtcggcacgtgcactcacagtgcgaacgtatggcacgacgctacatcatcgcactcagtattacacattctcgcaggatatcgcgtcgcacctcctgacgcatagacctcctcgctcctcactacgcgcgagatctcgattgtggaactacaatacgattagacacgctatgtgtgctcatcgactctctagcgcactgattaataatagagaatatcactatagttcngagatactagcagctgtctgagcgtgtctaacgccatggcgcccgcntgatgtaatagccgcgngttaactatagcgaggctccgagcgcgacatctctgctcggagagttctgttactctntcgagtactgtccnatctctcggatagcttcactcacactcgatcgcctcactactatgtcacnccgctattcttacgngagaatcgagacgacgtcttcctctcacgaacgctgcgtcttctctcncncggcgttcgtcacgcnctnctttgtactgtgtgttgtcagcatatagtatgtacatgggggcgcgtcangatgcgntgctcgacgtcacaatcgcactcgtnggttngtcctaatatacacaccctgccgacatcctatacatctactacactacantacagntcgcgcaacacgctacatactcacagacgtatctcgnacgatactacgtcaatgaggcgcgacgctcgggttccatctatcctcgtgatatatgaagtacgacgagtgctctcgagcgcnn

SEQ ID NO: 729 - DNA, 1606 bp, Glycine max
  misc_feature (1)..(1): n is a, c, g, or t
  misc_feature (26)..(26): n is a, c, g, or t
  misc_feature (28)..(28): n is a, c, g, or t
  misc_feature (58)..(58): n is a, c, g, or t
  misc_feature (72)..(72): n is a, c, g, or t
  misc_feature (99)..(99): n is a, c, g, or t
  misc_feature (116)..(116): n is a, c, g, or t
  misc_feature (139)..(139): n is a, c, g, or t
  misc_feature (198)..(198): n is a, c, g, or t
  misc_feature (208)..(208): n is a, c, g, or t
  misc_feature (259)..(259): n is a, c, g, or t
  misc_feature (264)..(264): n is a, c, g, or t
  misc_feature (308)..(308): n is a, c, g, or t
  misc_feature (327)..(327): n is a, c, g, or t
  misc_feature (344)..(344): n is a, c, g, or t
  misc_feature (347)..(347): n is a, c, g, or t
  misc_feature (484)..(484): n is a, c, g, or t
  misc_feature (532)..(532): n is a, c, g, or t
  misc_feature (534)..(534): n is a, c, g, or t
  misc_feature (573)..(573): n is a, c, g, or t
  misc_feature (591)..(591): n is a, c, g, or t
  misc_feature (726)..(726): n is a, c, g, or t
  misc_feature (746)..(746): n is a, c, g, or t
  misc_feature (815)..(815): n is a, c, g, or t
  misc_feature (823)..(823): n is a, c, g, or t
  misc_feature (883)..(883): n is a, c, g, or t
  misc_feature (926)..(926): n is a, c, g, or t
  misc_feature (1152)..(1152): n is a, c, g, or t
  misc_feature (1243)..(1243): n is a, c, g, or t
  misc_feature (1273)..(1273): n is a, c, g, or t
  misc_feature (1383)..(1384): n is a, c, g, or t
  misc_feature (1386)..(1386): n is a, c, g, or t
  misc_feature (1392)..(1392): n is a, c, g, or t
  misc_feature (1481)..(1481): n is a, c, g, or t
  misc_feature (1484)..(1484): n is a, c, g, or t
  misc_feature (1543)..(1543): n is a, c, g, or t
  misc_feature (1546)..(1546): n is a, c, g, or t
  misc_feature (1550)..(1550): n is a, c, g, or t
  misc_feature (1561)..(1561): n is a, c, g, or t
  misc_feature (1589)..(1589): n is a, c, g, or t
  misc_feature (1597)..(1597): n is a, c, g, or t
  Peptide Sequence Number=SeqID_8995
  Probeset Number=SeqID_10508
ncagagacgctcagctagcgacgagntnagagatgcgctactacgcagcgacagtaantagcacattcatgncgcgagtatacactgcgaggccgtcgncgtctctatctcagctnacatccatcagtacgtggttcgnagagcacgcacgatgcgatgcgatatgggattgagtgagtactacagagacgatgctgnatgactatantagtatgctagcgcattatacgatatgcagtcttcagacggtcactatttncgatntatacatctacgtagtatcctgctcgtagactgtgtgagtcgcngtcagtactctcatatcgncacgctacgtagacgcngcnagctcgcgatgatgtagagagtcgtgtcagagtgcatgtcggcgtagcagtcgtattaacgacgcatcgtatagtgtattcagtagtgtgacgtgatgagtgatgtatttatttgatagtcatgtagattgtatagnagttgttgcatgatggtctataaggcgatagagagtggatgatgtctntntgttagcactcatccaacacatcgatcgcacttagcggntgagtgacgagtactgangtgatgagcaagctatcggtcatgtgtatactatcagcgctgtcactttagtctcgcatattcttaattaatatcatacacagctctctctcagacacacagcatcgtcatcgacagacggcgcgtcagtgtgtnctgagattgtgtcatatccngatgagctatcgctcgatatgctgtgtctgttacatcactaatagagcgtagagtgtctactacatatngtgggtgngtgtgcgtgatgtgtcgtacattgtctctataatatcatactactgcgctgagatgttgnatatatagctggatgtgtggatgagcgtgtgccgtgtgtgagnatcgaagctacaacacgtcactccatacgctacagacgctcatgtgtgatggtgagtgcggctggaacacatcagacagtcataatctctattgacagcgatatagtgtggatgcatgccatcatataatcttcttcattatactcctatctacctccttttatcgtcgtttctcagctcatcctgtagaatatgtatcctagtgattgtagtcacgcctgtgtgntgcgtaactgaatgacatatagattatagatagagcggagctccaccgtggtgtggagtggaaggatgggaagtagtgtagtgacagaagngagagctgagagagatgtacgtagtgaatntattatatgtcgtcagcatatagatacttctctagtcgttcaatatacagtacagcgttcaaagcatatagaagtacaataacacatactctactctaactcgctcgagnnangtatcntctaacgtaggttacatgatgatgtgtaggtgcgctgtcgtctgcgtctacatagatggttggtgcactcccagctagcgggagtaagnacncaccaacaaaaattataaatataaatacaacgcgagtaaaggtgagatcgcttgttganatnttangatactatatnatactctcatcgcagcaaacacccacanataaacgnaacaaaaat

SEQ ID NO: 730 - DNA, 329 bp, Glycine max
  Probeset Number=SeqID_10509
atgacccagatcagtgttcatgtggcgcagcttatctcagatgccatccatcagttcgtaggtattgcacctctgagacacctaatggacccagaaaagttcaacagagcattggggttttcgaccttgatcacgggtctctgccagttctatgaggcgcagcaacagaggcaggaccatcagcagaagccatcggcagatgcactgccgccgcctctacaacagccaccattcctaaagtccatctctgctcacatgcagaggatggaactctatatgaagcatgtgactgaccagcaggcggccaatcataagggccaagtgcaggg

SEQ ID NO: 731 - DNA, 1381 bp, Glycine max
  misc_feature (181)..(181): n is a, c, g, or t
  misc_feature (421)..(421): n is a, c, g, or t
  misc_feature (424)..(424): n is a, c, g, or t
  misc_feature (426)..(426): n is a, c, g, or t
  misc_feature (667)..(667): n is a, c, g, or t
  misc_feature (805)..(805): n is a, c, g, or t
  misc_feature (904)..(904): n is a, c, g, or t
  misc_feature (922)..(922): n is a, c, g, or t
  misc_feature (968)..(968): n is a, c, g, or t
  misc_feature (1031)..(1031): n is a, c, g, or t
  misc_feature (1033)..(1033): n is a, c, g, or t
  misc_feature (1035)..(1035): n is a, c, g, or t
  misc_feature (1037)..(1039): n is a, c, g, or t
  misc_feature (1154)..(1154): n is a, c, g, or t
  misc_feature (1156)..(1157): n is a, c, g, or t
  misc_feature (1191)..(1191): n is a, c, g, or t
  misc_feature (1193)..(1193): n is a, c, g, or t
  misc_feature (1212)..(1212): n is a, c, g, or t
  misc_feature (1220)..(1220): n is a, c, g, or t
  misc_feature (1367)..(1367): n is a, c, g, or t
  misc_feature (1381)..(1381): n is a, c, g, or t
  Peptide Sequence Number=SeqID_8996
  Probeset Number=SeqID_10510
ttttctctcgcgctctcgatctcctttatgcccctcgtacgatctctcgtctctgcatattcgttgatgatctcgtgggagtgtctgcccccgctgcgtggtggtggcggagtctcacgaccgcaactagcgtgagatccactctcaggggactagcgagagataactccttaggtactgnttctctctcttgtctactcccgcgtacagatatatcgatcatatccacactcctacacttcattccgtagcgctcttcaagagagtgtggccgctgatgcaccgcatacgatattctttacgccagattgacgagcgtcgcacgtgtggatcgcgcgtctcgtattgactggatattcttccagcggaacgcacgacactctggtttcttatctacacggcgtattatagctcgtcccgncanantaatcgtaggcgggattgatggataacacacactaaaatcatgtacgactgttctagttaagttcgtgtgcgtgccctcacatgttctagaccgctccactccgtgagagtggcgatgaatattaacatgaccacacgacgccaacgtatcactctagcacccactaactatcttctagccgtgcgacgctagtgtagagtacagaatatgacctcgagacatcacagtgattgtgcgttnggatgcgtcgtatataacagtagttgttctgcgcacgtaccgcgccccctgctgagggatgtgttcgccatgctgcgtcttatccgtcctctgcatactgacgtgatgagggagcgtacaatagatggcgtgtagtgntatactcgtgtcgggtgtaagctgagacacagacgcgatgttacatcatgcctagagagtgcaggtggcaaagtgacgcaatgcggcgcttaatatctntgcgatctctggtgatcnaccttttacgatggagtggcacgcgtatcacaccacgcctcgcatnattactcttcacgatatacgtatcgcgcggacttgatgctgataggatctcagatgacacgantntntnnnctggcttgtctgacacgcgagccggctgggcgctgatgtccgtgtcgatctggcgcgccctcgactatgtcatcttacgtcgctgtcgaccgtgcactcactcgatcgtcatttncnnctcactatatgacgatatggataagaatgacagnantgagtacaacatgaggcangatctcgntcaggtactctaggagagagttacgaacgtgatagagcgcggtcgtgcgatgcgaggtggccgtctctgttctgtgatgtaacattgtctcacctcacgcgcgcgctacctcatgaaccaactgagacgtcgcggctgtagcagccngcgacagcagcacn

SEQ ID NO: 732 - DNA, 1338 bp, Glycine max
  misc_feature (12)..(12): n is a, c, g, or t
  misc_feature (18)..(19): n is a, c, g, or t
  misc_feature (50)..(51): n is a, c, g, or t
  misc_feature (60)..(60): n is a, c, g, or t
  misc_feature (93)..(93): n is a, c, g, or t
  misc_feature (100)..(100): n is a, c, g, or t
  misc_feature (129)..(129): n is a, c, g, or t
  misc_feature (145)..(146): n is a, c, g, or t
  misc_feature (898)..(898): n is a, c, g, or t
  misc_feature (1176)..(1176): n is a, c, g, or t
  Probeset Number=SeqID_10511
ttttaatttttntttatnntaaattatttatttatatatttattatatannattttaaanaataaatttataattattccatatatgagattnatcaaantgtaaaaatcataaatattctaatctaanacttttatctaattanncattcatattattccataatgtatcaatataatctctttaagacaacatcactcctcaacaaccaaaaaattaccaccaacgatatcccttttcttcttcattcctaatcgtcctcaaactctacgcacacacacgcgttaaagttcagatagaataaataagtagacaaaagtaatatatataatcattgtagaaactatttattctaatatcagctagtacctaattaaaatatattaaattctagaatcccagctgtcttcgatttttacatataacaaaactaaaaaaaacccacccaaacatatagagaaaaagataaaataagacaaacaaaaagcgaaacaaaaagcctcctagtctgcggcactattgctataatcctacacagaagctccgtatattcatatttccaccttacgacgtaaataataattgtagttgattagagaaatgaacacgatcacaacccctatgattccttatctaactctattttaaaataaaatattgactacttaatattataacaatcatactagtataactagagcgagcaggaacgcagacacgcaaggcaagtgccactcacagaggacgtcagcgtgcgtctagacttgtcgttaattaccttttgagattatagagtcggtaagaaagtcgaattgaaggtaaatatagaacaagagcatatgaaaaggtaaatgatgacgatacgccacggctcacgtgcaggcgctctaagcagacnaaacaagtacactaccgtctttcttatcttatcttacgctcgctcgtgtgtcggggcctgcacagtagattaatgtagtacaataccagcaaacggccattacaaaaccataacctcccttgccatttccacgctgtgggtggctatgcggtgtgaagtcggtcgtgtctttctgatatctaatacaaactctccagctctcttcattatttttctcaccctcctcccgtcactactctctaagtgtttacatgatggaatatactcgtgcacactcnatatactcctctctaattacctctctacaccatctaactactactaccttaacttattgataaagtctagaaacgacatcaagaaatttacttgtgtcacgccctctttctgcccatactcactcaccacatctatgtctgttccttcgtcacacaccctcc

SEQ ID NO: 733 - DNA, 1610 bp, Glycine max
  misc_feature (18)..(23): n is a, c, g, or t
  misc_feature (25)..(28): n is a, c, g, or t
  misc_feature (30)..(31): n is a, c, g, or t
  misc_feature (59)..(60): n is a, c, g, or t
  misc_feature (63)..(68): n is a, c, g, or t
  misc_feature (73)..(73): n is a, c, g, or t
  misc_feature (76)..(76): n is a, c, g, or t
  misc_feature (87)..(87): n is a, c, g, or t
  misc_feature (178)..(178): n is a, c, g, or t
  misc_feature (261)..(262): n is a, c, g, or t
  misc_feature (545)..(545): n is a, c, g, or t
  misc_feature (561)..(561): n is a, c, g, or t
  misc_feature (706)..(706): n is a, c, g, or t
  misc_feature (805)..(805): n is a, c, g, or t
  misc_feature (810)..(810): n is a, c, g, or t
  misc_feature (911)..(911): n is a, c, g, or t
  misc_feature (928)..(928): n is a, c, g, or t
  misc_feature (953)..(953): n is a, c, g, or t
  misc_feature (955)..(956): n is a, c, g, or t
  misc_feature (958)..(958): n is a, c, g, or t
  misc_feature (975)..(975): n is a, c, g, or t
  misc_feature (1013)..(1013): n is a, c, g, or t
  misc_feature (1030)..(1030): n is a, c, g, or t
  misc_feature (1112)..(1112): n is a, c, g, or t
  misc_feature (1185)..(1185): n is a, c, g, or t
  misc_feature (1240)..(1240): n is a, c, g, or t
  misc_feature (1325)..(1325): n is a, c, g, or t
  misc_feature (1352)..(1352): n is a, c, g, or t
  misc_feature (1356)..(1356): n is a, c, g, or t
  misc_feature (1393)..(1393): n is a, c, g, or t
  misc_feature (1414)..(1414): n is a, c, g, or t
  misc_feature (1420)..(1420): n is a, c, g, or t
  misc_feature (1422)..(1422): n is a, c, g, or t
  misc_feature (1424)..(1424): n is a, c, g, or t
  misc_feature (1428)..(1428): n is a, c, g, or t
  misc_feature (1433)..(1433): n is a, c, g, or t
  misc_feature (1435)..(1435): n is a, c, g, or t
  misc_feature (1437)..(1437): n is a, c, g, or t
  misc_feature (1439)..(1439): n is a, c, g, or t
  misc_feature (1446)..(1446): n is a, c, g, or t
  misc_feature (1494)..(1494): n is a, c, g, or t
  misc_feature (1501)..(1501): n is a, c, g, or t
  misc_feature (1506)..(1506): n is a, c, g, or t
  misc_feature (1510)..(1510): n is a, c, g, or t
  misc_feature (1539)..(1539): n is a, c, g, or t
  misc_feature (1581)..(1581): n is a, c, g, or t
  Peptide Sequence Number=SeqID_8997
  Probeset Number=SeqID_10512
gtgttgtgagtgtgggtnnnnnngnnnngnntagatgatgcatatagtgtggagaatannaannnnnngacgnagnaagtaaataantggtaagaggtctatgttgtagtggatgtgttctatgaacacaaacccttaatcgcaagaaccgcaacacgaacctcacagggcgtcaganctctacgttcttactagttgggctcataggctcaaacacgaaggagacacgggatagctcaacctcgcgatgagcgcgcctcnncctcctcttagtcctacttcggcggctcggacatgtggcgctctcgcccgactataagctgatttctcactttagtgtctgtgtacgggatagtgttatcacactacagctcgatctctggtacatgtagagtagcggagatagagggagtagtatgagtagacactgcggaatgacgcagggtcggtatcataaattgcgcagactatatgcccgagatggatgtgcgcatgtttcatacttgctggtgcgttgtactctcactcttgtgtgtttacgtagntggcggtaagagggtnagagaacttcttctgtttgttatgcatgtggcgcctctgtcgcgtcatgttggtgccgtggcgcctaacgacacccaacactaacacagaaccataattacgccactgagtctatattataacttcgggtacgagtataagcganaatgagagtgaacatcaaagatgtcaatgaaacaacaataaacacatcttaacacgaggcgcagcgccgtatgaggacgaaacagcggcgagacggaanagccncggcgcgcactaacgccacctacgcagctgcgtctgtcctcacgtgtgcacgctggcctgacgcctctagtactcgcgagatctgaccatgtcgactatanatgcctattgcctactngtggctctctcgtgtaatgtagatntnntnatgcttatgctatgtantctgtacattcatctattgagtgtcttgttgctagtcntcgactctctcacagcntatttagtatatacatcgtatgtgtgtcccgatatgtagctatgaatcgcaagagacgactcacacgcgtagcagagagagntggaggcgcgatatcgagtggtgctgtctcccacactcctcacactcatcctcacacaacatgcgtcttatgntctatgtgtcaatggatgccgcgtcgtgtgcgtcgcgtctacatctcgtgtactncactcatcacactcgatattatactgatactattacttactgctctatacttgtgtgatccagccttatgtcgttgcgtatgagntacggagatgtgtgtatatagagtganaagngtggttgtagtcactcacaccccactactcctctgcntatgacaattaatatatatanactacnancnacanaaagnancnanagggagngaaggatgaggtgagaatgatatttgtgagtcctatactataacgaangatgagngcctnactnacctcaatgtatcataatcataattgaanaggagatatatataatagatacatgataaccacgctagatcntgtctatagtggagtcgctgtatcatgag

SEQ ID NO: 734 - DNA, 226 bp, Glycine max
  Probeset Number=SeqID_10513
gtcaagcgatcgatttggactaatgtttgtgctcgtgtgttcaagctttgagaccagtatgtcgctatgctcttacgcacataggaattacttctcgagacccctcggtattgtgccttttaggaggaacatgaagccatcctcaaacaacgtgaagatcctaactccggaatcacatggaaagaatacaagtcaatgacattcacatttcaggtggaggatcaat

SEQ ID NO: 735 - DNA, 739 bp, Glycine max
  Peptide Sequence Number=SeqID_8998
  Probeset Number=SeqID_10514
aaacaaataatccgtaatcaattttaaataaaaatgtcagttatcgacacaacctccaaagatgtctccttcagaatcggtgtcttctacttcctcatcctcgtcgacatcgttctaagctccttcgtcgaactcaacatctcccaaaccgtagataacagctataatgccaccactacaatcatcattttcgttatccaagctatactgcaaggcttcatttttgtatggttattctcacttttctggtctacagtcctcttaaaatacggtttggttggcctgcttcttaaaaatttcaagtggtctattatatacattttgatctctattgtactcaatatcttcgaaagacttctccgtttgattattagtgggagcgataaagcagatgttgagaccaagatttggagtaatgtattgtatagaatcatatactacgttcgttatgccaatttgataccgttctacttagctttgttctctgtagcgaaaaggatcacaaagccagaatactacaaaccttcaaaatggctttctaagtaaggtggaactgactttttgttgagaaatagatatgcttttttatggatttttattttgtatgcatctaatttagatttgttatatttaaaggatggttctttgaatttattgtttttatgaatagatgctttggaaaactatgatttatatagcttttttaactgtaataatttttacctagttatgactactc

SEQ ID NO: 736 - DNA, 601 bp, Glycine max
  misc_feature (601)..(601): n is a, c, g, or t
  Probeset Number=SeqID_10515
tcgagtcagctacgtaggccccccccacggctttcgtcagccggcttcctttcgaagaacagcgaagatgctatcgtacgttgacaggtcgggaacctccttcagccaccacgctggccccaccgacagcggaaggaaatcacatccggtcgcggtccgcatctgagctaccaagagttcaagggatttcccgcgcatcgttaccagatttcttatgtccaccagagtctcagaagatcaaaacatctcacccgcgtgcggaacatgcgacctcgacgctcatggaacacacaggaccttcctcaaatgcagcggcttatacaagggattcacgttccagataccgtatgtccagtgccccaagcagcagacgtactagtcccacagatcctcaatctggatccaatccacaaatgcagttctcgaacttgaagccttcatccgagccggctccgtcactttccctccacgagcgtgcagcttcttattcaacaccaaacgcccaccctggcgtcccaggaccatgtgtagcgcaagtgccagcaaagaacacgtccagcgctcgttcaccgctccttgatattaggactacgcatcggan

SEQ ID NO: 737 - DNA, 443 bp, Glycine max
  misc_feature (35)..(35): n is a, c, g, or t
  misc_feature (43)..(43): n is a, c, g, or t
  misc_feature (179)..(179): n is a, c, g, or t
  misc_feature (194)..(194): n is a, c, g, or t
  misc_feature (197)..(198): n is a, c, g, or t
  misc_feature (202)..(203): n is a, c, g, or t
  misc_feature (214)..(214): n is a, c, g, or t
  misc_feature (271)..(271): n is a, c, g, or t
  misc_feature (276)..(277): n is a, c, g, or t
  misc_feature (310)..(311): n is a, c, g, or t
  misc_feature (321)..(321): n is a, c, g, or t
  misc_feature (333)..(333): n is a, c, g, or t
  misc_feature (356)..(356): n is a, c, g, or t
  misc_feature (370)..(370): n is a, c, g, or t
  misc_feature (372)..(372): n is a, c, g, or t
  misc_feature (374)..(374): n is a, c, g, or t
  misc_feature (418)..(418): n is a, c, g, or t
  Peptide Sequence Number=SeqID_8999
  Probeset Number=SeqID_10516
tcagctacgtaggcccccccccccgttcgtgcgtngcgttgcntgatgttgtagagaaaggggcagtatgtctgaagactttttcatagatgtggatggaccaagtaaaaagagaaaattaaatggaatcaaccatcataaaaaagctcaaagactacaaaaggaggagcctgttgcanatgtgattgaagaanaannggannaggatggtganacagcagatgagaagagattgcgtttagcccaagattatttggcacgcttgggagcntgtannggaggaggataggccagacgacgatctcattgnncaacgtttanaccaagatgcanttaaactacgtggaaagcgcttncagtcagttgcatntnanttggttaggtcaagagtttgaaacagccaaaatcacaaaaggtnaccaaggtcctactacttgcgttgc

SEQ ID NO: 738 - DNA, 896 bp, Glycine max
  Probeset Number=SeqID_10517
atcagattgacaacaacaacaaaaatctacgatgctacttgtgcgatccctctgccgtaccgctgcggcggcctccgtcgctacgctccgatcattgagatccgcccctccaaatcagctattgcgcaatcgttccctcctcacgcgaggattcttcgctgtttcttcatttccttcaaatcgaactccttacgattgtcggtatcctcgggcaattggcataggaagtgtgcgcaactttagcgaagatgtctcacatgcctgaactcaaagacagtgatgttcttaatgctttcaaaggtttgatggctacagactggtcagcgctgccttctgctgttgttaacgaggcgaaaaaggcagtctcgaaaaacacagacgacaaggcagggcaagaggccttgacgaatgtgttccgagcagctgaagctgttgaagaatttggtgggattctcaattccctaaagatggaaatcgacgatagcattgggatgagtggagaggatgtgaagagcttaccagaagatataaccaaagcgctgcgtcttgcttatcataggtatgctacctacctagatgcgtttggacctgaagaagtttatttgaagaagaaggttgagacggagttggggacaaagatgatccacttgaagatgagatgcagcgggcttggttcagaatggggaaaggttaccgttcttggaacatcaggactctcggggtcttacgtggagcaaagggcttaaaacggacagagaagaatcttaaataatgtttgttatttgcgttattgtgtcttcaacacataataaggtcaataactgaccaaagacatataaggtgagtttttgttcattgtcgctgcctcgaaaaattttaaacaagcttttgtgttc

SEQ ID NO: 739 - DNA, 866 bp, Glycine max
  misc_feature (121)..(121): n is a, c, g, or t
  Peptide Sequence Number=SeqID_9000
  Probeset Number=SeqID_10518
aatattttatttataaaaatatttatataaacccccttccttcccccccctccccccccgaatacaattgggtaccgggccccccctcgagtcagctacaaaagccccccccccccccggntaattttccttatgttcagagtgatctgcttagtgctattggatggagtgcaggctgccttcttgttggtgcagctatgaatatgcatccgcagctctttcgtgctgtcatattaaaagtaccatttcttgatgtatgcaacacattgctggatcccagtctgcccctcacaattttggattatgaagaatttggaaatcctcaaatacagtcaaattttgattctatttttagttattctccgtatgacaacattcctcacagcagttgctttccttcagttttggtcacggcagcagttaatgattcaagggttggagtttgggaaggtgctaagtgggttgctaaagtacgagatagtacctgccctcattgttctcagactgtaatcatgaaaacaagtatgataggagggcattttggggaaggtggacactatgctcaatgtgacgaaacagcttatgagtatgctttcctcatgaaagcttttggaattttaaatgaataagtttattaagtcagcagctggaaggttattttatattctgtgggaagagtttcatttggggtcaagaaaaaaattcctgtcctccctagtgcactggtcaatacctaaggctcccaaaaacgcagaaaaaggtttgagcattctatttttctaatgtaggcaaaattcgcttgaagctctcccaggtctcccacctcccagtatcgaatctttttcaaaagtaaaaattacttttcc

SEQ ID NO: 740 - DNA, 488 bp, Glycine max
  misc_feature (2)..(2): n is a, c, g, or t
  misc_feature (445)..(445): n is a, c, g, or t
  Peptide Sequence Number=SeqID_9001
  Probeset Number=SeqID_10519
tngagtcagctacgtaggcctcaccccccgaagaagagagaaagacggaggatagcaaggaggaggaggaagtaaactgacaataacaaatgcagtctatcaagtgtgttgttgtcggagatggtgctgtggggaaaagttgtttgttaatttcttacacaacaaatgcatttcctgcagaatatgtgcccactgtgtttgacaattacagtgccaatgtgatggtagatggtaaacctatcaatttgggcttgtaggatactgctggacaagaagattatgatcggcttcgaccattgtcgtatgcacaaactgatgtttttcttgtttgcttttctattgtttccccttcatcctatgaaaacgtgtcagccaaatggtacccagaaatttcacatcaccaacctaatgttccaattatacttgtgggaaataaactcgattngcgaaacgacccagcaccaagacgcccacccatcacttacgag

SEQ ID NO: 741 - DNA, 1482 bp, Glycine max
  misc_feature (63)..(63): n is a, c, g, or t
  misc_feature (150)..(150): n is a, c, g, or t
  misc_feature (248)..(249): n is a, c, g, or t
  misc_feature (289)..(289): n is a, c, g, or t
  misc_feature (415)..(415): n is a, c, g, or t
  misc_feature (717)..(717): n is a, c, g, or t
  misc_feature (831)..(831): n is a, c, g, or t
  misc_feature (939)..(939): n is a, c, g, or t
  misc_feature (979)..(979): n is a, c, g, or t
  misc_feature (1058)..(1058): n is a, c, g, or t
  misc_feature (1196)..(1196): n is a, c, g, or t
  misc_feature (1264)..(1264): n is a, c, g, or t
  misc_feature (1293)..(1293): n is a, c, g, or t
  misc_feature (1332)..(1332): n is a, c, g, or t
  Peptide Sequence Number=SeqID_9002
  Probeset Number=SeqID_10520
tttttcccttactattcctccagttttgccgcgccacgcacccgcggcccgcgcgcgccccgncgcgcccctcggccgccacctcctcatgcactggttacctacccacctatttgtcgtatacaccactgatacacagcactaataaanatctacacttatgaaccaaaagcagcaccctccgtccgtcgcgagcgaccatcctgcgcacgtgcacatattacacgtcacaatcttgctgtgctgtnntggatggtgttgatgttacaaatgcgcatatcttacgtgnatagtactatagatgttctgtctatactataaccggatacaggtttaaaatagataagggtatactcgccatagatgcgcaatccacacggtgttatgataccgctccggcccgccacgatccggncagcatgagtagagttctcgctaaatgtactaccctgcccgtgttgtcgtctagggacgctctcgtgtgatcattgatcgcaatccgtgggagatataaggaactaatacgtaccacgacatgccatcaaattcgcaaccggaggctctatcgacaatcgggcacaatatctgttacttcgatgtttaattgggttagacagttcacacacgacaaaccacttggagctccacaacgacactgccacatagactatcgttagcaacacactacagccattgtatgaaacacctcttcggtgntccgtagctcactcacgccgcacctacaacatctccgcgacacacaactactgtgtgtttgtagtaacacgtctacctatcctctctgtgaatcttatatttgcgtctcgtggntctctactcgaccacataccctcgagttactgatcacactcagaatggatcgtagcatgcacttaccagatgtgtgtgtatgtagagcgtactctctacacagagtgngatcacacacacgcgacggacatgagtcatagagcataancatactactctctattatcacggcgtacagtgcatactctatgtcgcgtaactgctgcatacacaagatgcacgagctntaaccacaccgagtgtcatctacatactcatgacaagtattatgatatacataagtaacccactcgtgcgaagcgcggctgcaccctcgcatccgcgcatcgcgtggatgatacatatctattagatgtatgtgtgtngtctgtcgtatctctacactgtctgcgatgtctatctcacacgcgcgatacactactgtccatcacancagtccgtccgtgttggtgtgtgcgcgtntcgacagagttcgtcgtgtatcgtatcactacactacgntctactactgctctgtacgtgcactcatgatgtagtagagacgacagacgcgcgcacacgagcgtgatgaacgcagatgtcgtcacactctatttgatgctcgagacactaccaactctcatcacaaagacgagctctagatcaatactg

SEQ ID NO: 742 - DNA, 1519 bp, Glycine max
  misc_feature (5)..(10): n is a, c, g, or t
  misc_feature (19)..(19): n is a, c, g, or t
  misc_feature (31)..(32): n is a, c, g, or t
  misc_feature (88)..(88): n is a, c, g, or t
  misc_feature (95)..(95): n is a, c, g, or t
  misc_feature (98)..(99): n is a, c, g, or t
  misc_feature (104)..(104): n is a, c, g, or t
  misc_feature (125)..(125): n is a, c, g, or t
  misc_feature (133)..(133): n is a, c, g, or t
  misc_feature (236)..(236): n is a, c, g, or t
  misc_feature (245)..(245): n is a, c, g, or t
  misc_feature (255)..(255): n is a, c, g, or t
  misc_feature (261)..(261): n is a, c, g, or t
  misc_feature (342)..(342): n is a, c, g, or t
  misc_feature (399)..(399): n is a, c, g, or t
  misc_feature (425)..(425): n is a, c, g, or t
  misc_feature (438)..(438): n is a, c, g, or t
  misc_feature (500)..(500): n is a, c, g, or t
  misc_feature (521)..(521): n is a, c, g, or t
  misc_feature (719)..(719): n is a, c, g, or t
  misc_feature (790)..(790): n is a, c, g, or t
  misc_feature (863)..(863): n is a, c, g, or t
  misc_feature (870)..(870): n is a, c, g, or t
  misc_feature (989)..(989): n is a, c, g, or t
  misc_feature (1089)..(1089): n is a, c, g, or t
  misc_feature (1174)..(1174): n is a, c, g, or t
  misc_feature (1311)..(1311): n is a, c, g, or t
  misc_feature (1353)..(1353): n is a, c, g, or t
  misc_feature (1372)..(1372): n is a, c, g, or t
  misc_feature (1389)..(1389): n is a, c, g, or t
  misc_feature (1442)..(1442): n is a, c, g, or t
  misc_feature (1486)..(1486): n is a, c, g, or t
  misc_feature (1519)..(1519): n is a, c, g, or t
  Probeset Number=SeqID_10521
ggggnnnnnnttttttttntttttttttttnntttagtgcttgttgttggttgcgtattggtgtatcgtaaacactactccccccaantactaanggnngaggnatcgtgttacttcctgcgctntttgcttntctatcatattactacagagtcgcgagtgtgcgctacaaccacatagactatacatgtactaatatacgcgcgggcaaaaacaagatatacttgggatggtcnccccgcttncgatcccatntaaaanatgtacggcgaggcggggccgcccggccagtattatatatattagaatatactccttctgcgcgcactctcattctctccngtgtcaccccggcgtgcgagcgtgcgcgctccgcgcgggtccgctctccgctctganctgagtctgcaacgtgaggtgtcggngactaatgactgnatattactcacatctcactctcataacatattatacgctacaacacacatatacacactcanaataatacacaatacattttntatgaatagagagatatacgtggtggatagtaatgatgtgtcttaatgtaagcacaccacaatctagaacctctagctcctatcttgtgctatatacataccactaacttagtggacgtgagattgtcatctgacacgtatgctacgatagtagtgacaatatgtggatgtgagtgtgagtagataggtatgatgggngtctgactgacgtatactactgataactacatataattctgactacgtagtgtttatgataatcgaatctnattatcatacacctcaatatactattatatattgactctatcaactaaatcagatcgaacatatataaacaantctgtanatgctctcacgcggttaagtgtagatgataacgacaatatcgtggtgcgcttcgcgttgcgagtgagacctcgagcacactagtctctctcgtagcgttcgtcgtcggcactatagatncgagcatgatcacactcgcctcttcctgtcagacgtcgctctctatgagtcacgatactcgtcatcatcctcgctactcgtcgatctgctacacttctantctctatcgacgaatctacgatgacgacaccatatactgagatctccacacacgacaccaaccatctatatctcctactacatgntcgtccctatcgctcactcaatgctctgttacatctgtcagatcatcatgtcgcgcactttgctactgaatatagtatgcgtgtgtaggcgcgatgcgtctactatcgtagatatgtagaacatgacataatacgangatcggttcagtgtacgacacgtgaacttatcacactagcanagcactgatatgtacatgntcgcagtcgaatagagncgtgatagtgagatcgacaatatcgaagatgagagagtagacagccatcaaancatacagacactatctcgtatcatgtaagacatcacgaatacanactagatatatgacatatactatactagtacan

SEQ ID NO: 743 - DNA, 695 bp, Glycine max
  misc_feature (691)..(695): n is a, c, g, or t
  Peptide Sequence Number=SeqID_9003
  Probeset Number=SeqID_10522
tcgagcagctacgtaggcccccccccccccagtcacacaagaagcccaacaagccagatcagaattccatgaaagcaagaggcagaagctggagcgacagccgtggtgccgtggaagtggcgagtcatggaggcagagttggtcagtgcaaagttgtgcgaagcgaagccaggctacgcagacaagcaggccgagggcgaaggcggtcgggtgccacagatggaggcgctgggacagggtggtgaggtgaagaggacggggtcgagagcagctacagtgcgtgcatctgtcccctcctttgttttttcaccaagcctacctaaaatctatcaaattattcagggtaagatagccgaatacatctacctctggttaattttattttttttttaacatgcaagtactttattcagctgattgggtcttcttttacttccgttcctcaatggtattcattggctgatcgccatgcatctagaaggtgatgtcctgaagcatctatcaacatggattatagaccgaattatcaacaagtatggtgttagccagtgttaccgtgctctaaaactatgcaatagtgatctcaaagaaccataaatatccaacatagtggtggactttggcattttgtgtttctgttatgactttcctttgaatattttgttaattttctaattaatctttcccttannnnn

SEQ ID NO: 744 - DNA, 826 bp, Glycine max
  Probeset Number=SeqID_10523
cctctcaaaaggcatgaagattccatctgattgtgctggctgtgactgtgaaggtgattgtgctaataacaaaaattgttcatgtgctcaacttaacggctcggatttgccttatgtatcatttaagaatattggcaggttagtggagcccaaagcagttgtattcgagtgtggtgctaactgcagctgcaatcgaaactgtgtcaatagaacatctcaacaagggctgcaacatcgcctagaggttttcaagacggcttccaaaggatggggtgttaggacctgggacacgatcctcccgggggctccaatctgtgagtatgttggggtgttgaggaggactgaggaagtggatggtttgctacataacaactacatatttgacattgattgtcttcaaactatgaagggtttagatggacgggagaaaagggcagggtctgatatgaatatgccatcacttcatgctgaaaatgattccgaggcaccaccggcaccagagtactgcatagatgctggctctattggaagtttcgcaaggttcataaaccacagctgtaaccctaacctcttcgtccagtgtgtcctaaccaatcaccacgacgtgaagctagccaaggtgatgctttttgctgctgacacgatacttccacttcaggagctctgctatgactacggctatgtcctgaacagcgtcgtttctgcggatggcgaaattgtcaagctgccatgctactgtggtgccccagactgccgcaagcgactctactagcggagctcttctgttctggattttggagaaagcagaagtatatgtagtattggg

SEQ ID NO: 745 - DNA, 454 bp, Glycine max
  Peptide Sequence Number=SeqID_9004
  Probeset Number=SeqID_10524
cctaaaagcgaccccaggcagatctggcgtaatcccccaatccccccccaaagccccaccccccgaagtcgcccaccctttttattattattatcccccccccctgttgcaaaatcgacaaaaggggttagtgagcgccccgagatgtcttcaaaggtggtgttttgaaggcaaccccccccacgcaagtgagagtatctatcgaccccagaaagcaagttctcagctttggctcagaggtgaagattgggggggccgccctgcctggaaagtagacgcagaagagagaatggctcaagtgaaatgggctgaattaaagagagggaatgtgaaggaagagagagagagagagaatgagatttgagggagagtgagacacggccaagttgaaagtggagaaagaatcggcccccctaagagcgcatagacccggaaaaccgttcttgtgttgagc

SEQ ID NO: 746 - DNA, 1556 bp, Glycine max
  misc_feature (22)..(23): n is a, c, g, or t
  misc_feature (29)..(29): n is a, c, g, or t
  misc_feature (263)..(263): n is a, c, g, or t
  misc_feature (281)..(281): n is a, c, g, or t
  misc_feature (314)..(314): n is a, c, g, or t
  misc_feature (337)..(337): n is a, c, g, or t
  misc_feature (595)..(595): n is a, c, g, or t
  misc_feature (608)..(608): n is a, c, g, or t
  misc_feature (641)..(641): n is a, c, g, or t
  misc_feature (940)..(940): n is a, c, g, or t
  misc_feature (1233)..(1233): n is a, c, g, or t
  misc_feature (1323)..(1323): n is a, c, g, or t
  misc_feature (1358)..(1358): n is a, c, g, or t
  misc_feature (1386)..(1386): n is a, c, g, or t
  misc_feature (1434)..(1434): n is a, c, g, or t
  misc_feature (1482)..(1482): n is a, c, g, or t
  misc_feature (1500)..(1500): n is a, c, g, or t
  misc_feature (1556)..(1556): n is a, c, g, or t
  Probeset Number=SeqID_10525
gcgcccaaccccccccatcttnntgcttnacgttcggtgtcgatgatatataaatacgacatcgtcggcgccaggcgcgtccctatctcgggcttgcgcggcgtgtcctccctccatgtggccgatactcatacagacatactgtaatatagtgatgtctcctactctcgattcattggagagggcgccgcgatcgcgtgacgacatacgcatgctttcatctctcactataatatgtagttacataatgagttgacgaccancacgacgcatgtcgttgncgctgccacgcctctatcattcgacgtcgcccnacacggacacgactgtgcgatcncgacttgccataagtctgatctattactatatactctgtcacgctagcactcacactacacggctcgaccgatcgactactagcacacacaaattagcacaaatcgactaatgtgtcagacgctctgctcaggtgcacgcggtatgctgtatgtcatgagatagagatgctctactgtcctgtacatcttgcgcgccgttacgagtccacgtagtgtgtgtgtgagatacgaatatatcatctggcagtctgtcagtntgtctctctccgnccacatgatcacactcatagactctagatcgcncgttttttgctatgcatcgagcatatatgatcatgacaggcacgtcattatacgtcaggacagtgttaatcgtgtatcataccacgaccgtgcgcatcggcgctcatcgagcgaccgacgtgaggctgtattgtgtatgccgctcggtgtgtgtgcccgcgcgccgcgaacgcgcctctcatagtgcaccacatcgcaagtcgtattaatagctgatcgacatgatcagtgtactgacgagatgtcatcgacaagatcgctgcgtcctgatatgtagactgagcgacatgagatgacanttgagtctctctattattttctatatctatacgcttcgctcgaccgatcgtctctgacgtatcatactgcacacactagtgctgctactcatatgctgtgccatcatcacgttgtatgcgttatcactttctgtgctacacgcgcgacttcagtatatagtgtcaagtatcatatagaagatcacacacgtggctatgcatgccatatgataccgctgtctgtgcacagtgttcactatcactgctctacgcatacttgagcagcatcatctgaactagacgatcacgacgcnggcttgaggacgaccgatctaagactacgtggcgtcaaccgactagatcgtcacagtcctctacttctactcgactcaacgcactctctngtcgatctacgtgttcagacacacctacgcatgcngcactagtgtaacatgaactagaacatncgtatatgtgtacttctatggcatctgatctgctattagttagtatantcccgatcgtacatgaacgcgatcagcacgacctactaacacactacngctactatatgcgtcacngcagcgagtgctgctgtatctatcgcgtactcgatctcatcagtgcgtcctgattn

SEQ ID NO: 747 - DNA, 299 bp, Glycine max
  Peptide Sequence Number=SeqID_9005
  Probeset Number=SeqID_10526
ctatgtgatcccagcataggtgtctgcatcagattcagaatggagaatcgaggcgtggcaggtcaacggcatctaagtgctgctctccattggagtagccagtaggaattactccctctagtcaatcgagtaagcggctcagcttgcaacctttgtatggagcattttcctagaaggacagtcgagttctcgcccgtgtccgatgctgtagttggatggacatcatctatttgcgattaagccccggtgttgcgcgggtcttggaataaactggcacagagcactacttggggttacag

SEQ ID NO: 748 - DNA, 875 bp, Glycine max
  misc_feature (875)..(875): n is a, c, g, or t
  Peptide Sequence Number=SeqID_9006
  Probeset Number=SeqID_10527
ggttgacaatgaacatgggagttaaaaaattgcaggagaaggtgaagaaataaagtgcatctttgaagaaaattgaagaaagaaagagtcattgtgcgatttgttattggataatcatgtggaaacaaatggtgcattccaaggaaaggcaaaattgctctttgctcatgctggagacaaatgggatgctgagttttatgcaaaagtcaatgatgatgtctatgtaaatattggttagtttttctttgacttaaaccctgcattaagattgaacttacttaagaatgtttccatgaacttaaaccctacattttttaagaatgtaagcttcatggttaatgagttggatagaagaactaaaaaaaagaaataacttttttgtgctattctacaagcaccactttttatgcacacttttcatgctgaaagaaactctctgcctggaaactactctcatttgacatgcttaagccacaaatctaccaagttccagtatcctataaaagcgccaacaagaataagggccatatattaggagggaaaaaattgtataaatgaatactgtctcctaactcctaacccggaattgatccttgtatattctcatcttctaagaaggaaaagtaagcatcttcctttttatggttatatgataacattttattctgtgctttttccccctatttaataaaattccaaagaaattttttcccatttttagatgtatatatgtctcacgacttgttttttcctgcacagatgccttgggagctacacttgctactcatttggacaaacctcgtgtttacatgggatgcatgaaatcaggcgaagttttctctgagctgaaccataaatggtatgaaccagagtgn

SEQ ID NO: 749 - DNA, 346 bp, Glycine max
  misc_feature (1)..(2): n is a, c, g, or t
  Peptide Sequence Number=SeqID_9007
  Probeset Number=SeqID_10528
nncctttggcgctatgtttaatggcggcgacgtatcagctgcatctaatctttatcgaaatggtgttggctgtggtgcctgttaccaagtaagatgtagcaatagtgctttatgctcagacaacggcgtgactgtggttataactgactcaggctcaggtcataacactgatttcattcttaagcaacgagcctttggtagaatgggtctcaacactgacgctgctggatctctaatagctcttggggaacttgatatccaatatagacgtgtctcatgcaggtacccgaacaaaaacttaacagttaagatacctgagaaggagttcaacgctcgctatttgggc

SEQ ID NO: 750 - DNA, 1373 bp, Glycine max
  misc_feature (30)..(30): n is a, c, g, or t
  misc_feature (44)..(44): n is a, c, g, or t
  misc_feature (49)..(49): n is a, c, g, or t
  misc_feature (162)..(162): n is a, c, g, or t
  misc_feature (635)..(635): n is a, c, g, or t
  misc_feature (642)..(642): n is a, c, g, or t
  misc_feature (661)..(661): n is a, c, g, or t
  misc_feature (829)..(829): n is a, c, g, or t
  misc_feature (972)..(972): n is a, c, g, or t
  misc_feature (1040)..(1040): n is a, c, g, or t
  misc_feature (1111)..(1111): n is a, c, g, or t
  misc_feature (1152)..(1152): n is a, c, g, or t
  misc_feature (1235)..(1235): n is a, c, g, or t
  misc_feature (1239)..(1241): n is a, c, g, or t
  misc_feature (1243)..(1243): n is a, c, g, or t
  misc_feature (1247)..(1248): n is a, c, g, or t
  misc_feature (1306)..(1307): n is a, c, g, or t
  misc_feature (1311)..(1311): n is a, c, g, or t
  misc_feature (1314)..(1314): n is a, c, g, or t
  misc_feature (1316)..(1317): n is a, c, g, or t
  misc_feature (1319)..(1319): n is a, c, g, or t
  misc_feature (1354)..(1355): n is a, c, g, or t
  Peptide Sequence Number=SeqID_9008
  Probeset Number=SeqID_10529
cggataggaatatattgctatccaggaacngagtctaagatagntgagnagagcgcgccgaggatactgtcgaccgtaactctataagcaggacgctcgcctcaattgtgagaggtagtgtgtttacgactgtagaggtatgttgaataagatgtgagggcngctcgtgagggagtgtgagaagtgagaaatgtacgtaggtgagcgtgatgatgagagcattaagagctctgtgatggcgagagatccatggtatgggttacagagtgcgttcagtggtggtatagtcgaggcgggggacgcagaggtgagaagcattcatcagagaagttgatgtatacgagtctcatctacagactatgagcacagacatatatgggacttagatgagagaaggtctgcccgctagcgagcatgatgaagtgtatacagcttcgagctcggtgtggatctcatatcgctgtgcgcgagcgctcatcgtgtcacctcctacacggtgcagcgtattcgagaagatatcgccgataagaggttcctacccgaggtcgctgtagctcacacgcgcgcgattgccgggtgcaatcactggcatacgactcagctacggtgttgtaactcagcacaaacgggatatnctggtgnaggcaggtcggtactgttntgcgagcaagaatcgattacaccccaggccggggtcgagccgagagaggtcaggtgagaccagggtacgtttagatggaggagggagactatctttataacacttgccgcagtgcagtgtagcccatcatgttatactcatgagtgttgcgtactgatatatcacagntgtggttaggtcgccagatctgttgtgactatcagtagatgagtgatgagaggcatgatcacacggccactacaaaatatcgcagatagtgaagacgatgagaatgctgtggcggtacatgacacgatagcaggagggtgggntagtgaattagaatatgtgagtcaattacctgagacgtgagatgctgctgctcactgctttcacgtcnataagctaggtcttactaatcttacgtatcaagtgtttaggtataatctgagaattaagactgagagcatntattcatctgacctgtgcctctccctatgaatgtggccctngcgcaggttatctcttagtatgcttacctagggccggcgcgcgttgtccgagaagagtggtatgttatttgtaataggttttnaaannntnaaannaggggggggggggttatcaaatcaacttctggtgagcaaggtggtgtacagatgtgtnncaangangnngntattattatcgtggcggctggcgccgtcccctacnntataaaaaatatatataa

SEQ ID NO: 751 - DNA, 1567 bp, Glycine max
  misc_feature (1)..(1): n is a, c, g, or t
  misc_feature (8)..(8): n is a, c, g, or t
  misc_feature (338)..(338): n is a, c, g, or t
  misc_feature (421)..(421): n is a, c, g, or t
  misc_feature (437)..(437): n is a, c, g, or t
  misc_feature (948)..(948): n is a, c, g, or t
  misc_feature (1049)..(1049): n is a, c, g, or t
  Probeset Number=SeqID_10530
ntacagangaacagagggatgagaggatgcgcggtgatcgatgtgttgattgtcataaacgagactcgcagtaactgcgcgacgatctcagctcacacatcgctcgcagatactcgatgcactacagctcgtcctatgacaactcaaagtatgatgaactcacagccgcgcaatcatatataattgaccatcgtgcagagtgagatgtaaacaatatcacaatcactaagcgcgtgataagtgaacactgtcaagagaagatgcacagttgcatacacacactgcgattccagtatatacgatcagtccacgccgagtctcgtgagtgatacgtgtangccgccatgcggacaacaacagcgagcatacactgctcgctagtgagatatcataccatcgttatcttcacgttcagtacttntcaagcgtgttataanatacagcatgctgttcaagctagatcattcacatcactgatagtcgtgcgacgctaccgtattcgctacgagtagatgatgcgtagcggtcacattgccgcgtaagatcctagctgtaaccattagctgttgtccatcctctcacattctgagagtcctcactactgatgcacagtctccgctagctaccgcggcactacgcattctcccacaacacctctagctttatgcttactagcataggtaggcagcatagacgtagagcttgttccgtaccatagcggacacctgtcccgaaggcgcaggaagagcgcaacagatgaatatcgcgagcaaagtacgcaaccctccaacgtcgcgatatatgcgcgcttgtggttgccatttatacatcacgcatctatagtcgcgtcacctgcccgcagtcatcttcgcattatatcaacagaactggacgagtaccgcactacacgttcactgtcttctctcactaggagcataagacgccacngctcacacacctatactccgctctgcccgtgactccgtgcgcgtctcgaagtgtctgcatataaagttctacgtcgatgaacttttttaaacgatgtctgntaacgttcttcgagctcatatgtcgaataccgctttattcacgagtagcatagtacattaatctattctaacttcacgtacatgcagagatgcttcaccctgcgcgtcacacctgcgcctccacgctctcgatcgctcttctctccccataatcgctcgaccttaaacgcgatgcgtggagaatggtgtattgagatgagtcccgcgactttgatgtagaagattcgcacgtgagttgggtcctgctgtgatacatcagggtcatatatatatatacacgacttcgtcctctatggggcgaacaaactctatctctctccgacagtcagatattaaacaaaggtaatgggacgaggaaagcacatagagtagggcggaatttccttgcgccccgcgcggggatgtctccctagataaaaggagacggcccgcccacctaaaggaagagcctaccagatagtaggtgaataatatcactaggacgttgggttgacgcttctctccctatgcattactat

SEQ ID NO: 752 - DNA, 600 bp, Glycine max
  misc_feature (503)..(503): n is a, c, g, or t
  misc_feature (508)..(518): n is a, c, g, or t
  misc_feature (523)..(532): n is a, c, g, or t
  Peptide Sequence Number=SeqID_9009
  Probeset Number=SeqID_10531
ccgatgtgggtatatggatgggtagaaacagtgcggttagtctgtttgtgttagtcatgacagggatataggtcggcgtgggatcgaaatttagcgagtggagtaggcaacgtagatgagagtgcggtgttgtcagcattatttgccgtaggtgccacggggtttcagagaggcaaactatctaggagcttgttacgctcttctcgtacgataaggaaacgttttagtatccgtgtgggtcaatcaagtgtaggggcttgagtgcatgccgaggtggatgggtagtctgcactgagaaacgcatatttcgttgttctcgcgctaaagatgcgttcgggcgctaggtgtattttggtgctgctcggagaggagaaatgcgtgtgctaattttaagagattcggggggagattttaactggggtgatatatgtgtgccgcccctgcaaggagggggccctgatttttgtcaaccaagggcgtgttaaacagtttaagaaaggggntatgnnnnnnnnnnngtgannnnnnnnnnaaaaatatagatttcaaatgcagccccctgggggaggttttaatcctcatagccagtcaaggcaaaac

SEQ ID NO: 753 - DNA, 1928 bp, Glycine max
  misc_feature (1)..(1): n is a, c, g, or t
  misc_feature (21)..(21): n is a, c, g, or t
  misc_feature (38)..(38): n is a, c, g, or t
  misc_feature (42)..(42): n is a, c, g, or t
  misc_feature (49)..(49): n is a, c, g, or t
  misc_feature (92)..(92): n is a, c, g, or t
  misc_feature (98)..(98): n is a, c, g, or t
  misc_feature (100)..(100): n is a, c, g, or t
  misc_feature (105)..(105): n is a, c, g, or t
  misc_feature (124)..(124): n is a, c, g, or t
  misc_feature (128)..(128): n is a, c, g, or t
  misc_feature (160)..(160): n is a, c, g, or t
  misc_feature (204)..(204): n is a, c, g, or t
  misc_feature (225)..(225): n is a, c, g, or t
  misc_feature (265)..(265): n is a, c, g, or t
  misc_feature (267)..(267): n is a, c, g, or t
  misc_feature (281)..(281): n is a, c, g, or t
  misc_feature (316)..(316): n is a, c, g, or t
  misc_feature (338)..(338): n is a, c, g, or t
  misc_feature (346)..(346): n is a, c, g, or t
  misc_feature (355)..(355): n is a, c, g, or t
  misc_feature (360)..(360): n is a, c, g, or t
  misc_feature (370)..(370): n is a, c, g, or t
  misc_feature (406)..(406): n is a, c, g, or t
  misc_feature (408)..(408): n is a, c, g, or t
  misc_feature (414)..(414): n is a, c, g, or t
  misc_feature (434)..(434): n is a, c, g, or t
  misc_feature (440)..(440): n is a, c, g, or t
  misc_feature (442)..(442): n is a, c, g, or t
  misc_feature (461)..(461): n is a, c, g, or t
  misc_feature (488)..(488): n is a, c, g, or t
  misc_feature (511)..(511): n is a, c, g, or t
  misc_feature (523)..(523): n is a, c, g, or t
  misc_feature (554)..(554): n is a, c, g, or t
  misc_feature (567)..(567): n is a, c, g, or t
  misc_feature (571)..(571): n is a, c, g, or t
  misc_feature (581)..(581): n is a, c, g, or t
  misc_feature (668)..(668): n is a, c, g, or t
  misc_feature (699)..(699): n is a, c, g, or t
  misc_feature (751)..(751): n is a, c, g, or t
  misc_feature (793)..(793): n is a, c, g, or t
  misc_feature (802)..(802): n is a, c, g, or t
  misc_feature (832)..(832): n is a, c, g, or t
  misc_feature (846)..(846): n is a, c, g, or t
  misc_feature (875)..(875): n is a, c, g, or t
  misc_feature (932)..(932): n is a, c, g, or t
  misc_feature (941)..(941): n is a, c, g, or t
  misc_feature (971)..(971): n is a, c, g, or t
  misc_feature (1190)..(1190): n is a, c, g, or t
  misc_feature (1403)..(1403): n is a, c, g, or t
  misc_feature (1910)..(1913): n is a, c, g, or t
  misc_feature (1919)..(1919): n is a, c, g, or t
  Probeset Number=SeqID_10532
ngcgcagagatgctgcttctntcatttgatatatatgntcanatatgtntgcgcggcgtcgctgcatggcagatgctacacgtgcttcacantcgacnantccancatcgtctctacattgccncgtncgcagtagcgtcgacgaagaacgtcatcgctngtcgatgcgactgcacagtcatctatatgtctatacagttctcnattcgaagtcgaaagagcagngagtatgctatcgcgttgttggcgacgcgttggtcacgcngncgagtagtatatcnacatagtcatagcacgatgtgagtactcacgtcgncatagtatatgtagtagcaganatgtgtanagcagatgntcgtntatatcaccncggtcatggcatactgtagctggatcatgatacagntnaccacnttcacatatcgatcacatgntctcantnaccgcgttcatcgcacacntcgcacagcattatgcacatcacgcancactgtccgtcgtactgtgaatnagacgctgtcgntatcatatgatgtgcagattcgtgtagtttntctagatgacagntagnctcggcatgncgatgcttgagagatcatgtagcgctacgatctgtgtagacgcgccgtgcgacagagtcgttgtgcagcgcacggtcgtcgacatcnatatcacaccaaagaacgcacatcatcatantgcgggagatcgacgtagcgtgttacgatctctcatagtcgggcaactgtcnttcgcgtcgtctgtagatcatcatgtacatgtgcatagctgnatactatcncatgactatcagagagcacgtgcgtatagngtcggcgccttacncgatgtacgtgcgaaggggcaagtagaantctcgctcagcatgactctctcagtgatgacgcgtagtagagagtagagcgtgtagnattaccagnacggtggtctctcacgcgatgtatgtgctngcctgcgtgaagagatcgcatcgacttaagcgtcagacgcatattcgcatcacgcactcgatgtctcgtgcactcatgctgctcgagcatatgagagtagttctcgtacagtagctacgactaactcgtgtcgctcctcatacaggcagtcgactactctcggcggcgatagaacacgtaatcgatatgggcgcagcgccaatacatactcgcttccanatcgttacatactctctactacgagtgcactagaattctcatttcctatcttgcgcaggcgattgagtctctagggctgggtctgctgggagcgcgcggtgatcacggtcgcgccgtcgtacggccccgcggccggccgagatgtgcggcgcgatacgccctccttcctagtcgcttcgtggacattttcgagaatctacacattatatgtancatatcaacgaatagatgtgtgtatgatataggtatagatagtattaatgatgacatgactgcacgtctcatcgccttgacttgcgcctacgcccctagttaactagttatatgcgcccactcgcacctatcttaccgctacggccataccgtgacgtgtgatagagtatgttgaggcatactgtggtacgctcgctgctgtggtgtacttccgagcctactctccatcaagctagctcaccgcaccaattggatgcaaatatcatgagccctacctgtctctcatggcaaatataggaggtgtcttcatttctctgcctctcgagcctacaatagaataaaaaaagaaggaacagcctcctctcgctcggcgcggggggggggccttcttcttttcttgttatgcggggccgcgctccccccgcgggggggggcgcgcgcctattaggtaatgctccggccactcccaccagtcactgcgcgccaacgcgagcgcaaaccccgcgnnnntccccnaaccgcgca

SEQ ID NO: 754 - DNA, 885 bp, Glycine max
  misc_feature (1)..(62): n is a, c, g, or t
  misc_feature (587)..(587): n is a, c, g, or t
  misc_feature (622)..(622): n is a, c, g, or t
  misc_feature (633)..(633): n is a, c, g, or t
  misc_feature (650)..(650): n is a, c, g, or t
  misc_feature (697)..(885): n is a, c, g, or t
  Peptide Sequence Number=SeqID_9010
  Probeset Number=SeqID_10533
nnnnnnnnnnnnnnnnnnnnnnnnnnnnnnnnnnnnnnnnnnnnnnnnnnnnnnnnnnnnnngagcaaaaaaataaaaataaaaaaatggaaggaacaagcaataaggggttgttggaatgtggaaggaagtgcactccaccgccgtttttgttgaagacttatatgcttgtggaggatccggccaccgacgacgtcatttcgtggaatgccaaagggacggcgttcgtggtgtggcagccgccggagtttgctcgggatctcctcccaacactcttcaagcacagcaacttctctagctttgtacgccagctcaatacttatgtacgtggctttcgtaaagttgcaacaagcagatgggagtttttcaatgacaagttcaagaaaggtgaaagagaacttctacatgagattcggcgaaggaaagcttggagcagcaagcaacaacctaatgcaccaaaccaaggcacaccccaagactctgatgaggatcaaaggtcctcatcaacctcatcatctttggttcactactcttgtggatgaaacaacgactcaagaaggagatgggtgctgactctgagctacaanatgaaaagaagtgcaaggactgctgattggttgcncatttctcacntccaaggagagaaaagntaaaggcatgtgttggatgaaataaggtcaggaggagaaataaagannnnnnnnnnnnnnnnnnnnnnnnnnnnnnnnnnnnnnnnnnnnnnnnnnnnnnnnnnnnnnnnnnnnnnnnnnnnnnnnnnnnnnnnnnnnnnnnnnnnnnnnnnnnnnnnnnnnnnnnnnnnnnnnnnnnnnnnnnnnnnnnnnnnnnnnnnnnnnnnnnnnnnnnnnnnnnnnnnnnnnnnnnnnn

SEQ ID NO: 755 - DNA, 1815 bp, Glycine max
  misc_feature (1)..(2): n is a, c, g, or t
  misc_feature (10)..(10): n is a, c, g, or t
  misc_feature (30)..(30): n is a, c, g, or t
  misc_feature (32)..(33): n is a, c, g, or t
  misc_feature (68)..(68): n is a, c, g, or t
  misc_feature (122)..(122): n is a, c, g, or t
  misc_feature (137)..(137): n is a, c, g, or t
  misc_feature (186)..(186): n is a, c, g, or t
  misc_feature (233)..(233): n is a, c, g, or t
  misc_feature (235)..(235): n is a, c, g, or t
  misc_feature (239)..(239): n is a, c, g, or t
  misc_feature (254)..(254): n is a, c, g, or t
  misc_feature (259)..(259): n is a, c, g, or t
  misc_feature (320)..(320): n is a, c, g, or t
  misc_feature (322)..(322): n is a, c, g, or t
  misc_feature (326)..(326): n is a, c, g, or t
  misc_feature (368)..(368): n is a, c, g, or t
  misc_feature (373)..(373): n is a, c, g, or t
  misc_feature (375)..(375): n is a, c, g, or t
  misc_feature (379)..(379): n is a, c, g, or t
  misc_feature (385)..(385): n is a, c, g, or t
  misc_feature (398)..(398): n is a, c, g, or t
  misc_feature (484)..(484): n is a, c, g, or t
  misc_feature (486)..(486): n is a, c, g, or t
  misc_feature (526)..(526): n is a, c, g, or t
  misc_feature (530)..(530): n is a, c, g, or t
  misc_feature (532)..(532): n is a, c, g, or t
  misc_feature (582)..(582): n is a, c, g, or t
  misc_feature (653)..(653): n is a, c, g, or t
  misc_feature (716)..(716): n is a, c, g, or t
  misc_feature (838)..(838): n is a, c, g, or t
  misc_feature (861)..(861): n is a, c, g, or t
  misc_feature (905)..(905): n is a, c, g, or t
  misc_feature (924)..(924): n is a, c, g, or t
  misc_feature (931)..(931): n is a, c, g, or t
  misc_feature (1015)..(1015): n is a, c, g, or t
  misc_feature (1021)..(1021): n is a, c, g, or t
  misc_feature (1071)..(1071): n is a, c, g, or t
  misc_feature (1094)..(1094): n is a, c, g, or t
  misc_feature (1109)..(1109): n is a, c, g, or t
  misc_feature (1113)..(1113): n is a, c, g, or t
  misc_feature (1163)..(1163): n is a, c, g, or t
  misc_feature (1208)..(1208): n is a, c, g, or t
  misc_feature (1274)..(1274): n is a, c, g, or t
  misc_feature (1277)..(1277): n is a, c, g, or t
  misc_feature (1279)..(1279): n is a, c, g, or t
  misc_feature (1311)..(1311): n is a, c, g, or t
  misc_feature (1350)..(1350): n is a, c, g, or t
  misc_feature (1353)..(1353): n is a, c, g, or t
  misc_feature (1501)..(1501): n is a, c, g, or t
  misc_feature (1503)..(1503): n is a, c, g, or t
  misc_feature (1556)..(1556): n is a, c, g, or t
  misc_feature (1561)..(1561): n is a, c, g, or t
  misc_feature (1569)..(1569): n is a, c, g, or t
  misc_feature (1579)..(1579): n is a, c, g, or t
  misc_feature (1624)..(1624): n is a, c, g, or t
  misc_feature (1634)..(1634): n is a, c, g, or t
  misc_feature (1637)..(1637): n is a, c, g, or t
  misc_feature (1645)..(1645): n is a, c, g, or t
  misc_feature (1653)..(1653): n is a, c, g, or t
  misc_feature (1659)..(1659): n is a, c, g, or t
  misc_feature (1667)..(1667): n is a, c, g, or t
  misc_feature (1699)..(1699): n is a, c, g, or t
  misc_feature (1702)..(1702): n is a, c, g, or t
  misc_feature (1720)..(1720): n is a, c, g, or t
  misc_feature (1749)..(1749): n is a, c, g, or t
  misc_feature (1783)..(1783): n is a, c, g, or t
  misc_feature (1792)..(1792): n is a, c, g, or t
  misc_feature (1812)..(1812): n is a, c, g, or t
  misc_feature (1815)..(1815): n is a, c, g, or t
  Peptide Sequence Number=SeqID_9011
  Probeset Number=SeqID_10534
nnccactctntttctctcttttctccattntnncttcgcagtatatacactagaccacatagctatanacgcttaccgattcatactttctctgatatgacaggccgacacactcacctccngcgcggcgcgcgggngctgcgacacgactcctctctcgacctagctatagtgtaatgactagancacactcctgtcgctaggcttatgcgataagaacagactagtattcncntgtnttctcacgcctgcancatgntctctgcgtcgagtctccgtgcgtctgatcgttattatggtgcttcttactcttcgcatantncacntgacgatcactgagcacatctactctcgtcactcgatctctncatcncncttnttcctnctgctgctgcgcngcgtccttgtatgacatcgtttcgctggcgagtatttgcgagacagtatcatagctgtagcgttagcggatctatactatcagacntngcactatgtatctgatatcgctatgagctatgtattacangtantngtcgatcagatggctagcatagtacgtaagacaatagtgcctgcgtactntactcatatcttgtactacgtcgtactcgccgagtttatatgtatgtgatagtctgggcagacagcatccncagctgacgacgatatacatcactacagtactcacgctactgtgcaaccgcgtgtacacctcnttacatctcaccacgcccgacttagcgcgcgcatcgatatcacagtctgacatccctgcgctgtcgggcgtctcctactctctcatatatatcgctgctacgagaggaggtgcgcagcgacngcactacgcagatctagtctcanaccctacatgagtcctcgacacatagatgtgaacgtgtcagagnttaattatagtgatatagnagatcgnctgagcgatctacatgtatcctcgagactatgtctcacgctagtgtcatgatcccgcgggcttcgcgcccctccgtctcgtacntacttntatctactctcattcttactatagctgatgtgagatgaatgctaaatatngtatatctgcctacatgcgctgngtgcgttacgtacantctngtcctctgtgctattcttcacctgggactgatatatacgtcaatagcagngtcatatgtgttagtctgtctacgtcactcactagtcactgagcncactgtctcgtatagtcgcagcgtacgtcgtgaacagtgttgagatgcgtcgtctctgatagagtngantntggtgtaagttatgatgatgctagccacatgntatgcaatcgcacgtcgcaggcgctgtagttcgtcctcntanactcagaggtatttgtctacgtgatctcatcacgccgttgaggaaaggtatgtagagcgaccctacactccacacttctccgacgtactatgtcgacgtgtaatattgcttatgtgtagtatatagtactcagacagctatatatacnangttactgatttaattcggtcccgatcactgactgatgtgttcacgtatgatgntttgntacatcgncggatatgtncttgctttcgactcactatcgtgtatgcgacagctgcgatataantgatatctgnatnatcagctncgatatgnatcgcngtgtactncttagattactactgcgcgcagtaggctcgtnatnacgtccggcgtgtgtgcncgacgaccgacgcgcgtagtactcatcantcgactgctatactaaatactaccgtcgtctaancccgcgacngtgcgatgatcgacgttaantgn

SEQ ID NO: 756 - DNA, 599 bp, Glycine max
  misc_feature (114)..(116): n is a, c, g, or t
  Probeset Number=SeqID_10535
catagtgtgaggtatgagaataacatcatgcctttaattatatatccagtttattgcttcctattggctttctatttctctttcatgctaacatgaattactgaacactggttnnntaggcacttggtgttctagttgataggtttgtacagacggctgattcaatttccctacgctttctcttccttttcctatttgcctacagtttagtatcttcttggcatttgaagttttactttaattttatctatcttattgaagaaagttaacagaggactaattttacttcagttttatctatcttcttaaagaaaatgaaaggtaaaacttaagaattttatttttaattcatatctagtaagggcatccctggctccattcctttccagttttgatcgataatgaagcgtgttattgtattttgttgtgtttagccattcatgttatattctttaatttacctgtaaataacatttatgtagtctacgttgtaaataatctttatgcacaattttcggaaagctatttaaagagaaattatttatcaagatattcagtatatttgatgatgtattaaatagttttaaattttacgaaat

SEQ ID NO: 757 - DNA, 292 bp, Glycine max
  Peptide Sequence Number=SeqID_9012
  Probeset Number=SeqID_10536
ggctgagtacgaccgagcagtcaccgtatgctcccacgacggtcacctcttccaggtcgagtatgccctttaagccgtgccaaggtgcaacgccgatcgcggcgtccgcggcaccgacaacgtcagcctaggcgttgagaagaaatgcaccgtcaagctccaatactgctggtcggtgatgaagattgtgaatctggactaccacattgcgctggcatgcgcggagctgaaggccgacgcacgtctgctcattaacagggcacgggtggagtgccagagccacatgctcact

SEQ ID NO: 758 - DNA, 539 bp, Glycine max
  Peptide Sequence Number=SeqID_9013
  Probeset Number=SeqID_10537
ttttttttttttttttttgatttgttgttctttttcaagtccttcttgataaagtctttgtatagttttagcttctgatcgtacagattcatcgtcatcatcatcatcgatttgctcttctgtttccttggtctcttcactttcctttatcaaatcatgatttgctctgatcatctcccttctactcgatgtttcttccatctcttctgttgataccggtgtcacattatttagtgaagaccaaggagcttgatgttgcttcatgagatttttattttctatacgtcttggaaggtcatactggttaaggacagtggaaacagcgccgacacctcctttggcataggagtttttatacttgagagctgatttctggtcaagtgagctattcatatctcgctggtcgatattatacagattcacaatctttttagcactatttctatgtggattccctctttctaatgtctgatcaatctcataatgagcttgatgtccgtgaccaaacgcaagatcaatattatttgagaggatttttt

SEQ ID NO: 759 - DNA, 1606 bp, Glycine max
  misc_feature (75)..(75): n is a, c, g, or t
  misc_feature (99)..(99): n is a, c, g, or t
  misc_feature (117)..(117): n is a, c, g, or t
  misc_feature (226)..(226): n is a, c, g, or t
  misc_feature (231)..(231): n is a, c, g, or t
  misc_feature (512)..(512): n is a, c, g, or t
  misc_feature (674)..(674): n is a, c, g, or t
  misc_feature (722)..(722): n is a, c, g, or t
  misc_feature (782)..(782): n is a, c, g, or t
  misc_feature (1443)..(1443): n is a, c, g, or t
  misc_feature (1483)..(1484): n is a, c, g, or t
  misc_feature (1489)..(1492): n is a, c, g, or t
  misc_feature (1494)..(1494): n is a, c, g, or t
  misc_feature (1550)..(1550): n is a, c, g, or t
  misc_feature (1576)..(1577): n is a, c, g, or t
  misc_feature (1584)..(1584): n is a, c, g, or t
  misc_feature (1588)..(1590): n is a, c, g, or t
  misc_feature (1594)..(1594): n is a, c, g, or t
  Probeset Number=SeqID_10538
cagctcacaggttatacatgcacgagcacactcatctgagtcacgcatctacgtgtcagtatagctcacatagtnaaccgacagaccctccagagaccnactgctcagtataatttntcctaccctcttacgaacgttccataagagatcaagccacacatcactcatcgcactcacgaaccactcgctcatattaacaaatactaacaacgcttatcaatcatanatgtntatcatctatataacctacacattcaccgcaatatgtaatacgactgatgatcactcgcaccacaaactatcctcatacgacgtgagcgcccctacaatcatagcctgtctatacagccgcataacatctacatcgctctacatgtcacaggtcgtctaagactccccacagcgccgcactgactaacatcaacattaatgtttgcgtcctgcgtgggcgccgcttctaccacccaccacgcaacacaacacgaagcgcacgatggtggctccgatctacntcacacaccagacgcactgacccgtactcgacattgtctagtattacaccaattcctctatcaatacgctcttatgagtgacattggctacacactcacatacctcacctcaccactacacacaacacgtgtgtgtacccatccacactgtcatagagaganattgacaagtaatctccactcacctctgctatgataccatcgactcgntagtgatatgtatacatccacaatacctaatccaccaccacacaagcattctatttcacnccacaccatgcgcaacatctcgttaatcaattgtgtctatcctacattctgtgctttgacttcctctaaatctatgcgagtgtgcgggatcgtccgcgtcacagtgttttctcgattctataagagtgcgtggaagctaagactatatgcgataatagtatgacatataacagatgggactcctaatcacccaacaagcgttgggcgagaaacaggcgaggtcgcagctataattctctcctttcactagcacgacacaccagcgccatatacagcacccacccccacaaccgcaggtgcggtcctgccagcggtccacagccacagagggaacaaagccggagagaaatacacccctccacaccccgcgccggatgagtaagattaacacgttgttcgcgctttgtctactcaatttcctcctctttattttttatatatgttcacaattttatcgttattacgatcatgtatctaccttccccgtgaccgacaaaatcatatcgctcccatcagtatcaagtctcgactgagcacgggtgctcgtacacccaacacacctaccgactctagtacaagcactctctacaccttcgttccctctatcctctcatcactctcctcatgtgttcctctctctctagctgacacttactcaaanggtagtttaagagggccacgtagagttggttagcaacaanngaaannnnanagcgatacatcagtcgctcctcatccttattcctcccgccgccatacattatcgtngtctatttacttccttttatgggagnngaaaagnaaannngacngccccccccccc

SEQ ID NO: 760 - DNA, 1983 bp, Glycine max
  misc_feature (60)..(60): n is a, c, g, or t
  misc_feature (75)..(76): n is a, c, g, or t
  misc_feature (166)..(166): n is a, c, g, or t
  misc_feature (356)..(356): n is a, c, g, or t
  misc_feature (814)..(814): n is a, c, g, or t
  misc_feature (890)..(890): n is a, c, g, or t
  misc_feature (945)..(945): n is a, c, g, or t
  misc_feature (979)..(979): n is a, c, g, or t
  misc_feature (1111)..(1111): n is a, c, g, or t
  misc_feature (1217)..(1217): n is a, c, g, or t
  misc_feature (1222)..(1222): n is a, c, g, or t
  misc_feature (1229)..(1229): n is a, c, g, or t
  misc_feature (1259)..(1259): n is a, c, g, or t
  misc_feature (1271)..(1271): n is a, c, g, or t
  misc_feature (1273)..(1273): n is a, c, g, or t
  misc_feature (1320)..(1320): n is a, c, g, or t
  misc_feature (1323)..(1324): n is a, c, g, or t
  misc_feature (1365)..(1365): n is a, c, g, or t
  misc_feature (1418)..(1418): n is a, c, g, or t
  misc_feature (1446)..(1446): n is a, c, g, or t
  misc_feature (1472)..(1473): n is a, c, g, or t
  misc_feature (1524)..(1524): n is a, c, g, or t
  misc_feature (1553)..(1553): n is a, c, g, or t
  misc_feature (1567)..(1567): n is a, c, g, or t
  misc_feature (1578)..(1578): n is a, c, g, or t
  misc_feature (1615)..(1615): n is a, c, g, or t
  misc_feature (1624)..(1624): n is a, c, g, or t
  misc_feature (1627)..(1627): n is a, c, g, or t
  misc_feature (1650)..(1650): n is a, c, g, or t
  misc_feature (1680)..(1680): n is a, c, g, or t
  misc_feature (1722)..(1722): n is a, c, g, or t
  misc_feature (1727)..(1727): n is a, c, g, or t
  misc_feature (1737)..(1737): n is a, c, g, or t
  misc_feature (1749)..(1749): n is a, c, g, or t
  misc_feature (1785)..(1785): n is a, c, g, or t
  misc_feature (1789)..(1789): n is a, c, g, or t
  misc_feature (1810)..(1810): n is a, c, g, or t
  misc_feature (1825)..(1825): n is a, c, g, or t
  misc_feature (1831)..(1832): n is a, c, g, or t
  misc_feature (1848)..(1848): n is a, c, g, or t
  misc_feature (1869)..(1869): n is a, c, g, or t
  misc_feature (1895)..(1895): n is a, c, g, or t
  misc_feature (1897)..(1897): n is a, c, g, or t
  misc_feature (1903)..(1904): n is a, c, g, or t
  misc_feature (1906)..(1906): n is a, c, g, or t
  misc_feature (1916)..(1916): n is a, c, g, or t
  misc_feature (1928)..(1928): n is a, c, g, or t
  misc_feature (1946)..(1946): n is a, c, g, or t
  misc_feature (1949)..(1949): n is a, c, g, or t
  misc_feature (1975)..(1975): n is a, c, g, or t
  Peptide Sequence Number=SeqID_9014
  Probeset Number=SeqID_10539
gggtgtgggatgcgtggactctgtcgcacctctgttagtatcttcactaccaacaacatncctccgtaatgaatnncggcgtataatttgactctacgcgcggggaagctcacaatacaataatacaacgcttctgtacactgagcggctgatggaaggagagggntggtgggtgtatatttcatcccgtctaatataaccaccactttgtgacgctgattccttgctaatacatcactacatctctcgtaatgcagagccgatacaacatagatgcgcgcgcgtatatatctcttatataatagagtgacgctcgcgcgcgatgagccgggatggaataacgaggttgtgcgctnacgcgaataagaatagtagttgtaatatatacatcgaaacaagacgctagatacgcgaacataataatacaaccctcatcgactgccgatagtagcccatatcctcgcgtcactgatccgggtgtggacgagcatgtaatagtatatgcgcggcggtaagtatattgcgcaacagcgaagggtggcgatgcgtgcgaccgcgcctgatatatatttacgctatactatacgtcaccacgtctttgcatatgggtgtgaggatgatatcgcgcatgtctctcatatatcgccacacatacaccgccataggttgacgataccccattggcggcgttgcattaatgtaaccacttctgtatttatatatagcgcgccgcgcaatattagcatatcgtgtgtgacctaagactcgcggacaatccagctgcgtgcaacgcatatacacgatatcatcgtgngtgcgcgttggtgatagagtatattatactaatattccccttgcgtctcgcctgtgcgacgtatgagtaccgtatnttcatgttgttgagcacatgtgccacgtcatcgtggacggcgcgagccgcatacntacgcaagaacggatacgacgcgcactatgtgtntactccgcctatggatatagaggagacagcgcattgatataccacatgcatacgacgcgacgcacaatatagccgcgccgccgcgttatcgtgccgatgcgcgtgctgtctcggtgagtgcgatttataatnatacctcgcgattagctgcggtatgaccgtcatacacgctacatgatatcatatcgcactatatgctgcatgtcgtaatgttgattgtgtccgtgcgcggcgcgcntgaancggacgncgatctccccgtgcggccgcctaacgatgnctcaataatcanancagcatagacgacttatgaaccgctggtgtggttgtctatgtgtgcncgnnccatacgaatagagcacgctatcaatgaagataggtcacgntgtgctgggtatgtatagataatatcactactatataataatacattcctctngtataccttgtatgacgtagcgacaccnctattataatgtatgcgttagtcgtnngcgccgtgcgcgccgcattagtgactagagagctagccctcgtgtacacgnagcgtagttccagacacacatataattgngcgccgccagcgtnaacagcggagncgtagtgatgccgagtgatagagacagagcacgtgtntaataaaantantgcgcgctcgcaggtatatagcngcacgagcgcgaagcgctaataatcatganttatagcagactacaggcgcccgcatgcagctcgcagcaagncaganctaacaactngcagcgtcaagntgtgattaagagaatgacgatcactcatgccggtgnaagnagagataacgcaggagtattngttacgtctagtaangagtgnngtggatcagcagagtntgcgctctagcagttgcagcnattgatcgcggcgtcagcgctgagtngntagacnntnagtggcaagngctgcgtcaggnctcagacatgagtagtangancatatgcacgtcgtagagctaatatnctacttag

SEQ ID NO: 761 - DNA, 775 bp, Glycine max
  misc_feature (1)..(57): n is a, c, g, or t
  misc_feature (658)..(775): n is a, c, g, or t
  Probeset Number=SeqID_10540
nnnnnnnnnnnnnnnnnnnnnnnnnnnnnnnnnnnnnnnnnnnnnnnnnnnnnnnnncctctttctctctctattggaatatatctctagagacgaaaagcaaaagttgttattgttacccataaacatcttggtttctttctgcttcatctacttgtccacttttcccccataccctctaaattcctctctcactctttaaaccccacccttcatgcactccaacaccaacacacaacaacaataacaaccatccctctcccctctctcactcaaacaaaaacatccttgggcacgagcttaagccctccaaaaactctctctctctctctaaacccttttaagcatgtccgtacactcaaaactgaagcaccaccccatgaaccttgcaaccccaagttcccattttgacaacgacccaccatgcaaaaccaagaccaaaacccaaaggaggctccttcggatcatagtcaccgaccatgacgccaccgattcagactccgacgaagaagaagaagaacaacaacaaacagcaagagtgaagagagaaatcacccaaatcaacatgcaacttcctctctcatacaatagatcctttccctcttcatcttcttattactcttcggcttcagcttgcacttcatcggaacaaaacctnnnnnnnnnnnnnnnnnnnnnnnnnnnnnnnnnnnnnnnnnnnnnnnnnnnnnnnnnnnnnnnnnnnnnnnnnnnnnnnnnnnnnnnnnnnnnnnnnnnnnnnnnnnnnnnnnnnnnn

SEQ ID NO: 762 - DNA, 493 bp, Glycine max
  misc_feature (353)..(354): n is a, c, g, or t
  Peptide Sequence Number=SeqID_9015
  Probeset Number=SeqID_10541
gcctttttgaaaaaaaaggggggggcctctctttgggggcccttttttaaaccccaccattttgtatccccccccccttttttaaaaaaaccccttccccgtgcccaactgggttttgtggtttcaaaggaccaagggggcccgcgtttccacctaccccggttgccaccaaactcgggtttcaacgaagttcggtttcaagctacatcccctttccgatcagttttccctgtgccttacgttctcaggcactttcaggcaatgattccatgtgatcgcaacataggactgtcatctggaacgtttaaatctgtcagatgatctcatctccagttctttggactcgggggaannccacctcaagatggctagccgtcatggatgctccctcagccttggagcgcttcagtggcaaaacttcctcctcacatccagcacagcacatagctcttttgagtgtctccattttgttgagcgatccatcgatatcatg

SEQ ID NO: 763 - DNA, 199 bp, Glycine max
  Probeset Number=SeqID_10542
aaaaaacctctgtatcctgttacttcttcctctcctcaatttgtcaaaaaattctactttactaactttttcttatgatgtctacaggcaagcttgagggagaactctcctgttattagggctaaggctttaaaagcagttagtatcattgtagaggcagatccagaggtattgggtgataagcgagtacaatcagggg

SEQ ID NO: 764 - DNA, 496 bp, Glycine max
  Peptide Sequence Number=SeqID_9016
  Probeset Number=SeqID_10543
acccgagccgacgaacgaacgaacgaacgaacgaactcaaagcttttgcagagagatcttcgtttgatcaccggcgcaatcgcaacaatggcggagaaggcagtcacgatccgaacccgtaaattcatgaccaacagacttctctcaaggaagcagttcgttattgatgttcttcaccctggaagagccaatgtttcaaaggctgagctgaaggagaagctagcaaggatgtacgaggtcaaggacccaaacgccatctttgttttcaaattcagaacccattttggaggtggtaaatcttcagggtttggtttgatctacgacaatgtcgagagcgctaagaagttcgaacccaagtacagacttatcaggaatggtcttgacaccaagatcgagaaatcgaggaaacaaattaaggaaaggaagaaccgcgccaagaagatccgtggtgtttagaagaccaaggctagtgatccccagttcttgttccttatct

SEQ ID NO: 765 - DNA, 1615 bp, Glycine max
  misc_feature (13)..(13): n is a, c, g, or t
  misc_feature (16)..(17): n is a, c, g, or t
  misc_feature (21)..(22): n is a, c, g, or t
  misc_feature (25)..(25): n is a, c, g, or t
  misc_feature (27)..(27): n is a, c, g, or t
  misc_feature (39)..(39): n is a, c, g, or t
  misc_feature (60)..(61): n is a, c, g, or t
  misc_feature (69)..(69): n is a, c, g, or t
  misc_feature (81)..(81): n is a, c, g, or t
  misc_feature (135)..(135): n is a, c, g, or t
  misc_feature (280)..(280): n is a, c, g, or t
  misc_feature (394)..(394): n is a, c, g, or t
  misc_feature (413)..(413): n is a, c, g, or t
  misc_feature (417)..(417): n is a, c, g, or t
  misc_feature (453)..(453): n is a, c, g, or t
  misc_feature (604)..(604): n is a, c, g, or t
  misc_feature (625)..(625): n is a, c, g, or t
  misc_feature (724)..(725): n is a, c, g, or t
  misc_feature (784)..(784): n is a, c, g, or t
  misc_feature (835)..(835): n is a, c, g, or t
  misc_feature (838)..(840): n is a, c, g, or t
  misc_feature (864)..(864): n is a, c, g, or t
  misc_feature (975)..(975): n is a, c, g, or t
  misc_feature (992)..(992): n is a, c, g, or t
  misc_feature (1043)..(1043): n is a, c, g, or t
  misc_feature (1057)..(1057): n is a, c, g, or t
  misc_feature (1073)..(1073): n is a, c, g, or t
  misc_feature (1118)..(1118): n is a, c, g, or t
  misc_feature (1169)..(1169): n is a, c, g, or t
  misc_feature (1174)..(1174): n is a, c, g, or t
  misc_feature (1409)..(1409): n is a, c, g, or t
  misc_feature (1451)..(1451): n is a, c, g, or t
  misc_feature (1512)..(1512): n is a, c, g, or t
  misc_feature (1537)..(1537): n is a, c, g, or t
  misc_feature (1549)..(1549): n is a, c, g, or t
  misc_feature (1574)..(1574): n is a, c, g, or t
  misc_feature (1594)..(1594): n is a, c, g, or t
  misc_feature (1615)..(1615): n is a, c, g, or t
  Peptide Sequence Number=SeqID_9017
  Probeset Number=SeqID_10544
ggtttacggacgngtnnttcnnttntntgttctctgctngttcttctctcttttctccgnnccgtgtgnggtggtatgatnaggtagcatcgctcctccggctgtgtcgggtcgggctgcataccaacataatangagaggaacacacccgcgcgtggccagagcagaggacgtgacaattattgatattatctcttttcttccttagccacttctactgtcttcttgtgcgaggcggtggagtctccttcatttcttaatctcatgtcgccacacggcnctaactttgatacatgagtgtatagtggtataggttgcggacgctccttctctgcctacacagcatcgataaccgctcctctcctgccacagctctctctcatcatcttcatcntattggctcagcaactctntctntatcaatatacgtatagtaatgtataacaactcttnattcctccctctgtgctctcactacccgtcatcaccatcttcttccctcatctcagcgcctagctccctctcgcgccgtccgtacctcgctccactcctgctctctccctcgcgctctgtcagcgtcttgctccacctcatcctactatcntaccgtgcaacgctacagcantcacactgcatgaggtaggctgccctctctatatatatatatgtgacctattatctgagcgagatgctcatcacagagctcaggaacatctcgcgaggnngctgcgagttgatataatatagtataagatacatattatataccacaggatgaatgaangagtatataaaataataataacgaacatatacataaggtatatatacaaanaannnaaacaacaacatgcgacgtgatcnaaactctctaacactctgtcactcgtgagtgcgagcggtcgtctgctgacagtctcaccacccacactcgcacctccacactctcccacgccatactgacggatagaaacnactcatctcactaatgntctatgaacgctctctctgctcactatcgtcaagctcagacactctatcanactctcactctctnctactctcattctctnactactttcactctgccagcggctgtgttctctactagcacctancagatcgctcctctactctcggtactgcgcagaccatctgtcatacatgtncacangctgagcggactctcctctgccgctctgtcgtcaccgcgtccctagcggacactatacgactctctagcttcattatctcgctcacactcactcacgccacttcataactctctcatctctacgtacatctgcacctcgatcacacacggcacgtacgctcgctacgcactcccagtgcactatctactctccacgaatactcattctcacgatagtcacgctgatcttcactcngctgatctacgtacagctcctcgtcactctgtgacacgtgcntgtatggtatgcaggtgcaatataaactgagatgcagtatagacacgatacatccgcggcntctctacacatatagtagagagacnagcacatcgtgngtctcgtgctctactcgctgcgtangtgtctatcatcgcgtgaanacacactatcacaccacgagn

SEQ ID NO: 766 - DNA, 1528 bp, Glycine max
  misc_feature (22)..(22): n is a, c, g, or t
  misc_feature (26)..(26): n is a, c, g, or t
  misc_feature (62)..(62): n is a, c, g, or t
  misc_feature (442)..(442): n is a, c, g, or t
  misc_feature (980)..(980): n is a, c, g, or t
  misc_feature (1008)..(1008): n is a, c, g, or t
  misc_feature (1414)..(1414): n is a, c, g, or t
  misc_feature (1520)..(1520): n is a, c, g, or t
  Probeset Number=SeqID_10545
agaactcccctttccacctctncacntttattctatctttattctctaccaccccccacacntccctctatttgataatactgttgatgccgcctcccccgcggtcggccgtatgttagtgcaccctcccgtcccccctcataaatattatatatatgttctctgtgcgtacataggctgtcacgctagtccaacaaatatgcccgctccgcatcctcatgtatccattgttctgtgttgctacggttagatcaggtactgacttcgttacaagctcgccactataatcatgatcgatatctgtgctacgctattcgcaggagtagtatatgaatcaagtgagatctcacatgccaccaattagcgccatgtctgatcatatggacagagttcactcggcctcagcctagactcgttgtgttcctatagctcgctaccgcangacaaagccctcgtcacgccctctgcactagaagccagtgcaatcaggcacgagctttatacttgtacacaatcgtatcggactgtccatctcatatcgtccctagatataactacgtgttattggatttctctacgaatgacttccctcgcaggccgtaatgggtacacaatcatccaccccctccttgctactcctataattgaatcactatacatacgcatatttctgaaacccggtcatataactctagtccaactatatatctcttagacctaatatcacctagtcattcgcctcgctatatatctgatccctccccactggtttagaaatgtgcgttcctctcaaccgtcaccatcacacagtcctcatcccgcttatccaccttagcttactacatacaacacacccggacatgcgcgcaaagatccttccatagaaatacagaagaatacatgtggactccatacgagtaggctgtcaatggatcgcctatatactcctatatccgtccgtcacactgctcgatataacnttcctaataaaagcgtctgacactaatntcattctctgctcagcggtctacggcatcgctctactacactcctggagtgcgactacacgcgctcttgacacagcccacgcaaacactacggcctcttccctgcgcacatactagtcacacctataacacgctgatagcctctcgcccgcacaccaataacatatcttaccaatccgggcgacgccggcgcaatgatgtgctcataatccatctttctacgtgctggagatcgatcatacacagactcacctctctggtctctcactatcaccaccttcttgtatcaacacatacccacatccagagtacaactacccgcgcgcactctgcgcactacggacacgacactgcgcacacatactcatacattccacgacactacacggcggtcgtctctgtgcgtnccataatccatcgcacttcgctgtcacttcttaattcaccgtcagtgaagctctcaaggcaccatggcgcaatctatattaccactccatcccctcgctctatatnactacgcg

SEQ ID NO: 767 - DNA, 672 bp, Glycine max
  misc_feature (672)..(672): n is a, c, g, or t
  Peptide Sequence Number=SeqID_9018
  Probeset Number=SeqID_10546
attatattcacaatacacaaatggcaggagagacaaaatatgctactcaatgcaaaagaaatactactcaaggaaattccctatcaatatctcaaccaattaaacatgatttgtcattgtgaaaagtgtatggaagatgtattagcaatttcactgaatcaagtgaaaccacaatatataacagatatcgataaaatatcttacagtaaatctgagatggtggataaacagaagaatactgctatgctggtcattctgacagaagcagcttccaaagtctccgcatttccaagatgtgaaaatcgcctgctgctgaacaaggaaaccaattgatttgcccgatttgcgatggacattttgtgcatgcttttacatggaaatcattacttctattaaatgatgagcgtctttgtgtagcatgtaagaatcaattagtaaagattgagcgtcctatttgtccaacctgcggaagagcgcagtcaaatgatcaaatgtgccaagactgtgatagatggaatgaacgcattgattctactaaagtccttataaaaaataggtcagtttatatctacaacgagttgatgaaagatgtctttgcccgctttaaatttcggggtgatacggctttagttgagctgtttaaacgagatgtacctcggccgcgaccacgcn

SEQ ID NO: 768 - DNA, 1361 bp, Glycine max
  misc_feature (5)..(9): n is a, c, g, or t
  misc_feature (16)..(45): n is a, c, g, or t
  misc_feature (51)..(51): n is a, c, g, or t
  misc_feature (57)..(60): n is a, c, g, or t
  misc_feature (62)..(67): n is a, c, g, or t
  misc_feature (70)..(72): n is a, c, g, or t
  misc_feature (74)..(80): n is a, c, g, or t
  misc_feature (90)..(93): n is a, c, g, or t
  misc_feature (123)..(124): n is a, c, g, or t
  misc_feature (137)..(138): n is a, c, g, or t
  misc_feature (151)..(154): n is a, c, g, or t
  misc_feature (186)..(186): n is a, c, g, or t
  misc_feature (223)..(225): n is a, c, g, or t
  misc_feature (386)..(386): n is a, c, g, or t
  misc_feature (396)..(396): n is a, c, g, or t
  misc_feature (1030)..(1030): n is a, c, g, or t
  Peptide Sequence Number=SeqID_9019
  Probeset Number=SeqID_10547
ggggnnnnnccccccnnnnnnnnnnnnnnnnnnnnnnnnnnnnnnccgggngccgcnnnncnnnnnngcnnngnnnnnnnggggtcccgnnnnccgtccgccaagcgcaccggacgtggcgtnngggtgttataagnngtgggggggtttnnnncttttttttttctctccccaccctcttcttcnttttcctggctcctcctttgctgtttgttactatctnnnctactactttctgataccgccgtcgacagagcgctctaaactcacgcattatcctacgtgacaatccggtgccacatagagcttttctggcccaccgagagatttgtctaatcacacattatagtttcaacacgcgagatacaaaaatagataaaaggggntccggttttngtgcgcttctccccgggcgggctccgcctttgcctctcacctcccctcttcgtgttattctataatcccatatgcgtttatttctgtctttctttctttcttttcctcgttctctcttttcttatgtttctcttctttctttcttagtctttcgcttttgtttatttccacgcccttatcatgtagcgtacactcgctcttaatcttggggcttgtaagcgggccattccagacgtacaaaatgtatttgaattatatgggagtaaggaagagggtagaagtatttttcttgttatttaagtcaccgcgttcaatgccatatgaataagtataacgaatcagcaatacttagggtaggcttctctgccatcatcctcgactggatgttgtcgtaatctgccctaatataatgataaagtgtgtataactatcggtcgggctaaatataaacatcggtccaggcacttgaacgtttctaatatctatacggtcagagcgaggcgatctgtgcgctcgtgatctcacggcctcttattctaatcgcgcaatctaattcaacacaccgccgagagcgacaacgagcaagacgtgtggggacagccgaacgagtgaaagaaagaaggaaaatgataanaaaacagtctagttctacattatttagtattaacatactccactctcacctgctagtcacttctacacaacgtagactagctgccaccaaaataacaagcacaacacaaactgctaataaaaaaaccgacgcccttcttcgtccgcctcatacgtctgctctctgtcctcttgctcgtagcgcaatgagtactatggatggcacgcttcctcgtgactccgcggtctgtcgcgcttgtgacgtctgctacgcccactcctcacccgtcgtcgcgagcgcactaggtagtcacgtactcgcgactaacgcactatcactcctattacaccta

SEQ ID NO: 769 - DNA, 3102 bp, Glycine max
  misc_feature (3102)..(3102): n is a, c, g, or t
  Peptide Sequence Number=SeqID_9020
  Probeset Number=SeqID_10548
cgcttgcgaaatatccccaacgaaattttaatctcatcgcgattccgcaaaagaaaagaaaagagtgtgtggtgtcggggatgaacatacattgaggcaaaagtgtttcttttcttttcttttcttttctgcgcagttattattattttaggactgcaactgcatgagttggacaaaaccgagcaagattggtagcttgaagttctacaagcttcagcaactatggctattgctacggccaccctctctctccatttcgccaaaattcccattcgtcaaacgcattcatcttctccaatacgccatcgcatcccttctggtcgacggttgaatctctattaccctcgcacttcccacagatttgcgtgttttggttccaagtgttcactgacagacactgatgtgcatttggttcatgttaccacggatgaggatgaggctcagggaagaggggtggttgagcctcactgcccggtgccatttgttaaactcaatactgatattctcgagactgagtctttgaacttgctcgcagaagccacatttgtagatactctcttgactgcattgcctgttttgtccgaggaggagcagcacgccctatctgctactccggctcacccggctggtttacacgctttttatgctagttgcttaactgcaaatgtagtggagcagctttggaattttgcttggccttctgccattgccttgattcatccaagccttttgccagttgctgtaatgagtttcttcaccaaagtggctataattgttggcggtcccttggttggcaaacttatggaccattttccaagagtgtctgcatataattgcttaaccattgttcaggcagcagctcagttgctatctgcagcgatgattattcgtgcccattctgtccaacctacttcattttctacactgcttctgcgtccctggtttgtcatattggtttcagctggggctattgagaggctttgtggagtagctttgggggttgcaaatgagcgtgattgggttgtgctgctggcaggagtgaataggcctattgcattagcacaggcaaatgctgttctaaatcgaattgatctcctgtgtgagatagccggggcgatgctgtttggattccttctttctaaatttcatcctgtaatctgcttaaaagttgcttctgggttaatgatggggcttctgcctgttacaattgttttcaattatttaaccaacaagctttccaccggtgttcttgaccgacctaaaccttcacaaacctgttgcagaacatttaatgaagattctgcattagatgccagcagtatagtgtttaaaggtctggaagccatcaagctcggctggaaggagtatctgggtcagcctgttctccctgctagtcttgcatgggtgctcctctgctttaacattgttctcacgccaggcagtttgctgacagcatttttaacacagcgtggcttacatccgtcaatcataggaggattcagtggaatgtgtgctttaatgggtgttgctgcaacatttgtgtcttcaaggctcgtcaagcaatttggcattttaaaggctggggcagttgggttggtatttcaagcgttacttctcagcatggctgttgctgtatattggagtggaacaatttctcatcagagccctcttcttactttcctatttctgattattctgtcacggttaggacacatgtcatatgatgttgtaggggctcagattctccagacaggaatcccatcatccaaagcaaatctcattgggacgacagagattgctgttgctagtttggcggagtctataatgctgggtgttgcaataattgcaaacgatccttctcattttggatgtttagcactgttgtctcttctatcagtagttggtgctgcctggatgttctgtagatggctgttgaatccaacagatgcacaaaaaaaccttttttcttatgatcctcagttttgatatttatttgttcattaattgccttagtgcaaactgcaaaggcagttcgatgtaaacaagaatcaaaatatagcatggtgggtgattatccacttaatacaggagcttggggcgttttcttctcacctggccaatgatattcattgtgtggacaaaatagatggctttacctgtaattctgtaaatgtgtagcatgccatcatatttatattattagtgtacatgacaaataattagctagttgcctacgtccaacacgtacaaacgttttgtaaagcattttattcattgttaaaattctttcccgggatttaaaatatcagcagatttgttccggtgattgtgataggaggatcaatgattcttagtaaaatattaatttgaaatattttaattgaaaaaaaaaaaaaaaaaagcttatcgataccgtcgacctctttttttgtggcccggtaccccatttcgccccatagtgaggtttttttacgcgccctccactgggggggggggtgccaaccttccccggctggggaaaaccccctggccgctacccccaccttaattcgccgttgcaggcacattcccccctttcctcccagcctggcgcgttatcagcggaagggaggcccgcccgcccgcaaccgatccctccccaaaaaaatatagccgccgcctctggaagggggcggaactggaaccacgttaccaccccggcccccataggcgttccgttcgcaaattttcaccctgctgaaactttctctctggctaccacctacacggttccccttccgttcctttcttcaacaagcggacgcccgaagaatttgtgccgaaacaccgccccctttgtgttactccccgccgcgggccgggcccctgccccccaccgcacgcctaagagcgcaatacgccccctcgggcgtcccggggctgccgagtgttgccccgcctccactacaatctccttcctactctccttctctcttcccgtccgggctatgcggcgcgcccccctctctaccgtctgccctccgccttttcttcgttagacggtagcgacgagtgtatcagactccgattcgcacgccccgcaacaggtcccgtcccaacccn

SEQ ID NO: 770 - DNA, 423 bp, Glycine max
  misc_feature (370)..(370): n is a, c, g, or t
  Peptide Sequence Number=SeqID_9021
  Probeset Number=SeqID_10549
aagaagaagcaatgccactgacactggttcaagcagcttcagtgtcctacttgagatcccactcaacggttcctactctcttcaagccttcctctggtttacttcttaaaaagtcaatctttcctgattccaagttaacaactttccaacggatctttcgttccacgaagaaagcctcaaatgggtctgctcgtgcttccttgctcgagacccctgtcttgtgggctggtcgagtttgtgtcttttacgcgcttgtcaaagctggtttagctggatccaagtctaaccccatcgtttctgggttggaaagtggtggtgtttatgttgaagatgatggtgcggatcttggtttctctaagtggattcagancatcaagggcaaaccagactaggatgcagcagataagaggaagctggtgagca

SEQ ID NO: 771 - DNA, 1090 bp, Glycine max
  misc_feature (1)..(142): n is a, c, g, or t
  misc_feature (195)..(196): n is a, c, g, or t
  misc_feature (661)..(662): n is a, c, g, or t
  misc_feature (716)..(717): n is a, c, g, or t
  misc_feature (1007)..(1008): n is a, c, g, or t
  misc_feature (1010)..(1012): n is a, c, g, or t
  misc_feature (1090)..(1090): n is a, c, g, or t
  Peptide Sequence Number=SeqID_9030
  Probeset Number=SeqID_10550
nnnnnnnnnnnnnnnnnnnnnnnnnnnnnnnnnnnnnnnnnnnnnnnnnnnnnnnnnnnnnnnnnnnnnnnnnnnnnnnnnnnnnnnnnnnnnnnnnnnnnnnnnnnnnnnnnnnnnnnnnnnnnnnnnnnnnnnnnnnnnncgcaaaccccaacaggggaacctctgctcgtggatacccgaggtcattgacannacattaaatcagccccgtggagaaaagcattgtccagggaagttgtcttcctgcgcagatattccttgccatttagctgccagagaaactctgttcagaatccttggaggggccctagttggaaatggttaaagttgggaagaagagacgcctagaaactgctaacccaatctgcttgctaacaatggcaattcctccacccacttcaaaaccttaaccaactcatctcaagattcaccgctcttggactttccacccaaagacttggtccgctttggcccgtggtcacaccaattgaacaagccaggtgcaccaaacttaggagcccgcatctaccacgagaagcaccattagacaccgcatttgccagggacagggcaaccaagagctgcccaagaaccattcagggtcaggggaccaataatcttgccccccttgatcttcaaactccaaccgaattcgacnnctactacttcaagaatcttgttcaaaagaagggtctcctccactctgatcagcnnctgttcaatggtgggtccaccgactccattgtgcgtggctacagcaccaacccgagctccttctcctctgacttcgccgccgccatgatcaagatgggagacattagtcctctcactggctccaacggagaaatcaggaagaattgtagaaggattaactaattactaattgagtctccaatattaagggtcctactacacatacgcaagcaatttaattgtgtttaataagttgttaaaacatgttttggttgtgttttggattccgtggtgggttaatttcctagtgnngnnncatgtaatcaatgccgtaaacgtaagtgtgtgaaaaaaaacccattatttttgtctcttttttacatttccttgctcn

SEQ ID NO: 772 - DNA, 724 bp, Glycine max
  misc_feature (594)..(594): n is a, c, g, or t
  misc_feature (648)..(648): n is a, c, g, or t
  misc_feature (724)..(724): n is a, c, g, or t
  Peptide Sequence Number=SeqID_9031
  Probeset Number=SeqID_10551
ttctgtgataactttctactagcgatcaatttgataaacattctctgctatttcttcggactttctcgagaaaagtcttgctgtggtggaaactgtggttgtggatctggctgcaaggcgcaacggttgcggaggttgcaaatgcacccggacttggccttttccggcgagtcgaccacgaacgagacttttgtcttcggcgtcgccccgccgatgaagaaccagtacaaggtttctggagagggtgtccctgcagaacgatgcatgcaaagtgggggatctgacctgcaggagggatcccttgcaccctgtaaatgaaatcaccccgccaacctttcttaaggcaggcagaagataaatcagcaattttaattaatatttacgccaacccctaaaggaagggcctcagggctctggttttaaaggaggaaataaacggcctccccccccccttttggggtttttataaatcggaaaaaagggggttatatagtctccgtggttggacggtacaataatcctagccctcctcgccccgccccatcggggtggaagaggtaggagcgcccacgctgcgcaactcaccacttcccnaacgcggaccgcccaaacggcgggaaattcgacttccccgcttaaattgtagtnctccacccactacaattattgtaccctcttatttcccgttctcccacccctcgccccctccaagagaggtgggggn

SEQ ID NO: 773 - DNA, 1646 bp, Glycine max
  misc_feature (1)..(1): n is a, c, g, or t
  misc_feature (523)..(523): n is a, c, g, or t
  misc_feature (550)..(550): n is a, c, g, or t
  misc_feature (723)..(723): n is a, c, g, or t
  misc_feature (725)..(726): n is a, c, g, or t
  misc_feature (730)..(730): n is a, c, g, or t
  misc_feature (870)..(870): n is a, c, g, or t
  misc_feature (910)..(910): n is a, c, g, or t
  misc_feature (914)..(914): n is a, c, g, or t
  misc_feature (1042)..(1042): n is a, c, g, or t
  misc_feature (1055)..(1055): n is a, c, g, or t
  misc_feature (1154)..(1154): n is a, c, g, or t
  misc_feature (1216)..(1216): n is a, c, g, or t
  misc_feature (1222)..(1222): n is a, c, g, or t
  misc_feature (1318)..(1318): n is a, c, g, or t
  misc_feature (1433)..(1433): n is a, c, g, or t
  misc_feature (1439)..(1439): n is a, c, g, or t
  misc_feature (1448)..(1448): n is a, c, g, or t
  misc_feature (1455)..(1455): n is a, c, g, or t
  misc_feature (1459)..(1459): n is a, c, g, or t
  misc_feature (1505)..(1506): n is a, c, g, or t
  misc_feature (1542)..(1542): n is a, c, g, or t
  misc_feature (1553)..(1554): n is a, c, g, or t
  misc_feature (1567)..(1567): n is a, c, g, or t
  misc_feature (1583)..(1583): n is a, c, g, or t
  misc_feature (1590)..(1590): n is a, c, g, or t
  misc_feature (1609)..(1611): n is a, c, g, or t
  misc_feature (1613)..(1618): n is a, c, g, or t
  Peptide Sequence Number=SeqID_9032
  Probeset Number=SeqID_10552
natagagaaatacatgcacgggcgaggagacatgggtgtgtgggagagtgatagagtgacaagtgaacacaagcacactatcacgttgagcgagtagtaaggtagtcagggacgtgtgtatacattgcgcatggtgtgagcgtcactaggcagaagagagagtgagggaggtatctctgtggccgcgcagagtgacagcggtgagaggacagcaagatcacagcaacagcgacgccgcagctcgtcacgggacaactggcacccgcaagagtaagctggtggcatgaggacgtgttcctatctcataagtgatcgtagagatgtacagtcacgagagcttacgccatgacgattcagccagtgtgcattagatgtaggtgagtatggtaatagttactttgtaagtttgcaccacgcatacaccacacaacagcagacatggagacacaggagcagagttcgattgcacaccagctctgtgcgtgtgtcggggtatgagaagtaggtgatgaggaagagtgtntgtgtgttgcggaggcgtggtatgtgnctacagatgtgggcacaagaaaacgcatcaaggtgagagacgtgttggtggggacgtgaccgttcacaacatcaatgtcatattctgcgcgtggggtaggggtgtatgaagtgtatatgtttgagactatctctcagtatatatgagagcgcaggactggtgtgttgttcttntnnttanttactgttctcacaccgtgggggaccactctaaacgctcaccacaattccatctaatctgcctctcagcactactctcctcacatctgaccgacgcgcgtgtatgacacgactggacatgtcgtataccggtcttccatngcattagtactcgaagacgctggacaggacaagaatagtnctgntcttttcatcatatccatatatctatataaggtatatgttagaggtcgatagagtgagtatttgttgttagaagttgatgatgagtatccattagtgtattagtgttgtatgatatgtggggtgggantcacactacacancataacatacaggatagctcaatatcagcacatagtttgtcttgatgatacgtgttttttctatgtagaatagcgtgtatatgtgagatatgttatatnggacttctatccttgtcacgaggtgtcaattccaagagtatacaaattattgataggtagtnggaaancccgatatatttataaaatctatagcagtgcgcgaaggagagcgaggacaggagcagacattgagacaatatagcgatgtcaatggtgttaggatncatttatatagagagtaatatatactgtagaggtggtgcgtgtgtgggtgtatattatgtgttttttctctagtatatcacaacctaaggattaaaggtcctcttcttatgtaantaattntatgcggcntcacggngtcncccatctcggtgtgtgtggatgaggtaacttccctgtaggtggagnntctctcccccgcacgagtgagtagagtgccgccggncaaaccacacnnaaaaaaacacctnagcggacggaaagcgnggcgtgngggacgggagaaaacaaannnannnnnnggggggggggcacacaaaacacacacac

SEQ ID NO: 774 - DNA, 2010 bp, Glycine max
  misc_feature (74)..(74): n is a, c, g, or t
  misc_feature (86)..(86): n is a, c, g, or t
  misc_feature (92)..(92): n is a, c, g, or t
  misc_feature (114)..(114): n is a, c, g, or t
  misc_feature (230)..(230): n is a, c, g, or t
  misc_feature (239)..(239): n is a, c, g, or t
  misc_feature (251)..(251): n is a, c, g, or t
  misc_feature (289)..(289): n is a, c, g, or t
  misc_feature (309)..(309): n is a, c, g, or t
  misc_feature (333)..(333): n is a, c, g, or t
  misc_feature (360)..(360): n is a, c, g, or t
  misc_feature (405)..(405): n is a, c, g, or t
  misc_feature (408)..(408): n is a, c, g, or t
  misc_feature (435)..(435): n is a, c, g, or t
  misc_feature (441)..(441): n is a, c, g, or t
  misc_feature (503)..(503): n is a, c, g, or t
  misc_feature (820)..(820): n is a, c, g, or t
  misc_feature (941)..(941): n is a, c, g, or t
  misc_feature (1023)..(1023): n is a, c, g, or t
  misc_feature (1282)..(1283): n is a, c, g, or t
  misc_feature (1360)..(1360): n is a, c, g, or t
  misc_feature (1400)..(1400): n is a, c, g, or t
  misc_feature (1415)..(1415): n is a, c, g, or t
  misc_feature (1421)..(1421): n is a, c, g, or t
  misc_feature (1432)..(1432): n is a, c, g, or t
  misc_feature (1435)..(1435): n is a, c, g, or t
  misc_feature (1464)..(1464): n is a, c, g, or t
  misc_feature (1639)..(1639): n is a, c, g, or t
  misc_feature (1675)..(1675): n is a, c, g, or t
  misc_feature (1741)..(1741): n is a, c, g, or t
  misc_feature (1770)..(1770): n is a, c, g, or t
  misc_feature (1839)..(1839): n is a, c, g, or t
  misc_feature (1863)..(1863): n is a, c, g, or t
  misc_feature (1897)..(1897): n is a, c, g, or t
  misc_feature (1933)..(1933): n is a, c, g, or t
  misc_feature (1956)..(1956): n is a, c, g, or t
  misc_feature (1968)..(1970): n is a, c, g, or t
  misc_feature (1972)..(1976): n is a, c, g, or t
  misc_feature (1980)..(1980): n is a, c, g, or t
  misc_feature (1982)..(1982): n is a, c, g, or t
  Probeset Number=SeqID_10553
ggtagaggtatagacacgagaatagtgtggcgccatacagcactgtatgacggacagctagatctactagcgcntcgctagtgacnttgcgntctaggagagtgcgtcgtctgngcgaggagtgtgaagtatgatagtgtgtgtcgtgtgtagtgctaggtcgagatgttggagggtggtatgtagtatctgttcgatgtgagccatagcgatggcgtagcgcgaaatcncatacgtanacgagtagtacnaaagacggagagagctgcagtagcgcgtcgatatgcgngggctcatagatgagaatanagagaatagagagaccagtaaacnaaatatgtcgataatcagagtaatttncttgattatcattgtgacatattagtatagatctcgcctacgatnagntactatagtggcagtagctgtgcgtgngttagnttgagttaggtgcgcgttgcgctgcggacgtgtagagtgtgcaagcgaatcacatcaaatanatagtagtgtttcgtctgagcacagcagtcacgatatgcgttgttccgatgctgctaatgtgatacacgcatgtaagcgaagtcatctacgagtcagagtacatccaccggccatatctatgattcacactctcacactctctctcacgtacactattctgcgtggtcgaggcgtgttatcagtcgcgaacacatatggtgcagccgtgggagtctacgtaggaaatatatagaagagagaagagagacagtgagagtagagagtgagtagcagtggtgtagatatctgtaacacgtctccatcctaatatctgtcncatcagagagcggtgtgattgcttggtagtatcagaagaggcgagatgttatgtgcagtgactcagcagcgcggcagttatagcagcaacacactcactcctgtatatttatctcacacanccactcatcttactagttcacatccctaccgccatgccgtggttgttatcatactccgtcactaagtagtactaccacaatncacttccacagcaccgccacacaactcctgtgtcgttatactccactgctctcacaccactcacatccaacagtttatgtatgtagtatagctagagaagcacaatcgcaacacaaacacaacacagtgtatgtgaggatcattgagatgagaagagatgcaagtgtggcagtgagtatgtggtctgtagtatttaatagcttagataaagaacatcgcaggagcgcaccgtatacatccgcacgagtgaagggtgagnncatgtacatacaacaaagtctgtcgccgacgactgtatgtgtgtgccagctcacaaatatactatatagtgatatantaatcaaatagctacgataacaagaggagtgtgggttgtntgggtggcgtgcgtncgaggnatattcagttntcnttgtctcgcgcccccgccccccctccccntagggctcaattgtgccgcaatcagcgcagagcaactatatactactgacagcgtgacgcggagagcgcagttactaagagcaacataacctatgcgccacacaatatattaagagagagcgcacagtgaacactctcgtgttgttctattttttgatacgtgaatatgatttgntatcagatatggtagaggagtgcgagagtagacagnacaacagagagacaaagaatagaggtggtagaagtgtgtagtgctctcagcgcatattttagttangtgtggtggggtctgggtgcatacaatcnctatatatgttgaaaatatagcaatatcatagacaatgtaatataaacacaaacagaggagcgagcccncctaaatcactcaccaacagacantggatgagtatgtattagagtgtataaatgaganagaggaatatagattacataattaatatatataatnataatgatatatatatgaaattnatataaatatannnannnnngggngngggagggggtgtgtaggggggggggggg

SEQ ID NO: 775 - DNA, 1693 bp, Glycine max
  misc_feature (1)..(42): n is a, c, g, or t
  misc_feature (53)..(53): n is a, c, g, or t
  misc_feature (59)..(61): n is a, c, g, or t
  misc_feature (63)..(63): n is a, c, g, or t
  misc_feature (67)..(68): n is a, c, g, or t
  misc_feature (71)..(72): n is a, c, g, or t
  misc_feature (74)..(74): n is a, c, g, or t
  misc_feature (77)..(77): n is a, c, g, or t
  misc_feature (82)..(82): n is a, c, g, or t
  misc_feature (93)..(94): n is a, c, g, or t
  misc_feature (1161)..(1161): n is a, c, g, or t
  misc_feature (1169)..(1169): n is a, c, g, or t
  misc_feature (1197)..(1197): n is a, c, g, or t
  misc_feature (1240)..(1240): n is a, c, g, or t
  misc_feature (1298)..(1298): n is a, c, g, or t
  misc_feature (1308)..(1308): n is a, c, g, or t
  misc_feature (1395)..(1395): n is a, c, g, or t
  misc_feature (1417)..(1417): n is a, c, g, or t
  misc_feature (1437)..(1437): n is a, c, g, or t
  misc_feature (1441)..(1441): n is a, c, g, or t
  misc_feature (1544)..(1544): n is a, c, g, or t
  misc_feature (1581)..(1581): n is a, c, g, or t
  misc_feature (1600)..(1600): n is a, c, g, or t
  misc_feature (1628)..(1628): n is a, c, g, or t
  misc_feature (1633)..(1633): n is a, c, g, or t
  misc_feature (1662)..(1662): n is a, c, g, or t
  misc_feature (1693)..(1693): n is a, c, g, or t
  Peptide Sequence Number=SeqID_9033
  Probeset Number=SeqID_10554
nnnnnnnnnnnnnnnnnnnnnnnnnnnnnnnnnnnnnnnnnnaaaatttattnaattannnanatannaannantangtatnacaataaccannctattcaaatatattaataagaactgggtttatacaggaaatctagttgcctccaattaaccacagcctctcgtcttcctgctcttatatttctcttcgatctacacacgtagcgcatttcttcctcgtgcacaactaccctcctctctgcatccacacatcctctgtagatacttatacgcacttatatgctcagtctcctcttatggcgctaagtgtatatgagctttccgcaatacgcccacacactctgcacagactagttgttaacaatagtaacacatacatagataccatatacacgtccacgctaccctcaccctcttccctccctgcggctctcaccaaaacgcaacacacagacaactgcacgtatactctactcaccttgcgtctcgacatgaatcagcccactatcgcaaatctaaataactctacgattattctatctagatatatctgatctatgccaatcactgacatatcacagaatgtcccgactacttctccacacaacctcatcaccgtccttcaacaaatagaacttaataccacacaccttacaccgtctaactctatacattctaacaaacacatcattcgctccatagcctcccacccacactacctctgtctccaccgatctctcttgcacacgaactactttaattactttactgtcaatcttgtgcatcgatgcacaccccatctcgtaccagcatctccacaatcaatgacaaacatctgaataatatcacaagatccatactccaatcgcacatacacactcttatataccacacacactcactatacatatattaccattcgcccgcaactataactcactctcccattacgcatgtcgcacctacttctatcacatactctatcgcatatacgattactcctccacgctacatactgcaatgagtgcagtcctattcgcacgctctccttctaaacgtcactctcgacacctcatctctcctgccatatgtgctacttgtccgcgacatttcactctcatgacgctaccacgcatcctcacaccgtacatcactccncacctccnacacacatcactccgaccttatgctcantgtttcatcaagccacagtcacgcactaccaccaacatatttntatctatttaccatctcatacacacgtactccccaccaactccggatcgctcgtctangttctctctncattgccatcccacactccatttccaccacacaagctccatccagagacacacacgcacagaggacacaaatatgcgaatatatccntcaagtataaaataataatgtnggacacacacaacacaccanccanacatgcactcaactcaccacacattatcgagattaatactccacacatatgaccgcatctatctcccccgctccagcactttctccactccactcgacacacnctgtatacattacgctctcacagaagcttttcatcgngatgattgatatgcacacnactcacctctcacgcatacgacggacancttgnatgcacatgttgatattgtgtatctacgncatcgtactcatacaacatatcacatcaccn

SEQ ID NO: 776 - DNA, 807 bp, Glycine max
  Probeset Number=SeqID_10555
aaaagattttgtttatgtttcggcttgttcactccttgatttcctcccttttttgtgccctttgttttctgaaacctagcccggcagcttcccttcctccctcgatctcggttgccgctatttgcttctcctctgaatccatcctaaacatttaacggccctgtatttgttaattgcgatttacgattcaaccctctaactttggtacagtggcttccaacgtatcgccttctgccctggataaagaacagatagattgaatggccgaaatggacaagaagtatcgcgagaaatttttcaacaagaggacccagaactgttataaaaagtgtgttgaaaataggtgcaaggagtgctggcttaatatgtgtgaaaatagttgtattcatgtctgtgatctaattggctggcatgtgggtaatctaagtggtccaactgcttggttctttaagtcttcctttgtaatcctataatgtaatgtctcctttttacgatttgctacatgtttgccacatctacgatattaataattgcttccccaaggtagcgtaaatttaatactttggtacgtctttatttttgtccatgactattttgagttcaacctgtttttgttaagaaaggaattgatgatgagcttttgaggtagccaaaggtgaacaataaaagtagttttagttaattaagtttattcttctttttcagaggagttcatcttgtaatcagaggagtttatcttatagtgacaaatctatgtcttactccattttaaggaaaaaaaaaaaaaaaacatgactttttggctct

SEQ ID NO: 777 - DNA, 484 bp, Glycine max
  misc_feature (470)..(470): n is a, c, g, or t
  Peptide Sequence Number=SeqID_9034
  Probeset Number=SeqID_10556
gctgatcatgcccctgtcgctgttcttgttgttgaggatactggcgggctaccactcacactgacctgtttgactgtgcaatgctgatcgtcgtcgaactctgagtcctcactctgcatgaggtatgagtgctagtgtacttggaaagcatactgctcgatcgtcgtggggagaccgttcgtatactcttctgtacagagactgggagacctgccagctactatgacaagagtcgaaaaaacttatctaagggactgcacacgctttgctagatacatagttgtgtgaaggaccccacactacaatctctgtgcagaggacgagaagcttatgaaccacccagatatgtgacaataaacacaggcattgagcagctcttggagattgagcaagctcgtgaagaacctgcatatactgaggataccgagtgtgttgggcttgcacggcttgggagtgaagatcagatgatngtagctggaacaat

SEQ ID NO: 778 - DNA, 1827 bp, Glycine max
  misc_feature (25)..(25): n is a, c, g, or t
  misc_feature (68)..(68): n is a, c, g, or t
  misc_feature (78)..(78): n is a, c, g, or t
  misc_feature (98)..(98): n is a, c, g, or t
  misc_feature (123)..(123): n is a, c, g, or t
  misc_feature (134)..(134): n is a, c, g, or t
  misc_feature (158)..(158): n is a, c, g, or t
  misc_feature (257)..(257): n is a, c, g, or t
  misc_feature (299)..(299): n is a, c, g, or t
  misc_feature (307)..(307): n is a, c, g, or t
  misc_feature (452)..(452): n is a, c, g, or t
  misc_feature (454)..(454): n is a, c, g, or t
  misc_feature (778)..(778): n is a, c, g, or t
  misc_feature (1111)..(1111): n is a, c, g, or t
  Peptide Sequence Number=SeqID_9035
  Probeset Number=SeqID_10557
acacagactgctacactattatctnattctactcatcgtctactcatcatcgcctcagacccacatgnttatatgtgngttgcgcatgtatctgatcntgtcctcactgatcgagcgacgtgnttacagtacangtatagctgctcgctagtgcgtangtcgttcgatcatcattctctcatctctctgtcgcgtcgctgtctctacgtacacatgtcactcagacatgttcattgtatacacgtccttctcgcatnctcactctctgtcttgtatgttcgcgctactgcagttgtcgncctctacncattcgttactgcatctctgcctcatacatcgttctctgcgagcatctgctcatcatctctatgtacgacttctacactcgaatcgcctgtctcagcgtgtcttacgtctgcttgtctgtctgttgccgctatctctccacagtnanatcgtatgcgctcatcgcgccgccgtccacctagtctctgtgtctctatccacgtaggtctcgatgctatatactaatgtgcctccttatatccatctatctcgtcaccttcactgtccgctcgttacatctcgctatactattcacgctcgtcgtccttcatcgctgcgcacatcgtcttctctccaccatagtcaacagtctcgctctcttcatttcgatgcctcgttggtgcttcaccactatctctgcgcgccgtcaccctgctcctcgattctgacgtcctgcgtcatactcactattcctcccgatccgcgctatcangcactcctcattcgtctctgctctctctgtctccgactgccgtctacttcgcatctcatgtcgccgcttccatctcctggcagtcacttcgtccttcgtctctcgctatttcgctcgtattattcccatgtctatcctctgtctacactttcgcggcgcgcgcgcatcgtcattgcacgctctcctctctgaacatgttcgtcccttcacgcggcagaccatctcgtcctctccatccttctattctctcttacggccctccctatatactgtgtctcctgcactctaaagttcgcgctccgttccgcctattactatcgcgtttcatctgtntctctttatctcttttactcactattacatatcttccttgacgttcgcgcgcgtactcgtcctctgctcttcctacctctcacactcgtcctccgcacgcggcatacctcacgcctgtcctctattctccgctcatcctcctctactatcatatatcttccttttcatctcccccttttctcctcacttctctctgtcttgcctcctcgctcgatactactcgtctctgtctttcgcatcctcgcattctcatatttcgcatttctccctctctcccccttctcttcctccccacccttctcttcgccctccggttccccccgcacaccctctcgcgctgttctgttttgtcttttctatctcttttcttctccccctctctctacttctcattctctctctctacctcttagctggcattctaattcaacacctttctttttttttggggggctaaaatactccagcgtcttcttcttcactcctcccgcgccccccactctcctttatttctccttttcgcatcccctctcttctcggaggggaaacttcccttcctccccctctcttacccctccctttttttgtggaaaatattttctcttctcttctcttctttctttcttccccttccccatttcttcgaaacctctctcacacccgcacctcattcttcagatattattaatttgacctgacaccgtttttttctcatt

SEQ ID NO: 779 - DNA, 483 bp, Glycine max
  Probeset Number=SeqID_10558
gtcgagttccaatggcatctcttcactccctcgccgccgtttctgtaatcgctactaaaggaacagcagttacttcgtcttgttcctcaactctacgccctctttcatctctacgatttaaaccacgcgagctctctatattcccaaaccatcgcaaaggcaaagggggagcaataaaggcgcagtcgaaagaagcaagtcttcctcctcctactgtgggagagggagatgcattaactagtatgaagcatcttctcctgcctgtgattgatcgcaatccttatctctctgaaggcacccgacaggctgctgctacaacaactagtttggcaaccaagtatggagctgatatcactgttgtagtcatagacgaagaaaaaagagagtcatcttcggagcacgagactcaagtatccaacatccggtggcatctagcagaaggtggtttcgaggagttcaagctgttggagaggcttggggaag

SEQ ID NO: 780 - DNA, 1775 bp, Glycine max
  misc_feature (1)..(26): n is a, c, g, or t
  misc_feature (31)..(31): n is a, c, g, or t
  misc_feature (49)..(49): n is a, c, g, or t
  misc_feature (163)..(163): n is a, c, g, or t
  misc_feature (165)..(165): n is a, c, g, or t
  misc_feature (196)..(196): n is a, c, g, or t
  misc_feature (246)..(246): n is a, c, g, or t
  misc_feature (250)..(250): n is a, c, g, or t
  misc_feature (290)..(290): n is a, c, g, or t
  misc_feature (867)..(867): n is a, c, g, or t
  misc_feature (965)..(965): n is a, c, g, or t
  misc_feature (995)..(995): n is a, c, g, or t
  misc_feature (1012)..(1012): n is a, c, g, or t
  misc_feature (1043)..(1043): n is a, c, g, or t
  misc_feature (1066)..(1066): n is a, c, g, or t
  misc_feature (1068)..(1068): n is a, c, g, or t
  misc_feature (1189)..(1189): n is a, c, g, or t
  misc_feature (1192)..(1192): n is a, c, g, or t
  misc_feature (1256)..(1256): n is a, c, g, or t
  misc_feature (1260)..(1260): n is a, c, g, or t
  misc_feature (1304)..(1304): n is a, c, g, or t
  misc_feature (1315)..(1315): n is a, c, g, or t
  misc_feature (1341)..(1341): n is a, c, g, or t
  misc_feature (1366)..(1366): n is a, c, g, or t
  misc_feature (1369)..(1369): n is a, c, g, or t
  misc_feature (1384)..(1384): n is a, c, g, or t
  misc_feature (1387)..(1387): n is a, c, g, or t
  misc_feature (1487)..(1487): n is a, c, g, or t
  misc_feature (1489)..(1489): n is a, c, g, or t
  misc_feature (1512)..(1512): n is a, c, g, or t
  misc_feature (1667)..(1667): n is a, c, g, or t
  misc_feature (1676)..(1676): n is a, c, g, or t
  misc_feature (1708)..(1708): n is a, c, g, or t
  misc_feature (1712)..(1712): n is a, c, g, or t
  misc_feature (1716)..(1716): n is a, c, g, or t
  misc_feature (1751)..(1751): n is a, c, g, or t
  misc_feature (1759)..(1759): n is a, c, g, or t
  misc_feature (1768)..(1768): n is a, c, g, or t
  misc_feature (1770)..(1770): n is a, c, g, or t
  Peptide Sequence Number=SeqID_9036
  Probeset Number=SeqID_10559
nnnnnnnnnnnnnnnnnnnnnnnnnnaaaanccccttggaacaacgcgnggacgtagtgattacgcagtgtgcgtgtacgcgtagcagggagtggagagaacgaaataagaaggcaaagcacgcggacggcatatttatcgcagaaagcaggcggtgacggtncnattgcgtgccgctttctccaccacaacttantatcctctcctcaggatgtcctctctcgcatcgtaccgcctccccgtccncacncgcacctcagcgtctgcttcacaccaccccctacagacanaccatggtctctctgacagaacctggtgcatatccttgattctagcataccatactaataaacaacagcaccacacacgcatgacaacgcgccctcactctccgctccgctactgtgttctctgaccctctcgttatcttgtctctctcgtcgctttgtagttatctcttcactccgcgctccctcgctctctcactcctcatctcctcccctccaccacaccgctcacttcctaagagctcctctctcctcctcatacactaatctccgtgcatctcgtctcctctgccgtactctcctgtcggtcacctgacttgcatgttcgctacctctccatcatacatcgcgtgaccgagacttatatatgtcatgccagaaatctcacaggtgctgcgacacgccatcgcacgctcgctactctctactcatacatcacgtatgtgacgattgcaaactgctctacacgagccactccgctagcctgacagcgttgagctagtattcagtgatgagtgtctactcgcatcgacatacgtgtgttgtcgacctctacgctcatttatcggttcgcacgtcnacgtatgtgtgcgtatggtacagtagctgtgtgatcatctggacgcaactgttgtatggctggaggatgtagtatgtatatgagcgagctactagaanatagtttatcgttgtcgtacgttctctttncactcaccaccggaacnattcacatacacaccgacgatacatggtatnatgatagcagcgacatcactatnantccttctaacggtcgtgaagctatgactcgtgcatctctctgtgtactctggcggttacatatgttgtatatgactatctgtgatgacgtgtgtcgatcgagttcgcactgtagtcacgancgncgtcgtcgctcactcatattatcacactacgacactcgctgtgcgcatgcgtcgtaggtctaantgangtctaactatatgtggttactatgttatgttagtagtttgtcgntactagcacgnctagatacgtggctcgatgcgtgtanaacgtgctcatcatactgcctcgcnctncgactgtgtggctanctngagctcgcgtgtggcgcgcatcgcgcacgatgcggcatgtatgagagtatagtatcgatgctcgtactaccacacgatgcacgcatatacatattacatnangcgacaggtagttgcgacacgcntctatgctgcacagattgagagcagcagcgtcgtagcagcgtcatgcactgcgctgaccgtacagcgtatcacgatgagtcatcgtacggcatgatgcacctgtcgtcgcgcgcactgcggctcggcgctcgctcctctccaccgctcacgccgntgactgcgngccgaagttgcgtatgcagagctcagcacgtngtanaccnagacacgtggatgacgtgagagacgatcatgacgnctcgaganatacgtcgnantagtg

SEQ ID NO: 781 - DNA, 2043 bp, Glycine max
  misc_feature (1)..(1): n is a, c, g, or t
  misc_feature (13)..(13): n is a, c, g, or t
  misc_feature (20)..(20): n is a, c, g, or t
  misc_feature (35)..(35): n is a, c, g, or t
  misc_feature (80)..(80): n is a, c, g, or t
  misc_feature (89)..(89): n is a, c, g, or t
  misc_feature (103)..(103): n is a, c, g, or t
  misc_feature (124)..(124): n is a, c, g, or t
  misc_feature (137)..(137): n is a, c, g, or t
  misc_feature (151)..(151): n is a, c, g, or t
  misc_feature (160)..(160): n is a, c, g, or t
  misc_feature (166)..(166): n is a, c, g, or t
  misc_feature (192)..(192): n is a, c, g, or t
  misc_feature (200)..(200): n is a, c, g, or t
  misc_feature (229)..(229): n is a, c, g, or t
  misc_feature (247)..(247): n is a, c, g, or t
  misc_feature (249)..(249): n is a, c, g, or t
  misc_feature (296)..(296): n is a, c, g, or t
  misc_feature (299)..(300): n is a, c, g, or t
  misc_feature (302)..(302): n is a, c, g, or t
  misc_feature (311)..(311): n is a, c, g, or t
  misc_feature (323)..(323): n is a, c, g, or t
  misc_feature (329)..(329): n is a, c, g, or t
  misc_feature (332)..(332): n is a, c, g, or t
  misc_feature (434)..(434): n is a, c, g, or t
  misc_feature (456)..(456): n is a, c, g, or t
  misc_feature (477)..(477): n is a, c, g, or t
  misc_feature (479)..(479): n is a, c, g, or t
  misc_feature (561)..(561): n is a, c, g, or t
  misc_feature (596)..(596): n is a, c, g, or t
  misc_feature (793)..(793): n is a, c, g, or t
  misc_feature (831)..(831): n is a, c, g, or t
  misc_feature (902)..(902): n is a, c, g, or t
  misc_feature (910)..(910): n is a, c, g, or t
  misc_feature (950)..(950): n is a, c, g, or t
  misc_feature (1067)..(1067): n is a, c, g, or t
  misc_feature (1162)..(1162): n is a, c, g, or t
  misc_feature (1164)..(1164): n is a, c, g, or t
  misc_feature (1167)..(1167): n is a, c, g, or t
  misc_feature (1429)..(1430): n is a, c, g, or t
  misc_feature (1533)..(1533): n is a, c, g, or t
  Peptide Sequence Number=SeqID_9037
  Probeset Number=SeqID_10560
ncatatgcatcantagtagncatccagcaaatacntcgttgtgcgtctatagtatatcgcgtcgagcagcatgatcacanaccactacncgtgatagtctaantatcaatatccgcttatgcancatacagcgaagntactcagctgctcngcgtctacnaatcanttcactactacgatatatctaatagnacagcgcngcgccgacggcgagtcgcatagtaatcantctgcagctctcgtaccnantatctagtcgacacgtcgtgcgtgtatatgcatgccgacagcacgancgnngntagtcatanttgcgatgagtntagttntcngcctattcatcacgcacgacacacgaaagtcgccgacgcgcacgtatattttgtgtatatagatgacatagtaaagagagcagtcgagacgcagcagtgagngatcatttgtattcagcacggntgcgtttctctatgtttgatnantcattattattctgtcgcgtggcagcacctcgcgctactctcgcgctgcattcgtattatcctactgatctctcgtgtttancgcatgcgagagccgcgtgcgctgttattattttnacgacgacagcgcgctattatatataatatatactagagtataatgtgcacgcagcacgacatatagagtcgagcacgagtgatgataataacgcgcgtgtgtcgtgtacacaccaacacgctcatgtggtgcgtagctgtcacattcatgtgtgcgagcatgatctaccagcaccacgacactccgtctgttctgngctctgtcacatcaataagatgacacgcgtatgagcgnagtgatcaaatatatgtcgtgttgagttataacatacaacagttggtaggtatacaacaacgacaagatancgcgccgngatatggactgttatatataatatatgtactcggtcgcgnttgacaaacagatattatgtattgttcgtgatgacgggcactatatgtcgtgacagccacgcacacatgacttaatcactttatatgggtgcacgcaccgccgcatattacacatcngaccacagactgtggtgacaccgcaatataatacggcgcgagtgttcctataccacatgcgtgcgacgcacacgcacattatatctattctccgncnggngcgcgcgcgggtatgtaatcaatatacgacgccgctcacatatatatacaacggacgcgtggacaaacacaatagacaatgcgtttgtcgaatgtgtcggcacgagcatacgtgaatcttgcgtaaccgccaccttatcatatctccatcatatttatctatggtagtatcgagcccgcgcattgtactacagggtctgaatagattatcatactgtatcacggtgatgttggtataactatagtcggtctgttgtgtgtgnnttatggttgggcggcgcggcggccggctaccacgccgcgccgcggcggtatcttataatcaaccgcgtcgcgcgcatcgtcgaaatcgtgccgtatcctaacnaccagggtgtatgcgctaactatacagagatgataatagcggggacgtggagatgtggtgtatattatattaatatgtttgtcagaggcggtatatactacaaagcgcgtagatcatgcgcgtgatacaaccgattataagaatattaagaggtcgcaacatatcaaatattgggcggcggggatgaggatactgttcgagatatgagtacttcatcggtcgtgcaaacacgagtgcctcatatgctagtgatgtgtggcagcgccactggagacaccaccatgttgagtctcacaaatctacactttatgcgcgcgcggagcgtgcagagagcgtaacaaaataaatcgccgtacaaccgctacgacgcggtagggtgcgacgcagaacaccacaacaacgacaaaaagacgcgcagcgcagtgttgatactcgcgctgcgtaacataataggccagatcgcccgcaataatatgtaggcgtgacgcgctgttatggcgtgtgcacata

SEQ ID NO: 782 - DNA, 1542 bp, Glycine max
  misc_feature (56)..(56): n is a, c, g, or t
  misc_feature (107)..(107): n is a, c, g, or t
  misc_feature (112)..(112): n is a, c, g, or t
  misc_feature (118)..(118): n is a, c, g, or t
  misc_feature (132)..(132): n is a, c, g, or t
  misc_feature (153)..(153): n is a, c, g, or t
  misc_feature (167)..(167): n is a, c, g, or t
  misc_feature (171)..(171): n is a, c, g, or t
  misc_feature (220)..(220): n is a, c, g, or t
  misc_feature (232)..(232): n is a, c, g, or t
  misc_feature (316)..(316): n is a, c, g, or t
  misc_feature (418)..(418): n is a, c, g, or t
  misc_feature (535)..(535): n is a, c, g, or t
  misc_feature (577)..(577): n is a, c, g, or t
  misc_feature (679)..(679): n is a, c, g, or t
  misc_feature (688)..(688): n is a, c, g, or t
  misc_feature (692)..(692): n is a, c, g, or t
  misc_feature (710)..(710): n is a, c, g, or t
  misc_feature (812)..(812): n is a, c, g, or t
  misc_feature (826)..(826): n is a, c, g, or t
  misc_feature (906)..(907): n is a, c, g, or t
  misc_feature (923)..(923): n is a, c, g, or t
  misc_feature (932)..(932): n is a, c, g, or t
  misc_feature (955)..(955): n is a, c, g, or t
  misc_feature (1121)..(1121): n is a, c, g, or t
  misc_feature (1125)..(1125): n is a, c, g, or t
  misc_feature (1460)..(1460): n is a, c, g, or t
  misc_feature (1479)..(1479): n is a, c, g, or t
  misc_feature (1532)..(1533): n is a, c, g, or t
  Probeset Number=SeqID_10561
ccagtcctatatgcaccgtcttagttattctatatatacatgctacactgtgcagngacgtctatcaaggtgtgtcgctgacggcgagtattgccgtcgccccgtcnccgtngtgcgngtagtgtgcgctanctatatgcgtacggtgcacgnggagtcgcgatatnagtngcgctctctgtaagatgcgttgatcattcgcgtggtgtgtgtgtgcgcngtcgcggacgcnctcgcatgtctgagctcgaattagacactagcacgtacgctagcgtcaaacgagaacgcaccgactcacatacatagcatcatnacgactgagcagtgatgtacatagtcgaagagagcgtcgcttacgtcatgagtcgatcgataggtaattagggttgttgagcgtattgtcaccgcgctaacncctagctgtgctcgtttcaatctgatggtgtacagggacggtgagtaagtcgaggtataccactattatgatcgtgccgcgatcgcagtggtgtcgccacatggtctagtggtggtnacggaaacaataatatattaagatagaaatggtgctgtgtgngagtgtgatatcgatattctactgttcatacgcggcattgagagtgatattgctatgtatctcgtcgtctgcatgtgagaggctgcacgcgtcgtgtcgccngcgtgacgncggncaacgtcactaatacacnaatattacctccagcaactcatatccttctcactcgtcacaacgttcatacacgctgagttgctggctctcacattatatgtctctacagctcattggcgcnacccgaccgcgcantattatatactgctcgattatatatattaccgcaagaccacataagcagaacgactattgcgtactagaacgcgatatanntaaaatatacacctgnatgcatganatagctcgtcatcctctcatctnccgcctctcccctaatctttcggttgcttagtggtgttgatctaactctaccgcgtccgtagtgtgtcgctcgtgttccggtgaggtctccatcattatgatctcactaatattcactatatacgtactacatattatctaccatacattataatcgctcggaggnggancgtcagatagctatgtctctcgagtaacactcgcgtcgcgctgttgcatactgcagtgcgatacaacagacgactaacacactgctcgcaagatgctgcgtgttaactggtatcgtcaccgtcatcccgtctcgtgagccacgttaccgtgcttcgttctgcgtttcacgcgtaccgcatctgtccctctcctagttatagcggaagcggggcctcgcgtgcttctctcctcggtccgcgcacccgccactgctcgtagacaaccctcctagtgtgtgttgcatgtgtagaagagttgcgttcgagccaggctgggcgatgcatgatctgctganttcgtttatgcttgttcgntgctgctagtgtgtaggcttcgattagtgttattttattaatattatatttannttaattttt

SEQ ID NO: 783 - DNA, 1028 bp, Glycine max
  misc_feature (719)..(719): n is a, c, g, or t
  misc_feature (800)..(800): n is a, c, g, or t
  misc_feature (1028)..(1028): n is a, c, g, or t
  Peptide Sequence Number=SeqID_9038
  Probeset Number=SeqID_10562
gttaacgagaccaagctagccatgacttgatctcatcatccaacttggtctcgttaactagatcaacagcagtgtgaagaagggaggaggagatcaagtcatggctagcttttgctgcccaaaaaattgttgaagttaacgcattggctaaagcattgtctggccacaaggatgaggccttcttctctggtaatgctgctgctctggcttcaaggaagtcttctccaagagtgaccaacgaggctgttcagaaggctgctgctgcattgaagggttcagatcatcgccgtgcaacaaatgtcagtgccagactggattctcaacaaaagaagctcaaccttccaatcctgccaaccaccactattggatccttccctcagactgtagaactgaggagggtacgccgtgaattcaaggctaacaagatctccgaggaagagtatgtaaagtcaattaaggaggaaattcgcaaagttgttgagcttcaagaagagcttgatattgatgttcttgttcatggagaaccagagagaaatgatatggttgagtacttcggtgaacaattgtcaggctttgccttcaccgttaatgggtgggtgcaatcctatggttcccattgcatgaaaccaccaatcatctatagtgatgtgagccacccaaagccaatgaccatcttctgatcatctctagctcagagctttaccaagcacccaataaangaaatacttaccaatcctattaccattctcaactagtcctttattagaaataaccaacctagatctaagaccacctaccanattactttatctatcaaagacgaagtaaaagaccttaaaaaagctaacatcactattatccaaattaataaagctactgtaagagaagatcttccactgagaaaatcagaacaagctcactacttagactaaactatccataccttcagaatcaccaatattaatatccatgataccacccagatccacactcacatatactactctgacttcaaccacatcatccan

SEQ ID NO: 784 - DNA, 328 bp, Glycine max
  Peptide Sequence Number=SeqID_9039
  Probeset Number=SeqID_10563
agttgagaaggctgtagatatgccacttgacagtgatgtcgttgctattcctcctggttataatgtcccccagcaggttcatataacgcaaggtgacctagtggggaaagcagtgatcgtgtcatgggtgactgtggatgacccgcggtcgagcgcagcgcgccactggagtgagacaagagaccacaacgcgatagttgaaggaacccttggcacgtcccggctcttccatcactcctctggttttattaatcacaccaccatcacacctttcgaccacacaccaaaccactactatgaggttggacttggcaacacaacacagcac

SEQ ID NO: 785 - DNA, 2045 bp, Glycine max
  misc_feature (1)..(1444): n is a, c, g, or t
  misc_feature (2045)..(2045): n is a, c, g, or t
  Peptide Sequence Number=SeqID_9040
  Probeset Number=SeqID_10564
nnnnnnnnnnnnnnnnnnnnnnnnnnnnnnnnnnnnnnnnnnnnnnnnnnnnnnnnnnnnnnnnnnnnnnnnnnnnnnnnnnnnnnnnnnnnnnnnnnnnnnnnnnnnnnnnnnnnnnnnnnnnnnnnnnnnnnnnnnnnnnnnnnnnnnnnnnnnnnnnnnnnnnnnnnnnnnnnnnnnnnnnnnnnnnnnnnnnnnnnnnnnnnnnnnnnnnnnnnnnnnnnnnnnnnnnnnnnnnnnnnnnnnnnnnnnnnnnnnnnnnnnnnnnnnnnnnnnnnnnnnnnnnnnnnnnnnnnnnnnnnnnnnnnnnnnnnnnnnnnnnnnnnnnnnnnnnnnnnnnnnnnnnnnnnnnnnnnnnnnnnnnnnnnnnnnnnnnnnnnnnnnnnnnnnnnnnnnnnnnnnnnnnnnnnnnnnnnnnnnnnnnnnnnnnnnnnnnnnnnnnnnnnnnnnnnnnnnnnnnnnnnnnnnnnnnnnnnnnnnnnnnnnnnnnnnnnnnnnnnnnnnnnnnnnnnnnnnnnnnnnnnnnnnnnnnnnnnnnnnnnnnnnnnnnnnnnnnnnnnnnnnnnnnnnnnnnnnnnnnnnnnnnnnnnnnnnnnnnnnnnnnnnnnnnnnnnnnnnnnnnnnnnnnnnnnnnnnnnnnnnnnnnnnnnnnnnnnnnnnnnnnnnnnnnnnnnnnnnnnnnnnnnnnnnnnnnnnnnnnnnnnnnnnnnnnnnnnnnnnnnnnnnnnnnnnnnnnnnnnnnnnnnnnnnnnnnnnnnnnnnnnnnnnnnnnnnnnnnnnnnnnnnnnnnnnnnnnnnnnnnnnnnnnnnnnnnnnnnnnnnnnnnnnnnnnnnnnnnnnnnnnnnnnnnnnnnnnnnnnnnnnnnnnnnnnnnnnnnnnnnnnnnnnnnnnnnnnnnnnnnnnnnnnnnnnnnnnnnnnnnnnnnnnnnnnnnnnnnnnnnnnnnnnnnnnnnnnnnnnnnnnnnnnnnnnnnnnnnnnnnnnnnnnnnnnnnnnnnnnnnnnnnnnnnnnnnnnnnnnnnnnnnnnnnnnnnnnnnnnnnnnnnnnnnnnnnnnnnnnnnnnnnnnnnnnnnnnnnnnnnnnnnnnnnnnnnnnnnnnnnnnnnnnnnnnnnnnnnnnnnnnnnnnnnnnnnnnnnnnnnnnnnnnnnnnnnnnnnnnnnnnnnnnnnnnnnnnnnnnnnnnnnnnnnnnnnnnnnnnnnnnnnnnnnnnnnnnnnnnnnnnnnnnnnnnnnnnnnnnnnnnnnnnnnnnnnnnnnnnnnnnnnnnnnnnnnnnnnnnnnnnnnnnnnnnnnnnnnnnnnnnnnnnnnnnnnnnnnnnnnnnnnnnnnnnnnnnnnnnnnnnnnnnnnnnnnnnnnnnnnnnnnnnnnnnnnnnnnnnnnnnnnnnnnnnnnnnnnnnnnnnnnnnnnnnnnnnnnnnnnnnnnnnnnnnnnnnnnnnnnnnaaggaggtcatcatgagtggcggtgagaatacgaaaagcgtggtgttgaagtcggtgttatacggaaatccgaaggtgaaacacacgggggaagtgcctagtcctgacatgtagtggcaagatgccgccttgggtgggttacaaaacaaggcggcgcaaaaaggatccgccaaagacatggagggggacgtgatacagttttgtgatgacaacattcggcattatatggttgccataacggcggagttcaatgacgagctttccccaatgtcctctgggaagatccggatgattgtgctaatacatttcgcaaacaacatggtttccttcaaacagagttgaatttgaacactgtgatggttatgttttttgttgctttacaaaaaagttgatcattttcaactttttattgaattttccttttttcactttatcagcaatcaccataattaaataataaaatttcatagtctaggaacattaaaaacaaaagctatattcctcggatcatgcttgtctcgttttggattctgctccagctgaatgtttcatttaattctagcagacagcttaagcactgttaaaaaaaaaaaaaaaaaan

SEQ ID NO: 786 - DNA, 1381 bp, Glycine max
  misc_feature (131)..(131): n is a, c, g, or t
  misc_feature (134)..(134): n is a, c, g, or t
  misc_feature (787)..(787): n is a, c, g, or t
  misc_feature (955)..(955): n is a, c, g, or t
  misc_feature (1159)..(1159): n is a, c, g, or t
  Peptide Sequence Number=SeqID_9041
  Probeset Number=SeqID_10565
tgcgcgcgcgtgcgactgcactgtgtcggggtttctataggtgtgccgtatactagcatagaattatacttattcgcgggcaccagagccgcgacaccaatattcatgattttactaatataacgcaccangcngggagtaaataaatatctcaagcattatatatagcggcttcgctacacacagccgcgcgctatttgttctgtcattatcgcaacgcaccccaccacaccgcacatattattatctggcgcataaggaagaagggtaccatgcatgttataaataaatataattttattatttccggtcgcggaggcctttcgtgtatataatacatgatttatataaccagcgcaactttttatttcacggggggttatatttatacacgcgaccccgcaccgcacacctctggcgaattataaacgggtacagaggggaccgcagtcgcatatcttattattggaataatatggcgcgtcacatgcttgttatgtctacaaaaaacattaaaagattgtgcatagggtgtcgctgaaaacaaattgcagggccaagcacacccaccctttatatttttattttcgtgccggtcgctcaacacatataagttatcaacattggcttacttatcaccaccatacgctattatatttatatgtccgcccgtgataacgctgaggccgatgtttcgcggaacattcagcgcgggtatatataattttaccacaccacggcctatttttatagcgggccgtcccacaaaattcctataattcccaanattaaaaagagcgtgcggacaactatagaaggtgagaatttcttgcaatacaaggtttattaacagccaagttatcatatacacttgtggggcggcggaaaaatatgtagaataaatcctgcctgtgcattgttcaccctgatctgtggttatttttgcggggagggnagggcgccgcgcgcgggcatctatcaaccgggcgcttagaccacttaaatattatggtgcgactgatctaattgaaagacgggggcgcgaaatagagtatatataattcgctctgcggaggtacctagtgatacatacgtatactataatcttgataatcgcgctgcggcccatgaagtggggcgcgttaaatctgggccaatnactgctaaggtctacgaagagtgaaggtgggtggtgggcgggtactgacgtgcagcatctcataatactaccatgctagtccgcgaggggaattcctactagtaaactagtagacgccgcgcgcaacgcgtcggagaaacgtaccgaatattccgggcgggggtgggagggggaaagaaacgggacgaagaaatccgatgttccgtatgggggggggccatc

SEQ ID NO: 787 - DNA, 940 bp, Glycine max
  Probeset Number=SeqID_10566
agaattatgactcttagagttacctccaagttcgaactcaagagattatgtaaagctatccaagctactgctctcgtcagactcggtgcccccgttgctgaagaactcggtgttgctgactccgtccaacttaaagaaatcggtagccaaaaggttatcgtgtttgagagagatagtgctgattgcaagctcgccactatcgtcttgagaggaagtaccactaacttgatggaagatatcgaaagagccatcgatgatggtgtcaatgctttcaagaatttggtcagagaccccagattcgtcgctggtgctggtgctattgaaatccaattggctaaggaattagatacttatgctaacactattaccactttggatcaatacgctttcagacaatatgccaaggcctttgaaatcttccccagaatcctcgctgaaaatgccggccaaaatgctgatcttatcttgactaaattgtactccagtcttagtaacaacatcatccccggtatcgatgtcgacagtggtgccgttaaagctgttgatgaattagacatcattgataacttacaaaccaagatctgggctatcagacttgctagtgatgccgctttgactgtcttgagagttgatcaaattattattgccaagcctgctggtggacctaagcccaagcaacaaaccaactgggacgaagatccttaaacaggaagatgaaagttaattcatttcagtcgtttggaaggtttgaaataaaaagggatgagaaatatacataaaataattcttcaaattttatatgtatcaagacatttttagataatgtattaaaagacatttaaaagaaagagagttgaaggttttatattgattcattgataagataataaaaagtaaaaaaaaactctattttatattggagatctaaacatcaaactct

SEQ ID NO: 788 - DNA, 1414 bp, Glycine max
  misc_feature (1)..(1): n is a, c, g, or t
  misc_feature (6)..(6): n is a, c, g, or t
  misc_feature (90)..(90): n is a, c, g, or t
  misc_feature (329)..(329): n is a, c, g, or t
  misc_feature (385)..(385): n is a, c, g, or t
  misc_feature (854)..(854): n is a, c, g, or t
  misc_feature (886)..(886): n is a, c, g, or t
  misc_feature (1114)..(1114): n is a, c, g, or t
  misc_feature (1211)..(1211): n is a, c, g, or t
  misc_feature (1244)..(1244): n is a, c, g, or t
  misc_feature (1306)..(1306): n is a, c, g, or t
  misc_feature (1388)..(1388): n is a, c, g, or t
  Peptide Sequence Number=SeqID_9042
  Probeset Number=SeqID_10567
ncgggnaggtgacgatgtgccacttgtatgagaaacgtgagacatgatatgagtagttgtggaacgacgagcgtgtggcgcgtgagtgcncgcgcggactcacacaatgcgtcagtcgaggacaacatcgcgaagacgtacgatgacagaagagatatacacacctatacatttcacgcgcacggtgcatcgcgccgacgtagctcaacacgagaggcgagacgcagcttatgctactatagagtagcatctaggtgactgactcgcgatgatttcatgcgtcgtatcactcatctcatcgttctctcatctcttgatagtattcatcnacagaagctctgacggcagcgctctcatcctacacaccatagatgcgtcacagtanactcgcatatgcgggcgcagcgcggtcgtaacaccgccatgatggcgcgcctcctcgccagctctccagtcggcggcgcgtgcgctcgtcgctactatactcaacgcggcaccgtgcgtgctgcttcttccgcgtaggatgccggggcaggcagatacgaacaaccacaccacagcgatgagctgggaggccagagcgtgtcgacgacacacaatatacagaggtgtgtatgtccacactggggacatccgttgttctcagaatcgctcgacgggtacacaagatttcttgtatcacctacagcgtgacaagacatcatttgtctgtctgtctcttctcgactgagtctagaaccacttagtgggggtggtaggcagacagagcggtgaacaggatcacacactcgccggctcaagtgtacagcagcgaagcgcgaaatacacagcccagcgccgcgccacctacaacncgcgcgcgatatctgcgatgcaacataacatnacgcgatccactcaccacagatacacctctctcacttacatcgccctatcagccgtcgagtaatagctgcgggcagacgccacaaaaccacgaactattcactatcctaagagggagagagatcataagcctgcgccctaccaaccaccacctctgatcggaggagtgagaggcagatccaggaggaccagggtgtggggtcattcagcacctaacttctatcctacncatcaccttcctttcgtcgcactctgagggagcgcgcgctcaaggatatatcccatcctcaatagagaaaacatctcttccgcagcaccctgcgggncacacccacaccacactggcatgaagaaccganagctctatattagaaagggtgggcataggcgctcgcactggggagcgggggcggaagaatanaaaaaaaaatgtctataattgagagtgagcgcgtaaccggctatatataaattgtgacgtgagggtacaagaaaatctccantactcccctacccacgcctacatttc

SEQ ID NO: 789 - DNA, 552 bp, Glycine max
  Probeset Number=SeqID_10568
ctcgtgcctctagggttatcatatctccatttccatttcctctctctcagtttccaagaatcttaagctatgggaaagtcttacccaaccgtgagcgctgattacagaaggccgtgagaggcgaagaagagctcagagctcatcgctgagaagagagcgctcctctatggtccgttggccaagctatggggctaatggaccgagaaaacgtgctctgcttgggggtcacactattggaaggtgggcccccaagggaacgttttggggttcaaggggtccccgggaccccccaaaccccttttattttccaccaccttcacctccagggggtttttgagggggggaaaaaaaaaggcccctttaaaaacccttttgagaaggggaattttttttgggaaccgtggggtgcccccccccttttgggaaaaaaatttctccccgaaaaaaaaagcccccccttccccggaaaaaacccggggggggccccccaaaaaaaatttttttttagggggggggggggggggaggagagacacaacaccacttgttgtgg

SEQ ID NO: 790 - DNA, 566 bp, Glycine max
  misc_feature (464)..(464): n is a, c, g, or t
  misc_feature (468)..(468): n is a, c, g, or t
  Peptide Sequence Number=SeqID_9043
  Probeset Number=SeqID_10569
ccaccatatgtacaacgtaagccccctattcattgaccgtgcccccccctgcgtttactcggtgatcattaacaacatctccatatctaaatccttgctctcacacctactcttaacccatataactcctcctcccccttattgactgtacctgttacaactccaatcaccgccctcctgtcctcacttcactacgtctcaccccttactacctctgcttctcctctccactttggtctccagaacctctctcatctttatagcatcttatcgtcactccaccgggacaacctatctaaactcatttcttcccaccatacgattctctactccgctcgacctataatcttcagcatgcatgatttactctaatctttatacttcttgtacatatgcacatcatacttcgtgatacagattaagtatattattcacggtcccgctaacaacgcctctagcaattncagnacaatacgtctgacttcgccaaccccgctcgcacacgcacggtaactcacataatgcgagcactacaatctgctttgtatacacgcatctcaacatcc

SEQ ID NO: 791 - DNA, 1662 bp, Glycine max
  misc_feature (12)..(12): n is a, c, g, or t
  misc_feature (17)..(17): n is a, c, g, or t
  misc_feature (29)..(31): n is a, c, g, or t
  misc_feature (33)..(33): n is a, c, g, or t
  misc_feature (50)..(51): n is a, c, g, or t
  misc_feature (65)..(67): n is a, c, g, or t
  misc_feature (75)..(75): n is a, c, g, or t
  misc_feature (83)..(83): n is a, c, g, or t
  misc_feature (85)..(86): n is a, c, g, or t
  misc_feature (96)..(97): n is a, c, g, or t
  misc_feature (100)..(100): n is a, c, g, or t
  misc_feature (111)..(111): n is a, c, g, or t
  misc_feature (123)..(123): n is a, c, g, or t
  misc_feature (141)..(141): n is a, c, g, or t
  misc_feature (146)..(146): n is a, c, g, or t
  misc_feature (169)..(169): n is a, c, g, or t
  misc_feature (178)..(178): n is a, c, g, or t
  misc_feature (227)..(227): n is a, c, g, or t
  misc_feature (243)..(243): n is a, c, g, or t
  misc_feature (276)..(276): n is a, c, g, or t
  misc_feature (305)..(306): n is a, c, g, or t
  misc_feature (334)..(334): n is a, c, g, or t
  misc_feature (356)..(356): n is a, c, g, or t
  misc_feature (370)..(370): n is a, c, g, or t
  misc_feature (466)..(466): n is a, c, g, or t
  misc_feature (505)..(505): n is a, c, g, or t
  misc_feature (525)..(525): n is a, c, g, or t
  misc_feature (532)..(532): n is a, c, g, or t
  misc_feature (606)..(606): n is a, c, g, or t
  misc_feature (750)..(750): n is a, c, g, or t
  misc_feature (777)..(777): n is a, c, g, or t
  misc_feature (816)..(816): n is a, c, g, or t
  misc_feature (895)..(895): n is a, c, g, or t
  misc_feature (1004)..(1004): n is a, c, g, or t
  misc_feature (1134)..(1134): n is a, c, g, or t
  misc_feature (1254)..(1254): n is a, c, g, or t
  misc_feature (1662)..(1662): n is a, c, g, or t
  Probeset Number=SeqID_10570
ggggggtatttnctctnctgtggttgttnnncnggcgcggtcttattgcnngcgaggcgcgagcnnnagggaggngagagagnannaaagggagannggnagagcgaccanacacccaccacnacccctccaccgcccccncgaangcagagctgcacaacaccagggncggcacaanacaccacatcgtgtgttatgtttgttcctatatagtgtcgttaacatgntgtgtgtgtggtatgnattgtaaacacttactgtgatatgtataacgtngtaatcttgtgactggttctgcgcgattnnagggctcacaagatgcatagcaaaggcngtacaacgctccctgggcgtcncgacgcgcctcgtncctgccatcatgtcgctgcggcggtgtgtgctgttgtgtatgttgatggtgggtatggttgatggtgatgcgtagcataccacatcacactaatanaaactatcgccgtcaactaatacgtcgtaatacactgcntctgctatacgacataattnttcttcntctacccgttctcttcttttcacatacatctctctggtgggccggtgtgcgcgtggcacgagtggggacactgnggcgcgggtctgagcacgcagctgcgcgaagaggtgcgcccgccggttctagtctcgacgcgcacttccacggctgtcggccatctacacactccctcatgtctatcttaatgaatatgtgtatgctacatcacaagactcacnatccaccgactacataatagcgtcacncacaatctccatcgtctctacagtgctctgactcttgcntctccgagcgtatacgcaagcaccgactagaaactatatttgatctagtttgtactcacaccttcttagtacacgaggntgcaacatctatttattctgttatggttgtgatcatctagtgatgcgtctgggtcgtactcactcgctgacacacaaccgcatccaacactacctcccgacacaagacngagcgcacgcgttgcgggagacaacgcagctgtagagcgtagcgtcggtggtgagcagcaattctcttcctatcctatacaacatccaccgtcggcctctcttacttattgtgtatacgtgcctcacaancgcggtgtcgcgtttcatcataatattgtgtacgggcgctaagtgattctagagtcacatactttgtgtttgtatgttactagcgagcgacttctgtgttcaaacagccagctggccccntcacaggtgggcgcgtgcatcgccgcgtgttagaggagtaaggtggatgagagataatatcggcttgcttagtcgctcgtagtttgcggtggcagcccgccggcatctgcggtggcggacagtgcagtgagcgtgacgcacccgcttgatgtgtgtggtgtactcgccgccacttctattcatcagcccatctagtttcgtcgcgcttctcacccaccgcgccttatcgcgtctctgccgactcatacagccaacaatgtctactgtaatacagccgctgcaactcaatgtgtcttctcctcaccacctcaccctatcgtagtatacaaaacccgctattctatatctgttttgataacactacgccgcccgcaaatactccacctctacatatcatcagtgcaccan

SEQ ID NO: 792 - DNA, 452 bp, Glycine max
  Peptide Sequence Number=SeqID_9044
  Probeset Number=SeqID_10571
atgcttccagtttttccgctttccacattctagtcatgaattatgctctcttttgctttaacttgaaacaattcattactcttccaattcacagataagagattatggactttcaaatattcccacctgcttctcttataaatacaaaatgctttgttcagtttataatgtgcgctcctgaccaccatatgttccttcttaacaaccctaggtggaagtcaaaagctctctctaagtatggtacaaatgacttgttgcagattcataggcatctcattactctttctccaaataagtgttatgtgtgaatctggttcagaaacaatgggttacttgtttttgctttgtagggaagctacacttctttagatctcgatctctttttgtgtttcttataagcaccgagtgtgtctcttcaatgtggaacaattttttgctggtttgctggaaag

SEQ ID NO: 793 - DNA, 556 bp, Glycine max
  Peptide Sequence Number=SeqID_9045
  Probeset Number=SeqID_10572
gccccctcatgctgccgaaggtgaaagagatgcgccccgaggtccccgtgatcatgatcacggcgtatggcgatgccgacaccatccgcagggcgctggagagtggtgcgtcggggctgctcaccaagccgatcgatttcaaggtgttgcgcgaggagattgacaccaggttggcgcaggtggaatagtccggtgccggctgtcaggggtagaccggacctaacttaaaccgggcaaaaccgtcgcgattgacccggagccgacctttgccgttcttgttcagcgctgggtcggctgtttaatcccattcaacgggtggtactgtccgtattcgacccgggtgtcctaagttgatcagccgctgttccaatttgatttttggcacgaactgcataggctttcggccttaatccatgttgatttttggcatgggcagggaactactgtttcgggtagttgctttcgcggccggggcggtcacagtcgccgccgcagcgaccctcttgtttggattttgaaagagtatggccgcctcattcagcccacgctgggtgga

SEQ ID NO: 794 - DNA, 1508 bp, Glycine max
  misc_feature (29)..(29): n is a, c, g, or t
  misc_feature (48)..(48): n is a, c, g, or t
  misc_feature (168)..(168): n is a, c, g, or t
  misc_feature (172)..(172): n is a, c, g, or t
  misc_feature (177)..(177): n is a, c, g, or t
  misc_feature (196)..(196): n is a, c, g, or t
  misc_feature (198)..(198): n is a, c, g, or t
  misc_feature (328)..(328): n is a, c, g, or t
  misc_feature (375)..(376): n is a, c, g, or t
  misc_feature (394)..(394): n is a, c, g, or t
  misc_feature (485)..(485): n is a, c, g, or t
  misc_feature (505)..(505): n is a, c, g, or t
  misc_feature (664)..(664): n is a, c, g, or t
  misc_feature (680)..(680): n is a, c, g, or t
  misc_feature (946)..(946): n is a, c, g, or t
  misc_feature (954)..(954): n is a, c, g, or t
  misc_feature (1129)..(1129): n is a, c, g, or t
  misc_feature (1154)..(1154): n is a, c, g, or t
  misc_feature (1174)..(1174): n is a, c, g, or t
  misc_feature (1222)..(1222): n is a, c, g, or t
  misc_feature (1224)..(1224): n is a, c, g, or t
  misc_feature (1234)..(1234): n is a, c, g, or t
  misc_feature (1239)..(1239): n is a, c, g, or t
  misc_feature (1258)..(1258): n is a, c, g, or t
  misc_feature (1401)..(1401): n is a, c, g, or t
  misc_feature (1484)..(1484): n is a, c, g, or t
  misc_feature (1508)..(1508): n is a, c, g, or t
  Peptide Sequence Number=SeqID_9046
  Probeset Number=SeqID_10573
aagagaaaccacgggaggacacccaaaangcgccaggagacgcacaancgacgcgcgccgggccgccccccgccgtgccgcgaagaggtgcgcgggggagagaggaggggcgagcgctgacggataagaaggaggcgtgcctccccgcgcgacgcggtaggagagcantcanactgngcattctccatacttaccnangagtggcagtgcgtgtgacaccggcgctctctattgacgctgtcattcgcgtgagctgcgcagccgatgagcgcacttgaacatgcggctgtggcgctagccgatcacatacatcgcatcgagatacatngtctgagtaccactgaggcggaccgccacgctgtggataacattagnnaacataattcgcgccganggtgctgcactctgttctgcctttatcattgagtcgtgtgtggcggggtggcgcgcacaccggtcgtgcccgcgcgcggcccgtcgaccgncggtcgtgcgctgctacttncctccacgtagtctcctcgcgctgtatggagtagtgactgacggatatgtgatcgatatcacgatggtattccatcgttagtcgcactttatatatcttatgctcgtacatagtaactaactaactaacatagatcgcatctctcgctgctcgtatatntaactcgctgctctcnctcagacgttgtagatatactcctctctcatcatcactatacatacttctatctctccatactctcgtctcgacgctgcgtccgcgtcgcgcgactaggcacgccagatatgatgtgagaagcgcaaccactcgaagcctctcgtcactaccgtctctctgtgggctcgcattctgcgttgtgtgttatatcgaattagcgtcagatgtgtgtcgttcgttcatactctccactatcgtcagtgtcgtgtctgatgttacatctgngcgtcgcntgcgctatgcgctcacaggcgcatggcgtcgcgcgccctcgcagtagtcgcggcgatatagatacgtaacgtgtcagatactacgattgacacgatgtgcgctgcgtctcgtgtcctgatgctctgtgtctctatcatccttctattacagcgacgctgggcgtggatacacacncatctttcactacacatccgtgcgngaggcgtgcgacgatcgctngccgttatataccctctctctacgcactacacataccagaatgagcgnantcgcatatancacanaacttgagagcattcatanacagcgtgcggtatgccgcgcgtgctgcgacgcgcgcgcgcaatataagaacaatcgtcgatcgtatagtctgtagcctctgccgtctcctctttatatcacttctctttctctctcgacattctcgtgtcacaacgctcggncacccaccgcgactacgcgaccgtctaaacatcgataacaccgacgatatgcgcagagctgaccactcactacacatcgacgnctcctatactacgcacattatcgn

SEQ ID NO: 795 - DNA, 1830 bp, Glycine max
  misc_feature (25)..(25): n is a, c, g, or t
  misc_feature (73)..(73): n is a, c, g, or t
  misc_feature (83)..(83): n is a, c, g, or t
  misc_feature (253)..(253): n is a, c, g, or t
  misc_feature (279)..(279): n is a, c, g, or t
  misc_feature (337)..(337): n is a, c, g, or t
  misc_feature (360)..(360): n is a, c, g, or t
  misc_feature (367)..(367): n is a, c, g, or t
  misc_feature (392)..(392): n is a, c, g, or t
  misc_feature (505)..(505): n is a, c, g, or t
  misc_feature (545)..(545): n is a, c, g, or t
  misc_feature (560)..(560): n is a, c, g, or t
  misc_feature (568)..(568): n is a, c, g, or t
  misc_feature (835)..(835): n is a, c, g, or t
  misc_feature (849)..(849): n is a, c, g, or t
  misc_feature (1182)..(1182): n is a, c, g, or t
  misc_feature (1271)..(1271): n is a, c, g, or t
  misc_feature (1360)..(1360): n is a, c, g, or t
  misc_feature (1420)..(1420): n is a, c, g, or t
  misc_feature (1492)..(1492): n is a, c, g, or t
  misc_feature (1537)..(1537): n is a, c, g, or t
  misc_feature (1543)..(1543): n is a, c, g, or t
  misc_feature (1593)..(1593): n is a, c, g, or t
  misc_feature (1702)..(1702): n is a, c, g, or t
  misc_feature (1708)..(1708): n is a, c, g, or t
  misc_feature (1722)..(1722): n is a, c, g, or t
  misc_feature (1819)..(1819): n is a, c, g, or t
  Probeset Number=SeqID_10574
ctcgtatttatcgcacgcgtgtgtnatgtgtaaagttacgacggatcacgaggatgtatgcgagattcattgngatgacacgncagagacagaccgtcatatgtagattattagttattatcgtccactatcattttgatgtagagacacgatctgccgtcgacatatacgcaccagacacgatgcagcaatctgagcgacataatcgcattcgttatcaacgtatctgtaggtcgacagcacgacgtctcantactgcttcgacgagtattagagatncacagatgacgtatacatacagtatatacaatatagttacacgtctcatagagtgcgngtccatggttagctccagcatancccatantcgcgcgcagctctcgtactcacancatacgtcatattatcaaccattcgtctcagcgtcgcgtatgagtacagaacacgtaatacacaatcaacacatatgctacgatcgatataagcaagtacttcagtccgcatnctactctcgtatcgcgcgcgccgtcatcgattagctgacngcgccgtgcgtcagnatgtatcntctcacacgactagcatcatcgatatcgcgacgggtggagggccgcagagagtgctgcgtatagtcgtacacgtcagctagtatatgtctcagttagtagcagtattctcctgttgtgtcttacagactacgtcgatcatctcgctcgtagacagagtatgtgagtgtgagtaagtcataacgatgctggcggttcatgtaggtgtacgcatatagatctagtgaaatacagtataccgtgaaatgtgcgtcctgcgcgcgaagtcngtgtatatgtgaantgaggatatgtccaacgagacagttattaccgagtgctctagatgacacctatatctcctcagtatgtcgtctgtatctctcgcaatgtaccatgacgatgatgtagcgtgagatcgctgacagcgctctaacaactcacagatagtacatcatagcgagacattggataggagtagaggagcagtacttagagacacaaagtacgactccacttccagcgctacataatatctcgcagtgaccagtacttcatagtcatatgacactacagcaatggcaggagcgtgtcagacactcattatgtacacataccatagacagatagcgcgcantgctgtgcgacgcgataccgtcgtatctacgattcagtcggtgacgtagttaacacgtcactattcaatcgtgcatcataggtgtagcncgctgtcgaagtttgtatgcagctatgtcgttctctccggcttctctctctgttgactattcagctcatatgataccgctgcagatatngatcagaatatgtagagtcacgtgtctgttgtggtcgtggaagacgagatgtagacgtgngatgaggaggagtgagagacggacagcgttacttcgagttcattaatgatacgcgagtcggatacaatggangatgtcgcgcgcgcgatgacgtatacagagagactcagaactatnacatcncgatgtgtgatgttattacatgagtagtgacgcgcacaccagacgtggcngcccttcacacgcaggcgcggtagtgggtgggcgcgagaatacagcggcacgtaccgtacaatacgacatcaactatagcagactgtccgccgcgccgaggggcagggngccctnactctgctgtctcnttattatgatgtcagtctcatatagatctagggatgcggcgcgcgagtacgcgagatagcgaggcgtagtatagagtggagagtgcgacgcagcgcngacgcgcggtt

SEQ ID NO: 796 - DNA, 4108 bp, Glycine max
  misc_feature (1)..(27): n is a, c, g, or t
  misc_feature (4004)..(4108): n is a, c, g, or t
  Peptide Sequence Number=SeqID_9047
  Probeset Number=SeqID_10575
nnnnnnnnnnnnnnnnnnnnnnnnnnntttggatttggattttgctctaaatcacattctttgcttcttttttcttactttcttgttccttcttcagcttggatttttggcgtaacgaggaaggggttattgttgagaaaccctagcctaaacctaaaccatggcgcataggttgctgagagaccacgaggccgacggctgggagcgctcagatttccccatcatctgcgaatcctgcctcggcgacagcccctacgttcgaatgacaaaagcagagtatgacaaggagtgcaagatttgtacacggccattcactgtttttagatggagacctggtcgagatgcaagatataagaaaactgagatctgtcagacatgtagtaagttgaaaaatgtctgtcaagtgtgccttctggatcttgagtatggactaccagttcaagttcgagactcggctcttagtattgattcccatgatgccattccaaagagtgatgttaatagggagtattttgctgaagagcatgaccgtagggctagagctggtatagattatgaatcctcttatggtaaagtacgcccaaatgatactatcctgaagcttcaaaggacaactccatattacaaaagaaaccgagcgcatatttgcagtttctacataaggggtgaatgtactagaggagctgagtgcccttatagacatgagatgccagtaactggggaattgtctcaacaaaatattaaagatcgttattatggggtgaatgatcaagtggctttgaagctacttggcaaggcaggagagatgtccactctggagcctcactaaggatgagagcattaaaactccttatgttggaggacttgatggtaggggcactgagcaggcatctggagaacacttcaacaatcgtgacaataaggtcttaatgataaagcttatgtggggcaggcctcagtcatcgaaacctgagtcagatggctctgatcaagcaaggcagcagacttctgtggctcatagtggattgttgcctcgggcgagtgttatcacagtagcaggaccaggaccaaacacaaggaatggtttactataacaatccaaccaggaccaccacctcttcagcagctaagaagcgattgtcccatcaatggatcctcacagaatgggtgctcttattgcatctcaagaatgctcctccatgtgggtcttctgggtcatgagacaaaaagaagcgtctggccatccatggatccccgaagaataggcgctcttgtttcatcccaagatgctgctggttggccttctgcgtaataggatatcgaccccggtatggagaagcagcaaacgcaacaatatgcccatacaatgatgcctccttcacctggttccacccctcactccaaacgacaatattgttaaacggcatcacctccgcctaatcatcagtccccacgacctccatacaatggtatatgggatccatcccagccaattgcagcagcaccatcccagccactagatgcaaatcatccttatctatttacgttgttgcctgaatcttcataatctggatcttcacaggctgcatctgcctcagtataattactaactccaatatcaggatcataaattccattaggttgctcacgtagttatgtttcaagttgtttttaaacattttttaaagtcttttccaagactggacgagaggcgggacatcctctttttatttttttattctgaggagggcttaatgcccaggaaaactgaacacaaatcgtacgggacatagggagccccataatgtccttaaccaagagcatatcacacccaggaggcggtgagctcttaacatgcaggtcaatatcttcatgaaaggtgacacatctgaatcaccctggattagtttttggcttgaagccataggttttgatagtagtcatgtaggtggttttgggggtgctcctcggatctctccactgtctgctgactctggtgagtcttataactccttctgacctttcaagcttagagttggagcttacattccttttgggtacagaaggacgtttcggctcatgtccagtagatttttcatctgcatcaaccgctttgtaatggttgtcaataagactcgtctcggactgcggccacggcacctccttccccgtattatgtggaccccgccccgtcacaagtagcagcagtggcaccctccatcccctcaaatgcagacccccccacctggccttctctgcctgcagcatccacactacgctgttgtgtcaccgcctccccctcctcctgcaaatcctccacctccaccttctcctgcaccggaccattcacagccgccagctttctcttcccattctcacccttccctatatctgctctcctcccttccaccatcagctgccggaggcgtctccgcctatctaatcacccaaattgtcatttttctctattctccaaagcgattttcctcgccccgacccttcttccagggatgcttttattacagttgctgcctgttcaccatcaccgggcccttcgcaccgataacattttctcattcacgagttatatttcgagttcttgttaacttttggccgaacgcattctgtagcgcacaggggattgttccctcgggctgtgggatcgccccaccaagagctcccccccaacctggggattacgctcctctggcgaacccccatctgcgccgcaccccagacgccgctacccgtctctggtgcctctgagcatgcgtgcccccacgcgtccggtagcatgttccctgaagttgctgcgggcagggttatagcaggcacaaaagtcaggtccacgcctagtaaattcgctccaaaacatatcctcagggatccatgaaggaaagactctgaatcaccttagcgacccatgagatatgttgaccctgtctacataaggggagaagacaacacaatagctgaatgcccttagagacaatacttggcacgttgtgccggattgtgtcaataaactattaaagatctgtactattggatgcatgatacagcggtttcgaagcgacttgctcagctataacatatacaacctctgtaggcgctgaaagatcagcggaataacacgctttatggctgcggacttgatgctagggtcactgagccggattcgggtgcgagacttggatccccatatagaaatcgactctatcataccacaacttggagttactttggcgtattctacctaaacacctggagcatctgcatctatctggttcgttctacgactcgcctttttgtttataacacacacaaccatagatcgtgaagccctcaaagcacaacaacccatcaccaaacgggttgtgaacgacctcagtctgctgcttccggagggctgcagttaccacatcagctgcgaaccctgcttcggcggcggccccggtgtccgcggaaccatagcagcctactactacaacttgctgctttctgctccggcttgcactgtttttggaaccaaacggggttgttggattgggatccctgaaccccgacccatccccggcgcctagttcgatttgagacctccctgtccagcgtgccttctgcatcaatcacccgagcttctttggttgggttctcgtcaaatccgtacccaacggaagttttggatttggattgttgtgctctaaaccataatctctgcttcttctactttcttgttccttcttcggcttggattttttgtgaaacaaaaaagggttattgttgagaaaccctaaacctatcctaaaccatggcgcataggttgctgagagaccacgaagcagacggttgggagcgctccgatttccccatcatctgcgaatcctgcctcggctcaattccaaagatagctcctacgttcgaatgacaaaagcagagtatgacaaggagtgcaagatttgtacacgtccattcactgtttttagatggagaccttgtcgagatgnnnnnnnnnnnnnnnnnnnnnnnnnnnnnnnnnnnnnnnnnnnnnnnnnnnnnnnnnnnnnnnnnnnnnnnnnnnnnnnnnnnnnnnnnnnnnnnnnnnnnnnnn

SEQ ID NO: 797 - DNA, 505 bp, Glycine max
  Peptide Sequence Number=SeqID_9048
  Probeset Number=SeqID_10576
accaatccatcctataacctcatatctgctcttacacagaagttatcatcctcgaccaaatggccactgctagcaaggtcgctgtcatggcggccgccctgtgcgcgctgctcgtcctggccacggcggggcagagggaggcctgctatagcacatgcaggcaggaaggcgatggctgcgacagcgagtgcgctgccaggccgtggcgtttctgcgccgaggaatgcaaggctcaaaggcagagctgcgaggactggtgctcccagcagcgtttccccgatgtgcaggccgctcgctaaaccgacgagctagctgagctgccatgtctcccagaaggccagacccacaaacgagccttcctttgcttgttgtaccagactgctccgtactggttttgtggtttgttggcgagtttaacgtgcgtgatgatgtggtgttgatcggttgtaatgttgtacggggctagtaacaatgttgtgtgagtaataaaaacaatactatactg

SEQ ID NO: 798 - DNA, 1403 bp, Glycine max
  misc_feature (18)..(19): n is a, c, g, or t
  misc_feature (194)..(194): n is a, c, g, or t
  misc_feature (371)..(371): n is a, c, g, or t
  misc_feature (434)..(434): n is a, c, g, or t
  misc_feature (800)..(800): n is a, c, g, or t
  misc_feature (831)..(831): n is a, c, g, or t
  misc_feature (980)..(980): n is a, c, g, or t
  misc_feature (1015)..(1015): n is a, c, g, or t
  misc_feature (1093)..(1093): n is a, c, g, or t
  misc_feature (1179)..(1179): n is a, c, g, or t
  misc_feature (1339)..(1339): n is a, c, g, or t
  misc_feature (1352)..(1352): n is a, c, g, or t
  misc_feature (1403)..(1403): n is a, c, g, or t
  Probeset Number=SeqID_10577
ggaatttatctgctcaannaccaataacatcacatttaaatttataataagaatacagaacaacataaaaaaaagataatataaaatatataatattaaaagagtgtattttatttaagaatacccaccacacatcaaaaaaggaagaagaaatattatatgtaattattattttaatattatatttaattatnatatttatatattatattttttatggtttaatttatatataattatactatattgttgttataaaagcatattgtatttattatattaataatattataaatatagtggtgactttcatatacactgtatattatatttattaatctataaaataaaacgaataaaaaaaataatangtagattactgtatgtagttcataataaaatataaaaaattacctaattcaaaaaacaataancaataataacactgaaataaaaataaagaagaaagaaataaaaattatgtatacttcttgtatataggtgtgtgtagagtatgaatgataacaactattttttatagacttgataatataaaaatatatatacatataaataaataatagaatatataaaataatatattagaatagatcaaaaagatataaataacatcacacgaaaatgaatgtagatgatacatattatatacatcgaattcaatatcttataatataatgatatataatataagacacacttgatattaaatatatataattaatgataaatatgagcgacataataggactaatccaatagaagaataaaagatgtaccantatatgaacagatatatatatagcatacagngcgcgtgtcaatgatactataaaggataggagtagatgtgcgaaatatagatacagtcaatttataatgtctagacttctatacactactcacacactaatattatattgtctaatcataggacacgctctatagtatgccctcagcantctgaatcttcatgttttcaggatataatacttantctcttctcactcccaggcccacatacatacagatgcacagagacgagaataatcataatccatacagacaattgaantataacactatatatagcatgtcagtatactaatgcacaacacccatctctctctacagacacatgatatatgaatcagagcactngaattaatgtcaatatagtgagattataaacatatctgaatacattatatacacaatctacatataatgacttgacatattatatataataatatatctatgatactgatatcataacgagaacatacaagtatatcttactaaagaacaatagaacacngaacactacatcnatcacatctattgcattatatgatcatactactacaccagcatgtatactn

SEQ ID NO: 799 - DNA, 2561 bp, Glycine max
  misc_feature (13)..(14): n is a, c, g, or t
  misc_feature (18)..(18): n is a, c, g, or t
  misc_feature (20)..(26): n is a, c, g, or t
  misc_feature (33)..(33): n is a, c, g, or t
  misc_feature (37)..(37): n is a, c, g, or t
  misc_feature (43)..(44): n is a, c, g, or t
  misc_feature (81)..(81): n is a, c, g, or t
  misc_feature (91)..(91): n is a, c, g, or t
  misc_feature (99)..(99): n is a, c, g, or t
  misc_feature (102)..(102): n is a, c, g, or t
  misc_feature (104)..(104): n is a, c, g, or t
  misc_feature (115)..(115): n is a, c, g, or t
  misc_feature (120)..(120): n is a, c, g, or t
  misc_feature (122)..(123): n is a, c, g, or t
  misc_feature (125)..(125): n is a, c, g, or t
  misc_feature (128)..(129): n is a, c, g, or t
  misc_feature (131)..(131): n is a, c, g, or t
  misc_feature (142)..(142): n is a, c, g, or t
  misc_feature (151)..(151): n is a, c, g, or t
  misc_feature (153)..(153): n is a, c, g, or t
  misc_feature (156)..(156): n is a, c, g, or t
  misc_feature (173)..(173): n is a, c, g, or t
  misc_feature (268)..(268): n is a, c, g, or t
  misc_feature (316)..(316): n is a, c, g, or t
  misc_feature (351)..(351): n is a, c, g, or t
  misc_feature (353)..(353): n is a, c, g, or t
  misc_feature (358)..(358): n is a, c, g, or t
  misc_feature (363)..(363): n is a, c, g, or t
  misc_feature (365)..(365): n is a, c, g, or t
  misc_feature (623)..(623): n is a, c, g, or t
  misc_feature (626)..(626): n is a, c, g, or t
  misc_feature (663)..(663): n is a, c, g, or t
  misc_feature (675)..(675): n is a, c, g, or t
  misc_feature (680)..(680): n is a, c, g, or t
  misc_feature (707)..(707): n is a, c, g, or t
  misc_feature (733)..(733): n is a, c, g, or t
  misc_feature (741)..(741): n is a, c, g, or t
  misc_feature (747)..(747): n is a, c, g, or t
  misc_feature (762)..(762): n is a, c, g, or t
  misc_feature (877)..(877): n is a, c, g, or t
  misc_feature (881)..(881): n is a, c, g, or t
  misc_feature (964)..(964): n is a, c, g, or t
  misc_feature (974)..(974): n is a, c, g, or t
  misc_feature (1098)..(1098): n is a, c, g, or t
  misc_feature (1199)..(1199): n is a, c, g, or t
  misc_feature (1319)..(1319): n is a, c, g, or t
  misc_feature (1376)..(1376): n is a, c, g, or t
  misc_feature (1420)..(1420): n is a, c, g, or t
  misc_feature (1478)..(1478): n is a, c, g, or t
  misc_feature (1520)..(1520): n is a, c, g, or t
  misc_feature (1544)..(1544): n is a, c, g, or t
  misc_feature (1549)..(1549): n is a, c, g, or t
  misc_feature (1551)..(1551): n is a, c, g, or t
  misc_feature (1572)..(1572): n is a, c, g, or t
  misc_feature (1576)..(1576): n is a, c, g, or t
  misc_feature (1583)..(1583): n is a, c, g, or t
  misc_feature (1602)..(1602): n is a, c, g, or t
  misc_feature (1629)..(1629): n is a, c, g, or t
  misc_feature (1638)..(1638): n is a, c, g, or t
  misc_feature (1654)..(1654): n is a, c, g, or t
  misc_feature (1698)..(1698): n is a, c, g, or t
  misc_feature (1712)..(1712): n is a, c, g, or t
  misc_feature (1728)..(1728): n is a, c, g, or t
  misc_feature (1775)..(1775): n is a, c, g, or t
  misc_feature (1837)..(1837): n is a, c, g, or t
  misc_feature (1861)..(1861): n is a, c, g, or t
  misc_feature (1898)..(1898): n is a, c, g, or t
  misc_feature (1912)..(1912): n is a, c, g, or t
  misc_feature (1918)..(1918): n is a, c, g, or t
  misc_feature (1923)..(1923): n is a, c, g, or t
  misc_feature (1933)..(1933): n is a, c, g, or t
  misc_feature (1954)..(1954): n is a, c, g, or t
  misc_feature (1965)..(1965): n is a, c, g, or t
  misc_feature (1972)..(1972): n is a, c, g, or t
  misc_feature (1978)..(1978): n is a, c, g, or t
  misc_feature (2024)..(2024): n is a, c, g, or t
  misc_feature (2037)..(2037): n is a, c, g, or t
  misc_feature (2044)..(2045): n is a, c, g, or t
  misc_feature (2090)..(2090): n is a, c, g, or t
  misc_feature (2101)..(2101): n is a, c, g, or t
  misc_feature (2170)..(2171): n is a, c, g, or t
  misc_feature (2183)..(2183): n is a, c, g, or t
  misc_feature (2211)..(2211): n is a, c, g, or t
  misc_feature (2215)..(2215): n is a, c, g, or t
  misc_feature (2218)..(2218): n is a, c, g, or t
  misc_feature (2221)..(2221): n is a, c, g, or t
  misc_feature (2230)..(2230): n is a, c, g, or t
  misc_feature (2238)..(2238): n is a, c, g, or t
  misc_feature (2249)..(2249): n is a, c, g, or t
  misc_feature (2261)..(2261): n is a, c, g, or t
  misc_feature (2275)..(2275): n is a, c, g, or t
  misc_feature (2289)..(2289): n is a, c, g, or t
  misc_feature (2309)..(2309): n is a, c, g, or t
  misc_feature (2316)..(2316): n is a, c, g, or t
  misc_feature (2319)..(2319): n is a, c, g, or t
  misc_feature (2322)..(2322): n is a, c, g, or t
  misc_feature (2367)..(2367): n is a, c, g, or t
  misc_feature (2373)..(2373): n is a, c, g, or t
  misc_feature (2381)..(2381): n is a, c, g, or t
  misc_feature (2391)..(2391): n is a, c, g, or t
  misc_feature (2431)..(2431): n is a, c, g, or t
  misc_feature (2441)..(2441): n is a, c, g, or t
  misc_feature (2446)..(2446): n is a, c, g, or t
  misc_feature (2474)..(2475): n is a, c, g, or t
  misc_feature (2478)..(2478): n is a, c, g, or t
  misc_feature (2486)..(2487): n is a, c, g, or t
  misc_feature (2489)..(2490): n is a, c, g, or t
  misc_feature (2531)..(2531): n is a, c, g, or t
  misc_feature (2546)..(2546): n is a, c, g, or t
  misc_feature (2553)..(2553): n is a, c, g, or t
  misc_feature (2561)..(2561): n is a, c, g, or t
  Peptide Sequence Number=SeqID_9049
  Probeset Number=SeqID_10578
tgcttttctattnntttntnnnnnnntttattntatnttaatnntatttttattatagatgtatgtgttatgtattttttntatttcttcnctgctttntcntntttctctctcntgctntnntnttnntnctcttgtattnatatgtctnancgngaagcggcatgaggagnagctggcgcactgagagttgaggagtggtgtgatatagttgtctcttcactctataaacaaggcgcatatacgacgagtagctagtacgccacgncggcagctggcgcgagcccgcatcgcactctgtgacgactctgtctcnccattcacgctcgtctcgcccactacgtattctgngncatanattantncgacttgggaccgccacgtagagtcgtcgatcacccgtgcactctgtagagctctctatgcgtctccatctagacctcacgctcgagtacgtactgtcatctctgatgagttgacacgcgatcgcgtacttcgctcgcgtcgctcttgcgcactccatgaccgacgcgtgctgcagtatatcatatcgttcttatattctcttcgtctattatcactcatagttctgtactgttgtctatattatcgcgtcatagcanctnagcgcgctctctcgcgcgacacgtctgcgctagctgnaccagagacccnaatanataatgtgtatgctcatcgccgcgganagacggaacacaccgagcggacgcgnagatctcngcgaancgcagaccgcatggncggacaatgtatcggcgcgagctcgtatccgaatgacagcacgtcgatcaacacgtgatagtacgcactctatcacacgactactcatgaacatgacggacgcagcgtcgtgacncgcngtcgatggcacgatgccgtaacgacgacatctgtgtcagcgcacgtcgataagcgtaccatgcatagcactactcacacgtcngatgtatagngcatatcgctcaacgtatgatgagtcgactgggctgtcgtactgactgtgtgcactgatgaccctagcttatactcttgactatagtctctgactacgcgggtgtgtgcacacgcgacagacanacgtcaatatcgatgctctcatcgactacgcataccaccactgtcataatataacgtactctctagcatcatcatacatgtgcacgcatacactgatactnaatctctctcggactactcttgtggacgcagctcgtctgctgacgtattcgtgaccgcgatgccacgctctgatgcgcgctacacacagctctcgctacttcattccagccgatgatagncactgtagcgatatgagtatccactacaagatcgatctctcatttgtcacatctcanctactctcctcgaatcactgtcaactgatgctgacgatcctgtncatgatatcgcgtcgaccgtcacgctcgcgctacgctgcgctagtggtctcgacgcantgctatgatgactagacgaagatcactagtatgcacagcgcngccgacgtacgacgtctcgcatcnaacantncatcgatgctgcgagcgcccnagcntgcgctnctatcgaagactcgtatanatacgtctgagtactatcgatcatttnagtagtctncatgtcagagtagctnaggtcacgctacgcaggttcgttcacgccgtgaatgtcgtgctngagtcgtacttganctcagtcgtcagtgcnatcatgcgtccgtcgttactgttgcatgacgatcagcacgacgaccngtagtgcgatcactgctatcgctgatcatctgactatgtgcgcgtctagggtcagtgtgcgntcgtcaacgtcgcatgaactacgngatgtcgtctcgatgctgactgatgattgatgatgantgatgactgagagnagtagncgtgntctgcggtcngtatccacatctgtcatctantcacgtcgtantgctgtncgtacnatcattcatcgattttcgtcgctcacttcactctgtcatcttcacntcagcactatgantcgcggnnacactgcgatgacgaatggatatagtaatttgatgctagatatgntagtcccgcancacatgtccatctcgtcaattcattcatcgctgctgctaatgcatcactgcgattgtagagcaatcagnntatcgtgctgcnctaatacttgcggtgatgtctttgtgantacngcntgnacgatgacntggcggcnggtcgcggatnggctgagtcganctcgtgatcgtgancgattggcgatcgncgatgtgagctgcagcctgntgaagcntangangtgataactatgaaaataaatcgatggtacgaccgcacgacgtcntgttgngacgggtncgcttaatantactggacctcaatcgtttgtccgtttgtggactagtgcnagtcatggcntgtancgaatgtcgggcagtagctgatcgacgnntancggttgcnngnntactatagagtaggacgtcatgtagagtcttgagcacgggncagcagtgatcgcgnagtcgtncgtcatgn

SEQ ID NO: 800 - DNA, 738 bp, Glycine max
  misc_feature (3)..(3): n is a, c, g, or t
  misc_feature (10)..(11): n is a, c, g, or t
  misc_feature (17)..(17): n is a, c, g, or t
  misc_feature (19)..(19): n is a, c, g, or t
  misc_feature (22)..(22): n is a, c, g, or t
  misc_feature (324)..(324): n is a, c, g, or t
  misc_feature (336)..(336): n is a, c, g, or t
  misc_feature (377)..(377): n is a, c, g, or t
  misc_feature (394)..(394): n is a, c, g, or t
  misc_feature (409)..(409): n is a, c, g, or t
  misc_feature (413)..(414): n is a, c, g, or t
  misc_feature (425)..(425): n is a, c, g, or t
  misc_feature (432)..(432): n is a, c, g, or t
  misc_feature (436)..(436): n is a, c, g, or t
  misc_feature (438)..(438): n is a, c, g, or t
  misc_feature (448)..(448): n is a, c, g, or t
  misc_feature (457)..(457): n is a, c, g, or t
  misc_feature (470)..(470): n is a, c, g, or t
  misc_feature (476)..(476): n is a, c, g, or t
  misc_feature (479)..(479): n is a, c, g, or t
  misc_feature (484)..(484): n is a, c, g, or t
  misc_feature (486)..(486): n is a, c, g, or t
  misc_feature (491)..(491): n is a, c, g, or t
  misc_feature (499)..(499): n is a, c, g, or t
  misc_feature (503)..(503): n is a, c, g, or t
  misc_feature (507)..(508): n is a, c, g, or t
  misc_feature (511)..(511): n is a, c, g, or t
  misc_feature (521)..(521): n is a, c, g, or t
  misc_feature (524)..(524): n is a, c, g, or t
  misc_feature (527)..(527): n is a, c, g, or t
  misc_feature (532)..(532): n is a, c, g, or t
  misc_feature (534)..(534): n is a, c, g, or t
  misc_feature (536)..(536): n is a, c, g, or t
  misc_feature (538)..(538): n is a, c, g, or t
  misc_feature (541)..(541): n is a, c, g, or t
  misc_feature (551)..(552): n is a, c, g, or t
  misc_feature (556)..(556): n is a, c, g, or t
  misc_feature (570)..(570): n is a, c, g, or t
  misc_feature (572)..(572): n is a, c, g, or t
  misc_feature (574)..(575): n is a, c, g, or t
  misc_feature (579)..(579): n is a, c, g, or t
  misc_feature (581)..(581): n is a, c, g, or t
  misc_feature (583)..(583): n is a, c, g, or t
  misc_feature (589)..(589): n is a, c, g, or t
  misc_feature (592)..(592): n is a, c, g, or t
  misc_feature (594)..(594): n is a, c, g, or t
  misc_feature (596)..(598): n is a, c, g, or t
  misc_feature (600)..(738): n is a, c, g, or t
  Probeset Number=SeqID_10579
ttnaaatatnnatcgcngnttntgaaacgattgggtaccgggccccccctcgagtcagctcgtaggccccccccccctaagcatactctagtactataatgagcgtaaatcatacatttaaatatattgagcatagacagcctactttcacgatgaagggacacctcgttgggtatgacaagaacgaagaccgctatagccatcccgcatgttttgagtgtcaacgctcagctcatgggctgcttccatcaatataagggagaagcgcgagcaaagatgtcagaaaaccgaggaagttcgcgcacggtacctctgttaaaaggnttggaggctganggttatacgacgtcttacttgttggaggtgcttggaaccgnatgggctttcgctaacnagcttagacgcttcntggnnttgtttttganctgtganggcnanggaagctaancattatccnatagcaccatcgnaacaangtncccgntntttanagatttcnattncggnnttngaagggtccnaantgntgttntngntngcnattattaagnntctntggtcgctgatctncntnnttanancncactgnggntntnnnannnnnnnnnnnnnnnnnnnnnnnnnnnnnnnnnnnnnnnnnnnnnnnnnnnnnnnnnnnnnnnnnnnnnnnnnnnnnnnnnnnnnnnnnnnnnnnnnnnnnnnnnnnnnnnnnnnnnnnnnnnnnnnnnnnnnnnnnnn

SEQ ID NO: 801 - DNA, 1439 bp, Glycine max
  misc_feature (1)..(11): n is a, c, g, or t
  misc_feature (16)..(35): n is a, c, g, or t
  misc_feature (53)..(56): n is a, c, g, or t
  misc_feature (59)..(59): n is a, c, g, or t
  misc_feature (62)..(64): n is a, c, g, or t
  misc_feature (71)..(75): n is a, c, g, or t
  misc_feature (77)..(77): n is a, c, g, or t
  misc_feature (80)..(80): n is a, c, g, or t
  misc_feature (83)..(83): n is a, c, g, or t
  misc_feature (85)..(87): n is a, c, g, or t
  misc_feature (103)..(103): n is a, c, g, or t
  misc_feature (109)..(109): n is a, c, g, or t
  misc_feature (118)..(119): n is a, c, g, or t
  misc_feature (121)..(122): n is a, c, g, or t
  misc_feature (132)..(132): n is a, c, g, or t
  misc_feature (151)..(151): n is a, c, g, or t
  misc_feature (155)..(155): n is a, c, g, or t
  misc_feature (163)..(164): n is a, c, g, or t
  misc_feature (166)..(166): n is a, c, g, or t
  misc_feature (168)..(168): n is a, c, g, or t
  misc_feature (174)..(175): n is a, c, g, or t
  misc_feature (182)..(182): n is a, c, g, or t
  misc_feature (186)..(186): n is a, c, g, or t
  misc_feature (189)..(189): n is a, c, g, or t
  misc_feature (195)..(195): n is a, c, g, or t
  misc_feature (197)..(197): n is a, c, g, or t
  misc_feature (206)..(208): n is a, c, g, or t
  misc_feature (215)..(217): n is a, c, g, or t
  misc_feature (849)..(849): n is a, c, g, or t
  misc_feature (1107)..(1107): n is a, c, g, or t
  misc_feature (1122)..(1122): n is a, c, g, or t
  misc_feature (1148)..(1148): n is a, c, g, or t
  misc_feature (1188)..(1188): n is a, c, g, or t
  misc_feature (1228)..(1228): n is a, c, g, or t
  misc_feature (1375)..(1375): n is a, c, g, or t
  misc_feature (1422)..(1422): n is a, c, g, or t
  misc_feature (1428)..(1428): n is a, c, g, or t
  Peptide Sequence Number=SeqID_9050
  Probeset Number=SeqID_10580
nnnnnnnnnnnttttnnnnnnnnnnnnnnnnnnnntttgttcttttggttggnnnnaanttnnntgggttnnnnntnatnttnannnaatttatgaattttanggtgtntttgtttgnnannttgggtattntggggggtaagtatatganagtncgtttttnntngnagatanntaggggngtgnttnatgctngnggtattaannnattgtgnnnggatggtctaagtagaagacatcaagagtttatagcatgtgactgtaatagtcatcgttagaagtagtgtatatattaacgagtatggcattctgtctaccgatggtagacgagctagatctatcatctatccagtaatgtctctagcgagacagcatgccgatcagttatacagtcgcctacccgtcacagatatattgcttgtagagagagagtgtagagtatttgggtgactgaaaagaagtagtattgtaaactgtcctcgcgtacaaataagacacaagcctacggggggtgtgcgaagatcccgcttcttcctccccacctaccacacatctatttaattagtgtgtggagataacagagtagtacactctcccgtctactcttatatcttcgtattatgaagagtatagatatatgcatttatgagtgagggtggtgtgggagaatagaatattaatattctcatcttcgccgctctaccacgcggtgagtggggtgtgtggcactctcttgcgttgtggccgtagccggtgatgcgagtgcaacaagaaaaacacgacatccctcccaccggcatgccagggaccgcgacagctggtgaagagacgacacgagtgcactagtgnactcgcagactgttaagctatagtatgctaattgtggtctctgcgtactgagtagtgaccgagacggcgtcacaagcatgtaatagtagatgaagagacaagagaagagaacgcagcacgctagctaactgttactaccgagctctcacaccaagccctgccacctcatatgtattaggtttctatgtgttaacagagatacattaaactagtccgatggtgtggaataaacaaacaacacataaactcactgctagncgacctctcgcgcgncggactcgcagcaaatcgtctctgtnacacgttctcgcctattccgcccctcctccgagacgccantgacattgtatgatttcactctcgacgcctgcgcattctnacctgtctcacatatattaaatcaattgagaacactcgcatatatcactcgtgttctgtctgctctcgacactcattttgatcacagctatagcatatgaaactcaagactacgaggacttagctatgacgagacagagcgtaacancgcgctcgctgcgcacgcacgacatccccattcacatcactatcctnagtacncacactctcga

SEQ ID NO: 802 - DNA, 2147 bp, Glycine max
  misc_feature (46)..(46): n is a, c, g, or t
  misc_feature (75)..(75): n is a, c, g, or t
  misc_feature (89)..(89): n is a, c, g, or t
  misc_feature (97)..(97): n is a, c, g, or t
  misc_feature (127)..(127): n is a, c, g, or t
  misc_feature (132)..(132): n is a, c, g, or t
  misc_feature (205)..(205): n is a, c, g, or t
  misc_feature (315)..(315): n is a, c, g, or t
  misc_feature (319)..(319): n is a, c, g, or t
  misc_feature (329)..(329): n is a, c, g, or t
  misc_feature (339)..(339): n is a, c, g, or t
  misc_feature (360)..(360): n is a, c, g, or t
  misc_feature (485)..(485): n is a, c, g, or t
  misc_feature (504)..(504): n is a, c, g, or t
  misc_feature (599)..(599): n is a, c, g, or t
  misc_feature (613)..(613): n is a, c, g, or t
  misc_feature (640)..(640): n is a, c, g, or t
  misc_feature (727)..(727): n is a, c, g, or t
  misc_feature (729)..(729): n is a, c, g, or t
  misc_feature (877)..(877): n is a, c, g, or t
  misc_feature (1084)..(1084): n is a, c, g, or t
  misc_feature (1260)..(1260): n is a, c, g, or t
  misc_feature (1311)..(1311): n is a, c, g, or t
  misc_feature (1395)..(1395): n is a, c, g, or t
  misc_feature (1568)..(1568): n is a, c, g, or t
  misc_feature (1605)..(1605): n is a, c, g, or t
  misc_feature (1623)..(1623): n is a, c, g, or t
  misc_feature (1639)..(1639): n is a, c, g, or t
  misc_feature (1702)..(1702): n is a, c, g, or t
  misc_feature (1714)..(1714): n is a, c, g, or t
  misc_feature (1723)..(1723): n is a, c, g, or t
  misc_feature (1727)..(1727): n is a, c, g, or t
  misc_feature (1792)..(1792): n is a, c, g, or t
  misc_feature (1811)..(1811): n is a, c, g, or t
  misc_feature (1821)..(1821): n is a, c, g, or t
  misc_feature (1837)..(1837): n is a, c, g, or t
  misc_feature (1861)..(1861): n is a, c, g, or t
  misc_feature (1900)..(1900): n is a, c, g, or t
  misc_feature (1913)..(1913): n is a, c, g, or t
  misc_feature (1951)..(1951): n is a, c, g, or t
  misc_feature (1962)..(1962): n is a, c, g, or t
  misc_feature (1974)..(1974): n is a, c, g, or t
  misc_feature (1979)..(1979): n is a, c, g, or t
  misc_feature (2045)..(2045): n is a, c, g, or t
  misc_feature (2048)..(2048): n is a, c, g, or t
  misc_feature (2106)..(2126): n is a, c, g, or t
  misc_feature (2128)..(2131): n is a, c, g, or t
  misc_feature (2139)..(2139): n is a, c, g, or t
  Probeset Number=SeqID_10581
ccgacggaggcaatactaattaatgactataagactaatctaccanatcgcgtgaagcggtatttgatatatgangtcagtttgccggntaccagcntcaacacagagcgcgtcgcaggatatggangaggncagcggccgggccatcgcgcctccaccccgcggctaccgcacacggcttcctaacatccccggctactcaccncgcaccacccgaactccgcaggcgcgcgcagcagacgaacgccgcgccgcactcgacgcgtcgtcgagtcgctgcgatgacacttgagagtagtggtgtcgttgcgacgntgantttggcgcangatcttcccnctgtctgtctctgatgctcgncgtgacgtgtcgttgctgtccctggtttgtgcatcgtgcagagttgctatgacatccagtaatagaccgtgaggtatagatgatagcttcgggcaggcagcatgcgtgtagatggcagtacgcantctagcagcactcgttatnaatttctcgacgtttacatatgagactatatactcaactttcatatgatcatgttgtcagcgtcgctcctgtctgtacgcgctagtgtgtgagtnctagaaagaatcantatgtagcgaacacgctcgtctcgtcnttcattgctgatcgcagcgtgtcttctcactctctgtcttgctgtatatagtatgatgcgtaaatattcctcatagtgttattgtanantgtgtctgcgtatcgtgtcctacgtcgtcgcgcggctgttcactctgcgcgtcgtggcggtcgatgtgagtcgagcgcgcgagatacgagttataatgtcatattaataagcactacaccaatctacgcacgcggtttatatgttctnagatgtcgtaggcacgttttttgctactttatgcgcgatgtggcgcgacacgcagctgaatatgcgagagacaatcgatgtggcataggatatattatatcaacctcgcacaccgatgcacacacgaagatgagatccgtaggcagtccattcttagtagtacgcactatattcttctgtatgcatgttagcgcttgcactatatancgtaccacacccgcggggggtgtgagcacaactcactggccactctcactaacttccacgcagccacacttatacccgcagcatccctcccgccttctctgtcctagctgctgcactatgttgtcactaatctcctaattactattataagtttcatgatatagtcgttctttctnttgagtttgtgagatccgtttgctccttcgcggtcgggggcgcgcccgcgngcggacaaggagaccatatatattataaagaatatagaatggatctctcaattacggagcgttatatgttagacttctcgctcnatagcgtggtgtgggaggggccgcgcatgggttgcttgatggtgtgttgtgctcggttcatgttttctagcatgtctattccgacagatatgagtgttacctggtcaggctctgtgcttcctcatccccgcgagctcactcccctcgtcctcgacgtggtaggtgctgttggnggggcggctgtctaggcgagctgcggtgccgtgcgtnttctcaccgccagcgcgncacacaccgcaggcanctagtcacacatcgcacactcgcagagagacgcgactcttagttcgctctgtctactcctcgnttcgtctgtcanagtgagaanattnattgtttaatagaggtgtcggagtgtgttctcctcgacaagttcgctatagatggtccgcacgantatgtgtcgtttgtggcgntgcgtgtggngactaatataattatncacgctcctctcccactcgatgancaatcacaactatcaggggaaggataagtatattgtatnctctctacccccncctagtctgagaccctccttctacctaccacatcttangcagtgagtgntagtgactctanacttntgcctcgcaccgcgttgttctctcgcggcctcggcttcctccgtcttcgccacgctctctctcctncgntagttatatcgcagtttcccacctcacccgccttcactccctagcgcccccccgccannnnnnnnnnnnnnnnnnnnncnnnngggggaanaggcgccc

SEQ ID NO: 803 - DNA, 1440 bp, Glycine max
  misc_feature (11)..(11): n is a, c, g, or t
  misc_feature (26)..(26): n is a, c, g, or t
  misc_feature (322)..(322): n is a, c, g, or t
  misc_feature (327)..(327): n is a, c, g, or t
  misc_feature (1061)..(1061): n is a, c, g, or t
  misc_feature (1332)..(1332): n is a, c, g, or t
  Peptide Sequence Number=SeqID_9051
  Probeset Number=SeqID_10582
gtgtgagcctncgctagttggatggnttcttagctccaactactttaagtcttatacatataagtaggacactattagacaacaacgcacaaaccgttcgaccggtggccacaatctgcggcactctcattcgagcgccctggccttcgtcatgatcacaagtaccgggcaggaggctctaacaatgagacagagcttctgcggtgtgcgcgcgcgtgtttggttatccggtagacatctaacacaggcgcgtcgtcggtatgttatttcttcattcatccccacctactcctctctcagactcagcaccgcattccactcnctcanacttcatcgtgagcgatgtgtgtgagagagaagggaagatgtgggcggtggcgatagggccgagggaggtgccgcgtacattgtattcgctggtcggcgccgcttaacaatcactcatgattgtgacgcggtggataacagtcatgctctacaatgcattacaatgatataatattatattataggactgtgtgtcaagcagtgttccaatttatattgttgacgcgattagaatatagacgaatcatgatgggaggacttgatgcgcgtcgagtcggacacgaactgagtgatgtatatcatcgaatatatctaagatacttcaccgccatctattaagatccgacgaggctgcgaataacgatgtgggcgactgcgaggggtataatataccatgaacaagctgtatcgtatttgatgcccgcctcagttgtgatcacctgctggtgagacgatatgaattcatgggagcggcgtgtggctgcaagaagtatgtctgtgcattgtgttgggataggagccggtgccggccggacgtcttatggttgtcactggtcacggaagattgttatatcgtcgtgaagtagcgccacgcaccggttccgataatattatattggatcggtatgtgtagttgtagttcatggctggatgagcacatatatatgttatgaccaagatcgagactgccactaacgggcacacatggaggagtggatggacaccgacgtacnactgcgcactcacagatcctgtatgtcgttacgccgtagtacatgttgcgatgtagaattggtgtacatcgatagaacactataatatgtatactgtgtaggccgccgcatcagctgcacgatgttacttgactatgagagtgtgtaaattataattactatggcattgtaggtgtctatgcgtatgaggagacctctgtgagtaatgcacgacgcacataatctctctaacacgtcagatggagtgtgatgaacgaactcgttatagcgnagtctagatcattgctttacataactgatcatctgggcaattaacgtggacttcaccttctttgctgagctcgcatcgtgggttatcgagtaggctgagtagcataca

SEQ ID NO: 804 - DNA, 1575 bp, Glycine max
  misc_feature (1)..(20): n is a, c, g, or t
  misc_feature (29)..(30): n is a, c, g, or t
  misc_feature (35)..(40): n is a, c, g, or t
  misc_feature (43)..(43): n is a, c, g, or t
  misc_feature (49)..(49): n is a, c, g, or t
  misc_feature (52)..(52): n is a, c, g, or t
  misc_feature (54)..(57): n is a, c, g, or t
  misc_feature (59)..(59): n is a, c, g, or t
  misc_feature (66)..(66): n is a, c, g, or t
  misc_feature (68)..(69): n is a, c, g, or t
  misc_feature (72)..(72): n is a, c, g, or t
  misc_feature (78)..(78): n is a, c, g, or t
  misc_feature (81)..(81): n is a, c, g, or t
  misc_feature (95)..(97): n is a, c, g, or t
  misc_feature (285)..(285): n is a, c, g, or t
  misc_feature (356)..(356): n is a, c, g, or t
  misc_feature (418)..(419): n is a, c, g, or t
  misc_feature (452)..(452): n is a, c, g, or t
  misc_feature (532)..(532): n is a, c, g, or t
  misc_feature (555)..(555): n is a, c, g, or t
  misc_feature (592)..(592): n is a, c, g, or t
  misc_feature (613)..(613): n is a, c, g, or t
  misc_feature (650)..(650): n is a, c, g, or t
  misc_feature (748)..(748): n is a, c, g, or t
  misc_feature (1125)..(1125): n is a, c, g, or t
  misc_feature (1291)..(1291): n is a, c, g, or t
  misc_feature (1319)..(1319): n is a, c, g, or t
  Probeset Number=SeqID_10583
nnnnnnnnnnnnnnnnnnnnccccccccnnccccnnnnnnccnccccanccncnnnncntccaccncnntanaaaaanagncacacaaaacaaannnaaaaggggagatgggtaggagaggttcagtctcctcaacgtccatttaatctgctttatattctctattgaggtctgtgatacttcactcctatggctgtgtgtggtacttatctctcttctgcctatgagttatcttttattttattattttgcttctctctctctctgagctactagctgacctcntcagctaccacccaccacaaccctcactaccatcatagaccatacacacatgatatcacaccaaaatatanacgaggaaatgaccatcaaaataatacagagaggaccaatacaagacagaagaacaaaacannagagtggaagtggtgtcgacaattccaatacanactctggagatgacgttcatcacgctaggtctaaggtggggcgtgtattcgttgcgccggcgcgcgacgctcctcctcantgagggtgcgaggcgtcgtgtcnatctcctgggccgcttgctctacagtcatacacacanacagcttacaggcgcacgctnctctcaccgcacaaacaaatacaagtacagactgacnaagcgaacgcgatacgtacccacaacacgacgcagaccatactcaccacatccctcgcgccttcccgcacgagatgatgagcatacgaacgccacggncatatcataagctatccgctatgctgacgtatggtgtgattatttcccgcggtcccacacgctctctcatagttcttgctacttctcatccgctttactcgattcgtactactttatagtgtctgtgctatcctctatctcatcatatccatataatccgagcaagacgacgtgacgctgttgcgcgctgcaccgtttatattatgttttatatatttgattcacaactatatatcttatacatatattatacatatacaaccgtatcctcctcctctctctcactgaattgtctcttctcttcgtctcttcatatctccgcgaatttacacatacccattcacctcgtatattcgctctcacacctccatctctcncttctatctacgtccacgcccattattatattatgtataatgattgtcgtactcgattatcacatactaagactccataacaacgatgaacaactctctatattactaatggattgtcgcattgtgtaaatatcacagtgagttcagacaagaacctttcattccntcctactgaccgaatgcatcacattgtngcgcagtctcctctcttctctacaatatataatacacttacctctatatcacctacaccgattgctgcgtgacacaatattcgcgagctgtgttcctctcttactttccacttcctcacatacacaaaatgaccatgtattgctagagtgtccttctcgtgctgctattatctcattttcgtgtgcgtcgctgcgcgaccgtcgcacactcgagcgcgccgagccgtacgagcagtgtacatgtacactcagattg

SEQ ID NO: 805 - DNA, 842 bp, Glycine max
  misc_feature (728)..(728): n is a, c, g, or t
  misc_feature (744)..(744): n is a, c, g, or t
  misc_feature (842)..(842): n is a, c, g, or t
  Peptide Sequence Number=SeqID_9052
  Probeset Number=SeqID_10584
ccacgcgtccggcgcagttgtagaaagggtgaacgaagatgtttcctcaggagaaatcatagtaacggctatcagcaggggcagggggtgggttacagtcacagagagcgagtccgtcgtggcactcgcaggtcacgtgcctccacttcctccgttagggtttacgaccagcaccaaccgcaacatcgacctccttggactgatttcgacgtcgactattaccattcttacgctcaccttggcatccaccaagagatgatcaaggatcgtgtgcgtacggaaacttacagggatgcaatcatgcagcatcagagttccattgcaggcaaagcaaatgaagtcgtgaaagcaaataacttgtctgatgtcgttgttgtattgcatgggcgagttgaggatgttgaaattgatgaagaggtggatgttataatttcagaatggatgagctatatgcttctatatgagagcatgcttggaagtgttattaatgctagagatcgttggctcaaacttggtggtcttattcttccttcaagtgcaaccgagtacatggctcctgtcacacataccggcagatacagtgacagtgtggacttctggcgcaatgtttatggaattgatagccgaagttgaacagatgagagggcagacacatgcaaaaattgtgaagagcatagctatgggaaggcaagagcataaggaaaacgtgcagcatcgtgagctagatnagttcgagagctagangtactgcggctgaaacgtagtaattccccatccagaccgtggcgctgtgcagtgcataggatatgctggctgggatatatgagaagggaagcggactn

SEQ ID NO: 806 - DNA, 2079 bp, Glycine max
  misc_feature (34)..(35): n is a, c, g, or t
  misc_feature (51)..(52): n is a, c, g, or t
  misc_feature (55)..(56): n is a, c, g, or t
  misc_feature (60)..(60): n is a, c, g, or t
  misc_feature (69)..(69): n is a, c, g, or t
  misc_feature (76)..(76): n is a, c, g, or t
  misc_feature (80)..(80): n is a, c, g, or t
  misc_feature (87)..(87): n is a, c, g, or t
  misc_feature (109)..(109): n is a, c, g, or t
  misc_feature (112)..(120): n is a, c, g, or t
  misc_feature (122)..(126): n is a, c, g, or t
  misc_feature (128)..(131): n is a, c, g, or t
  misc_feature (133)..(133): n is a, c, g, or t
  misc_feature (140)..(140): n is a, c, g, or t
  misc_feature (147)..(149): n is a, c, g, or t
  misc_feature (152)..(152): n is a, c, g, or t
  misc_feature (162)..(162): n is a, c, g, or t
  misc_feature (174)..(174): n is a, c, g, or t
  misc_feature (177)..(184): n is a, c, g, or t
  misc_feature (209)..(209): n is a, c, g, or t
  misc_feature (223)..(223): n is a, c, g, or t
  misc_feature (235)..(235): n is a, c, g, or t
  misc_feature (237)..(237): n is a, c, g, or t
  misc_feature (248)..(249): n is a, c, g, or t
  misc_feature (251)..(251): n is a, c, g, or t
  misc_feature (253)..(255): n is a, c, g, or t
  misc_feature (262)..(262): n is a, c, g, or t
  misc_feature (283)..(283): n is a, c, g, or t
  misc_feature (294)..(294): n is a, c, g, or t
  misc_feature (299)..(299): n is a, c, g, or t
  misc_feature (313)..(314): n is a, c, g, or t
  misc_feature (361)..(361): n is a, c, g, or t
  misc_feature (377)..(378): n is a, c, g, or t
  misc_feature (381)..(381): n is a, c, g, or t
  misc_feature (425)..(425): n is a, c, g, or t
  misc_feature (438)..(438): n is a, c, g, or t
  misc_feature (441)..(441): n is a, c, g, or t
  misc_feature (443)..(444): n is a, c, g, or t
  misc_feature (537)..(537): n is a, c, g, or t
  misc_feature (553)..(553): n is a, c, g, or t
  misc_feature (557)..(557): n is a, c, g, or t
  misc_feature (578)..(578): n is a, c, g, or t
  misc_feature (580)..(580): n is a, c, g, or t
  misc_feature (584)..(584): n is a, c, g, or t
  misc_feature (607)..(607): n is a, c, g, or t
  misc_feature (720)..(720): n is a, c, g, or t
  misc_feature (736)..(736): n is a, c, g, or t
  misc_feature (738)..(739): n is a, c, g, or t
  misc_feature (743)..(743): n is a, c, g, or t
  misc_feature (748)..(748): n is a, c, g, or t
  misc_feature (774)..(774): n is a, c, g, or t
  misc_feature (778)..(778): n is a, c, g, or t
  misc_feature (787)..(787): n is a, c, g, or t
  misc_feature (792)..(792): n is a, c, g, or t
  misc_feature (809)..(809): n is a, c, g, or t
  misc_feature (851)..(851): n is a, c, g, or t
  misc_feature (860)..(860): n is a, c, g, or t
  misc_feature (953)..(953): n is a, c, g, or t
  misc_feature (972)..(972): n is a, c, g, or t
  misc_feature (979)..(979): n is a, c, g, or t
  misc_feature (1055)..(1055): n is a, c, g, or t
  misc_feature (1168)..(1168): n is a, c, g, or t
  misc_feature (1171)..(1172): n is a, c, g, or t
  misc_feature (1187)..(1187): n is a, c, g, or t
  misc_feature (1189)..(1191): n is a, c, g, or t
  misc_feature (1194)..(1194): n is a, c, g, or t
  misc_feature (1204)..(1204): n is a, c, g, or t
  misc_feature (1240)..(1240): n is a, c, g, or t
  misc_feature (1269)..(1269): n is a, c, g, or t
  misc_feature (1278)..(1279): n is a, c, g, or t
  misc_feature (1281)..(1281): n is a, c, g, or t
  misc_feature (1284)..(1285): n is a, c, g, or t
  misc_feature (1290)..(1290): n is a, c, g, or t
  misc_feature (1301)..(1301): n is a, c, g, or t
  misc_feature (1307)..(1309): n is a, c, g, or t
  misc_feature (1311)..(1311): n is a, c, g, or t
  misc_feature (1313)..(1314): n is a, c, g, or t
  misc_feature (1317)..(1318): n is a, c, g, or t
  misc_feature (1320)..(1321): n is a, c, g, or t
  misc_feature (1324)..(1324): n is a, c, g, or t
  misc_feature (1431)..(1431): n is a, c, g, or t
  misc_feature (1475)..(1475): n is a, c, g, or t
  misc_feature (1515)..(1515): n is a, c, g, or t
  misc_feature (1522)..(1522): n is a, c, g, or t
  misc_feature (1589)..(1589): n is a, c, g, or t
  misc_feature (1603)..(1603): n is a, c, g, or t
  misc_feature (1644)..(1644): n is a, c, g, or t
  misc_feature (1654)..(1654): n is a, c, g, or t
  misc_feature (1673)..(1673): n is a, c, g, or t
  misc_feature (1680)..(1680): n is a, c, g, or t
  misc_feature (1688)..(1688): n is a, c, g, or t
  misc_feature (1712)..(1712): n is a, c, g, or t
  misc_feature (1740)..(1740): n is a, c, g, or t
  misc_feature (1745)..(1745): n is a, c, g, or t
  misc_feature (1792)..(1792): n is a, c, g, or t
  misc_feature (1881)..(1881): n is a, c, g, or t
  misc_feature (1907)..(1907): n is a, c, g, or t
  misc_feature (1915)..(1915): n is a, c, g, or t
  misc_feature (1918)..(1918): n is a, c, g, or t
  misc_feature (1928)..(1928): n is a, c, g, or t
  misc_feature (1932)..(1932): n is a, c, g, or t
  misc_feature (1936)..(1936): n is a, c, g, or t
  misc_feature (2040)..(2040): n is a, c, g, or t
  misc_feature (2071)..(2071): n is a, c, g, or t
  misc_feature (2079)..(2079): n is a, c, g, or t
  Peptide Sequence Number=SeqID_9053
  Probeset Number=SeqID_10585
tgtgagtttgtgtgtgggtggccaccccccgcgnntgaattgtggtgttannatnntganacgagaaanaaacgcnacanaaccaanaaaacaacaacacaacactctnacnnnnnnnnncnnnnncnnnngngcgtggnctcgttnnnagngagaggatgncgccatctctcnacnnnnnnnnaatagctaggtatgatctctcccanactagcgcactaanctatgatccaanancatgtcgtgtnnanannnaaacacnaacacacacgtgagagccatntcgtctcctcntgtgnttgggttgtgtganncatcttattacctccacaacgagcacagcgtgcttgtgtgtcatccnagccgcgagcaacgannaanatatataactacacgaactgcacatatcgcatgtcgtccgacanacgagaagacaancananncgtaagagcaacaatcatcccacttacaaaaacactatgatactcaatgaagactctcatccctactcatatatatattatatattcttttcntatgcgacatacactncaanccgcaaagaatacacacgaancntccncattcgctgtatgtattgccgancttcctcaccacccccagacagagcaacagacgcgagcgctgcagacaatgacgagtatcgtgtgcgcgtaaatgtgcgacagaaatatacatgtagcatgatagcactgccnacgtcacatgatctancnncatntaccncggccatcgtctcagatagtgtgtgntgtngatgatatnctgantgcgccggctcacggcncagtccaatgagacatagattgtatagatgagtacgtgtacngttatgagnatgatatagactattgtctagctcacactacataagcaagaaaatattgcgtatagagtgcacgagcagctgatgtcgtagtgattgtctcgnagacagtgcacgagagatngacgtgnagtatatgatatagagaccatcacgactagactcaatcgccatgacacacatcgtatgaactatcacctgctaganatcgaagcaagacgaggcacagatcaccgtctactacagtcacgatagaacgtattacgatgcagaaggtgagcgtgtacgtgaatttaagagtgtagatatgagtaatgtanganncgagtaggttatganannncantaatctctanacaccaccacacaacaccacattctcagtgttgcantagctcttgtgtgcagtgtgagtgagganagaggaggnngnacnncccantacatagcaanatcttnnnanannaannannacncatatacccatatctatcgtaaacacgctgacacgtggatgaatgacgtagtgacgcaggacatgccgctgcgtgactcgctggctcgatcactcacacaccacatncacatcacagatatgtatgatgatgtgatgtactgtgtagctangagactacatgccctacgctcagcacacacacatcaagangacacanacgcctgagtagcgtgctgaccatgttgtcactgctgtccatcataccctcaactaagacgtaccgngagctagatgtgcncacatgacgtggtgacgtttgatctgctagacttgtagtanataataactnagataatatatacacgacntacaaancaccacantaccaatgtcacattactccctcntcatggatgtagcacatctactacgtcnacgtntgcctatgactcctgtatgtcattactgcctagtgtgttcgtattcncgtgtgatacctaggtccactcatctacatgagcactatcgtgatcatgatggactatggtgccgaatgtcgcatcgatcgcgctcgtncagatgatgctgatacgtacgtctgngctctagnacntatatagcangtcncgcnacagtgtctcgcactgacctgtatctgctgttgttcatgtgttttcaacgacatccgagtgcactgactcattacatctcactacacgctgtcgtgctgctgtngctgctattgacgcttgtgatgcaacgtatnactcactn

SEQ ID NO: 807 - DNA, 622 bp, Glycine max
  misc_feature (1)..(7): n is a, c, g, or t
  misc_feature (466)..(466): n is a, c, g, or t
  misc_feature (514)..(514): n is a, c, g, or t
  misc_feature (550)..(550): n is a, c, g, or t
  misc_feature (608)..(622): n is a, c, g, or t
  Probeset Number=SeqID_10586
nnnnnnntaactttaaccattgagcactcgacttttgcttttgtttccactatgatatatagcttgttcttccatcaacttggtgacttccttacgtaaattctcgacgaagcaaccctgaccataaccacactctctcaagtcccaagaaagaaccctctcacctaattatctagcgaattacctatggataattctcttctctccctcactcatgctcaaagattccctgaatccccctcccctttaccttatagccattctttccgacatgacccctcctcatacccccctattctacatcttcatcttccgttgtttgctcccagctcaactgcccgccgtgtttccgcctactaaaacactgcttcatcccctcctaaacgtcactggtcaactcatgcgtgcttcaccaactacaacaacttccaccggtccagtgctctacccgacaccgtctacggtncttcttacagcgatcttgacagactctcccaaaagactcaaggtcgcngctgcaccatcgccgtgggaacaccccgaatcaggnaccgtcctgttttggcctcctgaggggacggcctggaatgtcaaacgcttggttccgnnnnnnnnnnnnnnn

SEQ ID NO: 808 - DNA, 847 bp, Glycine max
  misc_feature (1)..(1): n is a, c, g, or t
  Peptide Sequence Number=SeqID_9054
  Probeset Number=SeqID_10587
ntttttttgtgggggggggcgggccttttataagaaataaccacaatgaattctgcgtttctttggcgggtcgctatcctctttggggggcatattttgttaccacttttgtttgcgggggattttctccggtttttttggggtaaagcgtatttccccccttggaggagatgtttaccccctcgggcccgccggaataacagagggccacgaatctcttgggggagaatatttgaaaaatctcccatggcgcaacccccttttttccgcggtttttggtaattccttaaacacagcggcctgccagttttttcctcagtaaaagcggcaccttaaccgcaccccatttaatgtgatttagcccccccccttggcccccccagtttttacttttttgtttttcgcttgctattttgggggaaattggaaggggaaaaaaatttcccccgggaacaagtttttgcctttgtttccccaacttggaatttaaccccccttaaagggaaaaaaatcggggcttcccccccgggggggccccttttaaaatttggggttcccccggggcccaggaatttttttttttttttttttttccttttttcaattttttttttttttttttttttttttatttttttttttttttttttttttttttttacttgagagtttttgtagttttttcattcaaaaactcattgtatatgtaatattttaacaattcaattcatatttgttgaaaatctaccatctccaaaccatgtacctccttcatcagtcatcactgaagaaaggaagaccacatgaaattttttttctaatccttcaacatgtttaaacacaataa

SEQ ID NO: 809 - DNA, 1608 bp, Glycine max
  misc_feature (1)..(1): n is a, c, g, or t
  misc_feature (42)..(42): n is a, c, g, or t
  misc_feature (95)..(95): n is a, c, g, or t
  misc_feature (152)..(152): n is a, c, g, or t
  misc_feature (295)..(295): n is a, c, g, or t
  misc_feature (339)..(339): n is a, c, g, or t
  misc_feature (1556)..(1556): n is a, c, g, or t
  misc_feature (1560)..(1560): n is a, c, g, or t
  Probeset Number=SeqID_10588
natcgtgttagacagattggtacagcaccgcagagctcacgntacctgatagatacagaccgctgtctcggcagcactcgcacgatcgcatgtcnagagaacgcgaatgcatatcgtggatctcgtcgctgtgatactgcttcattatacangtaggtagctgcacatcagtcactattatgtgtgtgcaatatatcgctacatacgtagcgtgatagaacgcagcagttcacacgtacggatagtacatccgctccggacaacattgagccgatgacagagagctgggatcganctactagtgatggatagatatagaagtatagcgataattcacanaagaacaggacactggcagcagttagcgagtcatgctgattcgtagcgtaacatatatgatgtgcgtatgtgtgggtaggtcgtagagctcttccgcgtcgctgctcattcgcaaatcgtggttaacgtctgatatgtactcacggctaatgttacggtcagtgccagaaggaggtgaggagaacagagggttcttatgacatgtgagtgggtaaggattgtgtaccaagtcttgcaatttggagagtgatcacagacaccaatgagatcatgcgcacaacgaggcaccgattgcggtttatataggaattattgactctcgtttcgctggctatacaagacgcacgtattataaataactgtcggcatgctgtctgagcctcgcggtagacatctcggctacgactctacatcgacgtatgttggaactggagctcgaaagagacagagagagaggactgtctcttaggaatgcgttggggatttcttcgacagacaatggcatatagtaggatgtcgcgctgaggtggtgcttaacgcctatactagaaaatgcgccatcggaggtcatgcctctaacccggctcggtgagtcgtgatctatatataaatttcctatcaatactcaactgatggattatgatataatgtgatcttcgtgttctacggtgtgtttggtcctgtgtaggagtggagggtgacagcacgcccataaggatacaataacaggcagtaagagactatatttagtgaccggtggcatatatgtgtaagaagttttgggagggttctgcatattctgtggtgtgagccgacggtatccccgatgatcttatgctacagaccgaacgtggcctgcatgccgagtagtagaactttcttcactgcggatggtctataggaagatcaataatataagactgctgattaatctatgtgtcgcggatagcactgtgccgctatagttctccggctcacgccagtgtggcacactccatagctgagacgtcacgcgacaatgctggtttagtgactattattataggaggagagacttcatctatctcggtagacatgagtagggtgtatctcgcatccttcaaactactatttaagagaagataatagaggtttaggtgggagaaaccttctacccccctctcaaccgcggaggggggcgggcccgcaccgactgcaaatggaggggggtgttctantgtnctaaaggtaatattgactacgaggtaacggtgagcaggcgcactccca

SEQ ID NO: 810 - DNA, 1553 bp, Glycine max
  misc_feature (15)..(15): n is a, c, g, or t
  misc_feature (19)..(19): n is a, c, g, or t
  misc_feature (29)..(29): n is a, c, g, or t
  misc_feature (38)..(38): n is a, c, g, or t
  misc_feature (40)..(40): n is a, c, g, or t
  misc_feature (43)..(44): n is a, c, g, or t
  misc_feature (50)..(50): n is a, c, g, or t
  misc_feature (52)..(52): n is a, c, g, or t
  misc_feature (55)..(55): n is a, c, g, or t
  misc_feature (57)..(58): n is a, c, g, or t
  misc_feature (64)..(64): n is a, c, g, or t
  misc_feature (66)..(66): n is a, c, g, or t
  misc_feature (69)..(69): n is a, c, g, or t
  misc_feature (80)..(82): n is a, c, g, or t
  misc_feature (84)..(85): n is a, c, g, or t
  misc_feature (87)..(87): n is a, c, g, or t
  misc_feature (90)..(90): n is a, c, g, or t
  misc_feature (95)..(95): n is a, c, g, or t
  misc_feature (98)..(98): n is a, c, g, or t
  misc_feature (116)..(116): n is a, c, g, or t
  misc_feature (126)..(126): n is a, c, g, or t
  misc_feature (160)..(160): n is a, c, g, or t
  misc_feature (178)..(178): n is a, c, g, or t
  misc_feature (180)..(181): n is a, c, g, or t
  misc_feature (215)..(215): n is a, c, g, or t
  misc_feature (232)..(232): n is a, c, g, or t
  misc_feature (240)..(240): n is a, c, g, or t
  misc_feature (242)..(242): n is a, c, g, or t
  misc_feature (256)..(256): n is a, c, g, or t
  misc_feature (264)..(264): n is a, c, g, or t
  misc_feature (273)..(273): n is a, c, g, or t
  misc_feature (283)..(283): n is a, c, g, or t
  misc_feature (287)..(287): n is a, c, g, or t
  misc_feature (292)..(292): n is a, c, g, or t
  misc_feature (295)..(295): n is a, c, g, or t
  misc_feature (372)..(372): n is a, c, g, or t
  misc_feature (377)..(377): n is a, c, g, or t
  misc_feature (413)..(414): n is a, c, g, or t
  misc_feature (484)..(484): n is a, c, g, or t
  misc_feature (492)..(492): n is a, c, g, or t
  misc_feature (503)..(503): n is a, c, g, or t
  misc_feature (633)..(634): n is a, c, g, or t
  misc_feature (653)..(653): n is a, c, g, or t
  misc_feature (661)..(662): n is a, c, g, or t
  misc_feature (716)..(716): n is a, c, g, or t
  misc_feature (790)..(790): n is a, c, g, or t
  misc_feature (885)..(885): n is a, c, g, or t
  misc_feature (913)..(913): n is a, c, g, or t
  misc_feature (947)..(947): n is a, c, g, or t
  misc_feature (952)..(952): n is a, c, g, or t
  misc_feature (957)..(957): n is a, c, g, or t
  misc_feature (997)..(997): n is a, c, g, or t
  misc_feature (999)..(999): n is a, c, g, or t
  misc_feature (1021)..(1021): n is a, c, g, or t
  misc_feature (1030)..(1030): n is a, c, g, or t
  misc_feature (1045)..(1045): n is a, c, g, or t
  misc_feature (1089)..(1090): n is a, c, g, or t
  misc_feature (1106)..(1106): n is a, c, g, or t
  misc_feature (1108)..(1108): n is a, c, g, or t
  misc_feature (1116)..(1116): n is a, c, g, or t
  misc_feature (1125)..(1125): n is a, c, g, or t
  misc_feature (1134)..(1134): n is a, c, g, or t
  misc_feature (1217)..(1217): n is a, c, g, or t
  misc_feature (1237)..(1237): n is a, c, g, or t
  misc_feature (1268)..(1268): n is a, c, g, or t
  misc_feature (1346)..(1346): n is a, c, g, or t
  misc_feature (1414)..(1414): n is a, c, g, or t
  misc_feature (1499)..(1499): n is a, c, g, or t
  Peptide Sequence Number=SeqID_9055
  Probeset Number=SeqID_10589
tgtttgtgtgggttntctntggtgtcttngtgtgtctngngcnngagtgngntcncnntcacananacncgaccgcaatnnnannanatntctantgnttgttgtcttagagattntagtgtgtgngatactttactgtaattttgtgtctttttgtggntatctctaagagagccancnncacaaaatcgcaagctgcgtgggagcggcggcgnctcggatgtgtggtgtnggtgtctntnttattcatatctcnacctaccncccgcggcntggaggacgnctgncgccncgnacacaatgtgtggtcatatgtgatatgttgattggtcagaactctgcgcgcgatgtgctagctgagtgtgatgtgtntgaangctgtcattcatcgtattcatggaggtgaggtctcnncgtgtcatctatgttatgtcttacgtattgatgttatataatgatagcgcgtgtcggtgtgctgcggggncaccatcncacacactgcntatggtgacgactgtgtgtgggcggcgaatgtctgcgtatcatgatcatagtgtatgtctatcacggtcgccgcgtctgtgtgtttggtgctacaattgataattagttgtcgtcgtggcttataatgtnngggaggaggagggaatatntatcatanngtggcacaacgagatgtatgtgtgtcgtgtgaggaggtgattgtgtagaatacnacatatgcagaatagagaaaatgagtgagaggagggacaacggaaggtagacgacactaataatacaatacgangatgtccccatcgcctcatagtatacaagtgttgatgactgatggtcagcatgtctacagctcgagttatgcatatcatgatctaacatctatgnacagcgcgcaccgcgtgctatgcgaagncgcgaggcacggcgcggattgtgttgtgactaangtgcncgccncacacccatgcgcgcgcacatcagtgtggatgtcgatctncngtgtgctgttgatgtgatgtgnatgatcgcncgctgcgtagcaaancagagcctctcatcgcaaccagacagaccataatacatgagcanngagactataagcatananatagcacngtatctaanagacaagtnactattatgtactgtgtagtgagcgcactgatatagctctgatcatacgctcgcgcgctgacgcgatcaaagtatctgagtgnggtcgctggtggtactatgnctcatagtttcgtagcatgtgtcgtcagtgntgctgcgcgcttgatacagggagatcgggtgcatactaagacgggacgagaaccgtacgagaaagtcactgatgtganatgaggcgcgcgcatcgctggtgcggaatgacgtacctgctgtcgatgtataacatctagacatacantctggacgctactctagatacactattatatgatattagctgtgatgcgtcgctacatatgtgaatatattctctatatttcgtntgcgtggacgagatgacgtggtgcgttgtgatagtctgcgtatacgctctatgg

SEQ ID NO: 811 - DNA, 700 bp, Glycine max
  misc_feature (120)..(120): n is a, c, g, or t
  misc_feature (126)..(126): n is a, c, g, or t
  Probeset Number=SeqID_10590
tagatcaggatgatgcgcactgtggagatcatttcctcacatgtggatttccagcagcttatgcagcctgggagatgagtatcacatgtctgacagataaaatcactgtctgtctagagnaagagnaagaaaggtcatcagtccatatatctatggtggacaacatagtcatcatatggagtaagcgtattgataagtgcattagtagagcaactcgtagaagtgataaccccctcctatgccaactggtttctcctttgcagagaggcttcccatgtgctttgaagatcagcactgaatccctgttctatcttgcctggagctttcttccatcgccagcttagttcaaccggtataaggcgcccatcgcctgtaatttcatactcataaagggcctcaaaaaggttcaaaggtgagggtcagtaataggattttcagctccaaattcgttcatcctgcttttagactcgtgctccacgccgctataatcggcaggcctctcttctgtttccttcaaagctttaggttatcaaagaatagcctcctatagtctcccttagaccatatatcaaagacttgcatcaaaggaatgtttaatcataatattcactgtcacatttcacgtctaatatcagaatccgtagcatcctttaaggtatttgggggggcctacgtacgctcgaggggcccggtaccaatg

SEQ ID NO: 812 - DNA, 2072 bp, Glycine max
  misc_feature (10)..(10): n is a, c, g, or t
  misc_feature (25)..(26): n is a, c, g, or t
  misc_feature (29)..(32): n is a, c, g, or t
  misc_feature (34)..(35): n is a, c, g, or t
  misc_feature (39)..(39): n is a, c, g, or t
  misc_feature (41)..(41): n is a, c, g, or t
  misc_feature (44)..(44): n is a, c, g, or t
  misc_feature (47)..(48): n is a, c, g, or t
  misc_feature (53)..(54): n is a, c, g, or t
  misc_feature (56)..(60): n is a, c, g, or t
  misc_feature (62)..(62): n is a, c, g, or t
  misc_feature (66)..(67): n is a, c, g, or t
  misc_feature (72)..(72): n is a, c, g, or t
  misc_feature (76)..(76): n is a, c, g, or t
  misc_feature (78)..(80): n is a, c, g, or t
  misc_feature (84)..(85): n is a, c, g, or t
  misc_feature (95)..(95): n is a, c, g, or t
  misc_feature (99)..(99): n is a, c, g, or t
  misc_feature (115)..(115): n is a, c, g, or t
  misc_feature (117)..(117): n is a, c, g, or t
  misc_feature (127)..(127): n is a, c, g, or t
  misc_feature (130)..(130): n is a, c, g, or t
  misc_feature (141)..(143): n is a, c, g, or t
  misc_feature (147)..(147): n is a, c, g, or t
  misc_feature (156)..(156): n is a, c, g, or t
  misc_feature (164)..(165): n is a, c, g, or t
  misc_feature (168)..(168): n is a, c, g, or t
  misc_feature (170)..(172): n is a, c, g, or t
  misc_feature (176)..(176): n is a, c, g, or t
  misc_feature (181)..(181): n is a, c, g, or t
  misc_feature (183)..(183): n is a, c, g, or t
  misc_feature (194)..(194): n is a, c, g, or t
  misc_feature (207)..(213): n is a, c, g, or t
  misc_feature (216)..(217): n is a, c, g, or t
  misc_feature (219)..(223): n is a, c, g, or t
  misc_feature (225)..(226): n is a, c, g, or t
  misc_feature (229)..(231): n is a, c, g, or t
  misc_feature (238)..(238): n is a, c, g, or t
  misc_feature (240)..(240): n is a, c, g, or t
  misc_feature (278)..(278): n is a, c, g, or t
  misc_feature (291)..(293): n is a, c, g, or t
  misc_feature (297)..(298): n is a, c, g, or t
  misc_feature (301)..(302): n is a, c, g, or t
  misc_feature (307)..(307): n is a, c, g, or t
  misc_feature (312)..(312): n is a, c, g, or t
  misc_feature (315)..(317): n is a, c, g, or t
  misc_feature (319)..(319): n is a, c, g, or t
  misc_feature (343)..(343): n is a, c, g, or t
  misc_feature (362)..(362): n is a, c, g, or t
  misc_feature (426)..(426): n is a, c, g, or t
  misc_feature (430)..(430): n is a, c, g, or t
  misc_feature (434)..(434): n is a, c, g, or t
  misc_feature (444)..(444): n is a, c, g, or t
  misc_feature (455)..(456): n is a, c, g, or t
  misc_feature (460)..(460): n is a, c, g, or t
  misc_feature (462)..(462): n is a, c, g, or t
  misc_feature (487)..(487): n is a, c, g, or t
  misc_feature (519)..(519): n is a, c, g, or t
  misc_feature (568)..(568): n is a, c, g, or t
  misc_feature (590)..(590): n is a, c, g, or t
  misc_feature (618)..(618): n is a, c, g, or t
  misc_feature (638)..(638): n is a, c, g, or t
  misc_feature (715)..(715): n is a, c, g, or t
  misc_feature (725)..(725): n is a, c, g, or t
  misc_feature (729)..(729): n is a, c, g, or t
  misc_feature (731)..(731): n is a, c, g, or t
  misc_feature (798)..(798): n is a, c, g, or t
  misc_feature (800)..(800): n is a, c, g, or t
  misc_feature (846)..(846): n is a, c, g, or t
  misc_feature (853)..(854): n is a, c, g, or t
  misc_feature (874)..(874): n is a, c, g, or t
  misc_feature (970)..(970): n is a, c, g, or t
  misc_feature (989)..(989): n is a, c, g, or t
  misc_feature (997)..(997): n is a, c, g, or t
  misc_feature (1016)..(1016): n is a, c, g, or t
  misc_feature (1021)..(1021): n is a, c, g, or t
  misc_feature (1096)..(1096): n is a, c, g, or t
  misc_feature (1135)..(1135): n is a, c, g, or t
  misc_feature (1175)..(1175): n is a, c, g, or t
  misc_feature (1216)..(1216): n is a, c, g, or t
  misc_feature (1219)..(1219): n is a, c, g, or t
  misc_feature (1221)..(1221): n is a, c, g, or t
  misc_feature (1228)..(1229): n is a, c, g, or t
  misc_feature (1270)..(1270): n is a, c, g, or t
  misc_feature (1320)..(1320): n is a, c, g, or t
  misc_feature (1462)..(1462): n is a, c, g, or t
  misc_feature (1467)..(1467): n is a, c, g, or t
  misc_feature (1474)..(1474): n is a, c, g, or t
  misc_feature (1503)..(1503): n is a, c, g, or t
  misc_feature (1547)..(1547): n is a, c, g, or t
  misc_feature (1576)..(1576): n is a, c, g, or t
  misc_feature (1581)..(1581): n is a, c, g, or t
  misc_feature (1594)..(1594): n is a, c, g, or t
  misc_feature (1601)..(1601): n is a, c, g, or t
  misc_feature (1740)..(1740): n is a, c, g, or t
  misc_feature (1785)..(1785): n is a, c, g, or t
  misc_feature (1790)..(1790): n is a, c, g, or t
  misc_feature (1806)..(1806): n is a, c, g, or t
  misc_feature (1809)..(1809): n is a, c, g, or t
  misc_feature (1832)..(1832): n is a, c, g, or t
  misc_feature (1869)..(1869): n is a, c, g, or t
  misc_feature (1884)..(1884): n is a, c, g, or t
  misc_feature (1887)..(1887): n is a, c, g, or t
  misc_feature (1892)..(1892): n is a, c, g, or t
  misc_feature (1923)..(1923): n is a, c, g, or t
  misc_feature (1925)..(1925): n is a, c, g, or t
  misc_feature (1938)..(1938): n is a, c, g, or t
  misc_feature (1940)..(1940): n is a, c, g, or t
  misc_feature (1964)..(1964): n is a, c, g, or t
  misc_feature (1996)..(1996): n is a, c, g, or t
  misc_feature (1999)..(1999): n is a, c, g, or t
  misc_feature (2002)..(2002): n is a, c, g, or t
  misc_feature (2005)..(2005): n is a, c, g, or t
  misc_feature (2028)..(2028): n is a, c, g, or t
  misc_feature (2072)..(2072): n is a, c, g, or t
  Peptide Sequence Number=SeqID_9056
  Probeset Number=SeqID_10591
ttgttggttntgtgtgttggggccnnccnnnncnncccncnctntcnncttcnncnnnnncnctcnnctccncttntnnntttnnctcagttctnattnattatattttactgtntnattttacccntanctccccatccnnncacnctaatactnaccactannccncnnncatnatacncngatcactacanacaccctatgtannnnnnnatnnannnnnanntannntcattcncnagtgtgttgcttacgatgatgagagttgtctgctgatnatctttctggcannnattnnaannatgtnggganagnnnangtaagtagtatgtgatcagacgantacctgatagcactggtgngaacgaccacagacatcgactcagccagtagctgctgacatatgcagtaggagagtgatatgtnatgnaatntcagccgagnagtgtggtgtnnatgntnagactataaactaacgcagcgtatngtgcatatcttcgacacactcgtgactgagtnatagtgatatgtacgtagatagtagtgagactcgacgacgatgccacgncgcagcgctgatgatatatgantatcatataggagttatgcgatgtgatntatatactacgacgcagatngatagcagtatgttactggagtgtgatggaggatgacgtacttacatatgctgactgatggcgcatgcgcgcggggntgcatgagtngtgntngtgtcgtagtgctactgtctgtgcggttcgcctgcacctcgtcgcgctctgctgctgtgtgtgttgntngtgatgtggtatcctctactgatagctgataattagagtggtgtgnatgaggnnagtgtcatacaagtagccantgtctagatgattgatataatacgagagatgatgcatgtatctatagtctatgtacgtgtgtgtaggtagtgctgtgtcgctgtgcgtgatcgaanagttatagtggatgctgancatgatgnatgtagaatttatagatantgacnctacacatatgcatgttggatgatgtggagcgatggcgatatactcgaccgcaccgtgtgagtgagagcgctcangcacgctgatacatgtacgctagtccagcactgatgatncgagacatgatattataagactacagtaggtgtgtaagtngtcgatgagatatgtctatgtaggtatgacgagtgtgagancgnangacagcnnacgacacagatgagacgtgtgtgatgacgtctatatctgtntcgatgttagtgtcgctgtgtcgtgatgtctgggagatgtatgatgtgtnacgtaccccccaccctacagtgtgtcttgtgtgcaggtgatgttagatgattgtatgtactgagtgagtatatatgctgctcagtaatcgatgactatgtgtatactgcgagctgcgcgttcatctatgcacgtcagatagnatacncgtaagntgtgtccagtggcgcgatcgtactgttancgtagtgagaatgctgtaggctagtgctgcgtgtgacgctatgntgacgtgctgcggccacgctccggccacnctcanagcacacagagancaatcanattgtcgcctttttatacttatcatgcggaacttgatattgtagtgtattgctctctcgtctgtgtaattatgtacatatatgaatatgtatgagatatcgatatagacagatggccatagagtcgtaacgacatactncacacagcgatgcatcgctcactcatcgactaactcttacgcccnaagtntagcgcaccggctgcntcntgcgcgtgcatcgctctcgcgtnaccggcgactaaatgcgcgctatctatttgtacacgncgccactgtgaatgncanctgcntacaatgttctatatgctgcatatgactcgntnactgtatatcagncngcgtcacatgctgacgctcatacntgtcattgactacgctcactactcgtagtatnctncancanccgagtgaagtatgtaagctgcnactgacgacatgatagctcgtctgctctcacgtctgatcttctn

SEQ ID NO: 813 - DNA, 1409 bp, Glycine max
  misc_feature (1)..(808): n is a, c, g, or t
  misc_feature (1409)..(1409): n is a, c, g, or t
  Probeset Number=SeqID_10592
nnnnnnnnnnnnnnnnnnnnnnnnnnnnnnnnnnnnnnnnnnnnnnnnnnnnnnnnnnnnnnnnnnnnnnnnnnnnnnnnnnnnnnnnnnnnnnnnnnnnnnnnnnnnnnnnnnnnnnnnnnnnnnnnnnnnnnnnnnnnnnnnnnnnnnnnnnnnnnnnnnnnnnnnnnnnnnnnnnnnnnnnnnnnnnnnnnnnnnnnnnnnnnnnnnnnnnnnnnnnnnnnnnnnnnnnnnnnnnnnnnnnnnnnnnnnnnnnnnnnnnnnnnnnnnnnnnnnnnnnnnnnnnnnnnnnnnnnnnnnnnnnnnnnnnnnnnnnnnnnnnnnnnnnnnnnnnnnnnnnnnnnnnnnnnnnnnnnnnnnnnnnnnnnnnnnnnnnnnnnnnnnnnnnnnnnnnnnnnnnnnnnnnnnnnnnnnnnnnnnnnnnnnnnnnnnnnnnnnnnnnnnnnnnnnnnnnnnnnnnnnnnnnnnnnnnnnnnnnnnnnnnnnnnnnnnnnnnnnnnnnnnnnnnnnnnnnnnnnnnnnnnnnnnnnnnnnnnnnnnnnnnnnnnnnnnnnnnnnnnnnnnnnnnnnnnnnnnnnnnnnnnnnnnnnnnnnnnnnnnnnnnnnnnnnnnnnnnnnnnnnnnnnnnnnnnnnnnnnnnnnnnnnnnnnnnnnnnnnnnnnnnnnnnnnnnnnnnnnnnnnnnnnnnnnnnnnnnnnnnnnnnnnnnnnnnnnnnnnnnnnnnnnnnnnnnnnnnnnnnnnnnnnnnnnnnnnnnnnnnnnnnnnnnnnnnnnnnnnnnnnnnnnnnnnnnnnnnnnnnnnnnnnnnaaccactcctgacacgttggactcaagttactactccaatcttcaacttcaaaagggcctgcgtccgagtgacccggagctccttgccgctgtcgacactgtcattggtgaccaaactcttttctttgaaagcttccaggcgtctttctttgaaatcggcgccgctgcagtgcttacgggggcccgcggtggagtccgatcgcgatctgatgctgtgattcgaactccttgtaattttgtgaacggaaattcttctgctcttaccaccgaaggatcttctcaagatggcatggttagctcaatgtaaaataaatggacaaaggttatatatgctggaaaatgctggggttaaaggtgtcaataaagagttctgtatatgcatatatatatgccatgtgcatgtggtgagccgttataaactgaattgtactttgaattctatacacctagctttgtattataccctgccgtgtggacaaactatatactactaaataattgctgtcacaagcaatcatgaactccatactgccttaaatttcaatatgtattaatgaagttgagttaaaagtatcacttcaataaaagggcccctgtttcn

SEQ ID NO: 814 - DNA, 469 bp, Glycine max
  Peptide Sequence Number=SeqID_9057
  Probeset Number=SeqID_10593
gaatcgggaaaaattgatgaatatggacggttcgggttgaactgggggaaggggcaccgtgagaagaaagaagaatgctgtccacaagacaacaaccacatatgacatatggcttcagagcaccctgaagagaataggggtgaatgccatcccggctattgaggaggtcaatatctttaatgatgacgtagttatccagtctgtatatgcgatagttcaagcatccattgctgctaatacttgggttgtcaggggttctccacaaacaaagaagatgcgtgatatactccttagcgttatccaccaattaggacctgataactgggactagctgtagaagctggccgtgcaattgcacatgcaagctcctgaatgagccactggatcgaccaccgtccaagatgagaatgatgatgacgatgtacgagagctagttgcatgccaggatgaagagacagctgctgatgag

SEQ ID NO: 815 - DNA, 1690 bp, Glycine max
  misc_feature (26)..(26): n is a, c, g, or t
  misc_feature (28)..(28): n is a, c, g, or t
  misc_feature (30)..(34): n is a, c, g, or t
  misc_feature (38)..(38): n is a, c, g, or t
  misc_feature (62)..(62): n is a, c, g, or t
  misc_feature (65)..(65): n is a, c, g, or t
  misc_feature (69)..(70): n is a, c, g, or t
  misc_feature (72)..(72): n is a, c, g, or t
  misc_feature (75)..(78): n is a, c, g, or t
  misc_feature (95)..(95): n is a, c, g, or t
  misc_feature (120)..(121): n is a, c, g, or t
  misc_feature (147)..(147): n is a, c, g, or t
  misc_feature (239)..(239): n is a, c, g, or t
  misc_feature (275)..(275): n is a, c, g, or t
  misc_feature (320)..(320): n is a, c, g, or t
  misc_feature (333)..(333): n is a, c, g, or t
  misc_feature (373)..(373): n is a, c, g, or t
  misc_feature (375)..(375): n is a, c, g, or t
  misc_feature (429)..(429): n is a, c, g, or t
  misc_feature (515)..(515): n is a, c, g, or t
  misc_feature (575)..(575): n is a, c, g, or t
  misc_feature (591)..(591): n is a, c, g, or t
  misc_feature (593)..(593): n is a, c, g, or t
  misc_feature (631)..(631): n is a, c, g, or t
  misc_feature (659)..(659): n is a, c, g, or t
  misc_feature (661)..(662): n is a, c, g, or t
  misc_feature (667)..(668): n is a, c, g, or t
  misc_feature (699)..(700): n is a, c, g, or t
  misc_feature (720)..(720): n is a, c, g, or t
  misc_feature (1077)..(1077): n is a, c, g, or t
  misc_feature (1089)..(1090): n is a, c, g, or t
  misc_feature (1092)..(1092): n is a, c, g, or t
  misc_feature (1237)..(1237): n is a, c, g, or t
  misc_feature (1334)..(1334): n is a, c, g, or t
  misc_feature (1356)..(1356): n is a, c, g, or t
  misc_feature (1384)..(1384): n is a, c, g, or t
  misc_feature (1400)..(1400): n is a, c, g, or t
  misc_feature (1474)..(1474): n is a, c, g, or t
  misc_feature (1517)..(1517): n is a, c, g, or t
  misc_feature (1565)..(1565): n is a, c, g, or t
  misc_feature (1571)..(1571): n is a, c, g, or t
  misc_feature (1617)..(1617): n is a, c, g, or t
  misc_feature (1624)..(1624): n is a, c, g, or t
  misc_feature (1643)..(1643): n is a, c, g, or t
  Peptide Sequence Number=SeqID_9058
  Probeset Number=SeqID_10594
ggggttttttttcggggtccttctcncncnnnnntctncccgtgcgcggcgtgttctactgnggngggnngntgnnnnctcctcaactacctttntttctgccacctgagtgcttcgggnnggtgtagcggcgcccccccctcccanagcataaggagaaggacataaaggatagacagcacccgccacccccctcgctctcgtgcgcttgccctaggtcagccggagagggatagccngcaccaatcgccacaaaactcggcgcctatcgcganctcgcccactgtcacgagcgctacactccgcacgctcatcgtggntggttgatgtgtnctgccttattctggcggcgcgcgtgtgtcggccgcttggntnagtgtgcgctgttggacgctgcgcgcctcaccccacagcagcgagagctagaanacagcggctggagaggtgagtgtctcgctcacgtccgccgcgacgagagtggcggtcgatgaggtcggagcgccggactaccggtncatgaagtccggcgcgtcgtgtgagatgaaggataacaagcgaaggcgcgaaagagatantgtatcgcgggcgganangaagccgcacacagcacgcagcgcggcgacagagaatnggaggatatcatgggtttcgagtgtttngnntatannttatatctacataggccggtgggatatgggnngggaagaggtggagacagcnatatggcggcatacacaaacacatgccatgtgcgaccgcatatgtatttgcaagatctatcgcagttagagcgtgtgagcgcgcggacctatgagaccacggacatatagcacagataaaaagacacacacggaagatcggacgacccggcaacccccaactatcagattatctatagcgactaaagattgtgttagaagacgaatgaacaacacggcgcctcaccaacaaaacgacgcccgccacgacatcaaagaggggtgataacacgcgcaatatagacgggacaccgacaccacaccacgcgcagccacgcaccagagcacgcaccgtcacagacggccactgtagcgccgngcagatacgttnncntctctctctgctgagtacactaactcagtgcgccgacgccgtccactcgcgcggtgcgctcgcgtgctgtgatgagatggaatggatatatggagagtcacgcgagcatatgctgggtgcgccctcggtacgcatgtaagagccnggcgtgactcactcaccaccacccaccactatgctgaggtcggaccagtcagagaatagagcgagaagtgcgttgaactatatatacacaccggcgncagaagcccactcgacaagaancaactgtgcgctaccacactcatcccanacacagaaaatacatntgagaatgacacaatagcatcgacgataacaacagacagagttacgcgcgcgcaccatctgtcacactgtggangcgtggcgcagatatcacgctgcacgcgtacatactcatcatntgagtatatgacacatctcgcacgcctgccactgcacatcgcacccancatgtngctatgtgtgctagacacacagaccaaacacacactgaagactcgnggtggcncgacaaccacactctactncacactctacaactcccagccacgcgtgagctatgcatcatcacacc

SEQ ID NO: 816 - DNA, 1395 bp, Glycine max
  misc_feature (1)..(1): n is a, c, g, or t
  misc_feature (738)..(738): n is a, c, g, or t
  misc_feature (928)..(928): n is a, c, g, or t
  misc_feature (1229)..(1229): n is a, c, g, or t
  misc_feature (1231)..(1232): n is a, c, g, or t
  misc_feature (1367)..(1367): n is a, c, g, or t
  misc_feature (1369)..(1369): n is a, c, g, or t
  misc_feature (1375)..(1375): n is a, c, g, or t
  misc_feature (1377)..(1378): n is a, c, g, or t
  misc_feature (1381)..(1381): n is a, c, g, or t
  Probeset Number=SeqID_10595
nggagtaattgtgataggtgatatatatatcaaaaaacatttactttttctacgtttttgaattgtgcttctctttatgataagtcaacataatagagtatctgtatattttgatattcaatattatgataagttttatataatataaaatagataatgagaataaatattataaaatttcgttgatcctatcaatcgtactaataatatgacaatgtattaaatatttaaccaaaatatttgtgtgtatgttgtcattatctatttatcttgtaaatttaaaataaattgtactgtactctctctctgcacatgtatactaaatactcatacaaactttctaccagataactaatatcttatatactcatcataattaaacaccactatgaaagtatacataacaagagaaatagtaatagataatgacatacaacatagactaatattgttatttttttcggaagtagtgaagttgtattggtatacatataccaacaaccaaataacatgatagtgaacggcttcagaaattttattatttaattataatttaatttatatatcaacaatatacaaatatagataatgtataatattagaatctaaacaccataaagatacatcttagatttgttgtcaattatttataattataaaatttataacttacattatatactcttaatactatatagtattacatggtctgtcgtaatgtctgtaagttacataagntatgtcataaccaattaatatattaaatcacaatcaattctaaaaatattttttttattattgtttatatatataatacaataaaaactaattatattaatatatctttattattatttttctattattttatattttaaaaaattatttaaaatttaatataataaactggtgtgggtctaatagtgtntttatcttattaataaaaaataaacataaaaaaaatgcagtttatttattattttttttttattttgtttcactcaagcataggtatctactatattctattttgggtggggggggggggggggataaataacacaacaacggaaaaaaataaattatggggtagaggtgggtgggtgaccaaaacacaccgagcaggggggtggggtggggaagacaccaaacaacacctccgaaggctgggggggggggctacacaaataggccaccgtggggtttttttcttgtaatatgttattttntnnttatttaataaacccacattttaatttaataaatgtgggggtttatttgataaccatactacctaataagttatacactttataacattaattcgttatgcgggggggcaccaaaaccggccccccccaccccgncncccgcncnnccncggcgcaaaaaaaa

SEQ ID NO: 817 - DNA, 1618 bp, Glycine max
  misc_feature (1)..(1): n is a, c, g, or t
  misc_feature (10)..(13): n is a, c, g, or t
  misc_feature (16)..(16): n is a, c, g, or t
  misc_feature (25)..(27): n is a, c, g, or t
  misc_feature (38)..(38): n is a, c, g, or t
  misc_feature (78)..(78): n is a, c, g, or t
  misc_feature (81)..(81): n is a, c, g, or t
  misc_feature (115)..(115): n is a, c, g, or t
  misc_feature (224)..(224): n is a, c, g, or t
  misc_feature (274)..(274): n is a, c, g, or t
  misc_feature (454)..(454): n is a, c, g, or t
  misc_feature (474)..(474): n is a, c, g, or t
  misc_feature (1270)..(1270): n is a, c, g, or t
  misc_feature (1437)..(1437): n is a, c, g, or t
  misc_feature (1463)..(1463): n is a, c, g, or t
  misc_feature (1519)..(1519): n is a, c, g, or t
  misc_feature (1618)..(1618): n is a, c, g, or t
  Peptide Sequence Number=SeqID_9059
  Probeset Number=SeqID_10596
naaaaccccnnnnaanccccccccnnnaccccggaccnaacatacaacatagtaacacaacaacaacacaactccttnctncctctataatctatatcatagaaaggtgaggtgnctcttctcatagtctgatgtacaaagggaattcatgtatgttttatctaactatattgagtcttactctccttcgccgcctccttagagatgaggattgtatctaagantaatgtcgagagtattaaaacatataatagatgaagaagacgatacagtnccgctcgccgccagctctcccctctctcgctcactctatgtgtacccgcgccgatggtcgtacacgactggtcggtcgctgctgtcggccagccgagctcgaaactaagaagataaaagttacttataggaataatgagtataaacctgctctgactcaacgtaagctagcgactgcgcnccgtgcgtcaacaagacagngcgaggcacgaagaacgcgagcgcgtacagacaggtaaaacgacaagatatagcgcgcggacccgcagggcatgcacgcgacgtaaggcctgactataacaacgaccacgcggcacacctcggcgtgtcgcggctctgcgtgggtatctgtcttattgtgtgcgtcgtgcattacttttgcgtctctctaatctcatctctcaatctcctcctttgatctaagcgacattagtgtgaaccagacgattaggccgcacattactaggcagtgtatcacatcattgactagtatgcgcatcgtatagatcgtgctcgtatggtttgtgtatgtgatgttgtttatctattgatattgatattaattaatgtgtacataggtgcgcgtgtcgcatgacatactgtttttgtgtgttgacgttacgtgtcttacgtatagtgatgtcgtatatagtgtttcgatcgcatgttaattatgacagctgctgtggcctgtgttagtgtgtggtatacatcatgtgattcataatgaatatataacagagtctgtaagtacgatgcggcggagctgttgtgtgatgcattgattgctctatctgcctctgcatcgcaatccaccatcttactgccgtcctgacgctgcgacgaatagcctcacgccctacctccgcgtaatgctgacctacgcgtgtacttcgtatatatatctctgtatctgcgcgtcgatcgtggtgtgtttagtattgtattttgtctatcttgatgtccgcatatattatgttcagtatagtctatcgantagatctgagcacgatacgtatattatcgaatatagtacagtgtcgcatagcgatgagtgtgatgtgatgatatctgatctactattctattgctacgtggtaactaacagaccactctggctgcgacggtatctatatgtgtctttgtaagtgcttgctgtcgcgntggcgagtcgatgaaggatgtcatgncgtgggcgctaaggagtgagaggattcatatgtagtatgacgatagtacaagatancacgtaataaactcagtagacgatgcgcactttgtgttagcacgatacgttacttcatagttatacacgtgctaactcactgcatatctctgccagtcn

SEQ ID NO: 818 - DNA, 1905 bp, Glycine max
  misc_feature (1)..(53): n is a, c, g, or t
  misc_feature (1856)..(1856): n is a, c, g, or t
  misc_feature (1905)..(1905): n is a, c, g, or t
  Probeset Number=SeqID_10597
nnnnnnnnnnnnnnnnnnnnnnnnnnnnnnnnnnnnnnnnnnnnnnnnnnnnnatatagagggagtagccccgaaaggcagagccacccaggctgggtacgcttttattccctttctttccatgttggcggggggggggtaacatttccccccgcaagatccagcgaatacttggactagggccaggcccccccttcccctttaaaagaaaaaaatcgggctcccgcgcgggggcgccgtttagaacttacgctccccggggaggaagcacacgcccgacactccttgaaaaactttatggaaaattttcaatcttctctgtttagcagataattccgttggaaaatctcaggaaaaaaaatgaagggggtgaaaggaaaattcctgaagaagctcaaatccatcaaaccaatcctgaagcaagatttaattctccagatcaaggcctcagatgggtacgtccattttctcccaaagattccgagtttcaatctgcattccccgtttgtttcccgagaaaacaagcccgagaaagttgttcagagctgcgagaaaatgcaggacgaacccgaggtgatcgacgttgcagagctgatgaaagaccttgaggaagaagatgattacaatgacaacaaagagaacataggtccatgttcacagaaaccccaacaacaccacaagggtgttttgcagaacgggaacagagcaaaaacagattcaaaacagagaggggttttggaggaaaaaaagtcttcaccagaaaatgctgacaataacaacaacagaaacagcaacagaaaaatccctttgttagacactgatgttccatcgttccggcggccggacttgaactccggcagcctattcgatccgaatctactggccgcgttcgagcaagccgtgaaggaacattctagaataacagaagaacagaggagaagcagagtcgaagaagagtcttcacagaaagtggaagatgatgaccctgaccctttgatgttctttgaagagaagtgtccacccgggggcgacggaatggttattttctacaccacgacacttaggggaatcctgaagacattcgaggattgcaacaaaatccgcttcctcctccagagtttcaaggttttgtattttgagagggacatttcaatgcacaaggagttcagggatgagttgtggagcagtttggaggggaaattagtgcctccaaggctttttgtgaagggcaggtacattggtggagcagaagaagttctgagtttgcatgagcagggaaagctgaggaaaatctttgaaggggttccaatggattattctaatggtccttgtgatgcatgtggagggataaggtttgtgctgtgcttcaagtgtaatggaagccacaaggttatggcggaaaatggagagagcaatcagtgccttcagtgtaatgagaatggattgattttgtgcccatattgctgttagcttatgaagaagaatatcagttaaagtaatagagttttatacttagtgtgttctatccattgtgatagagtttgtacttaattgaatttgtgtgaactggattttttttctttcaaaaaaaaaaaaaaaaagataaacgagcgtgtaacctctagggggggggcccggtacacgaactatatactaccaatttcaaccctatagtgggaacgtattacaagcggccacagagacgacgttattcaacgtcagtgactgggagaatcgctgtggttacccagcttagtcgctttgaggaattccccctttcccccagctgcgttaatagcgaaagggccgcagcaatcgcctttcctaaagttgacgaacctgatggggaatgttanttgtaattgtaatattttgttaaaatcccggcaaattttggataaccgn

SEQ ID NO: 819 - DNA, 1434 bp, Glycine max
  misc_feature (85)..(85): n is a, c, g, or t
  misc_feature (120)..(120): n is a, c, g, or t
  misc_feature (346)..(346): n is a, c, g, or t
  misc_feature (1307)..(1307): n is a, c, g, or t
  misc_feature (1317)..(1317): n is a, c, g, or t
  misc_feature (1337)..(1337): n is a, c, g, or t
  misc_feature (1415)..(1415): n is a, c, g, or t
  misc_feature (1417)..(1417): n is a, c, g, or t
  misc_feature (1420)..(1420): n is a, c, g, or t
  Peptide Sequence Number=SeqID_9060
  Probeset Number=SeqID_10598
agagagaatatatatataaggagatgcgagaagcggcgagagatatgcgatgtggaggacaagacaacgcgacggggaggtggtnagacctcaccagagtgggtgaccagtgcgcacgcnagaggccacacaggacgagtgcatgagcgacacaacgtcctgggtttggtggcaaacgtgggtgattacaccgagacgtcgatagatatcatatgtgtgcggtataagagagtcaggacagacaagtgatagagcctttatacgcgatcatggacacgccgatgaaacgcgagcgaaggaggaggcagaggcggaggcgcgtacgccgggagttagtgaatgtcgngtaggtgcatggtgtgagggagggaaaacgcacgagcagtgcatgcgttcactcgattctaccgaggcgtgtgcgcggcggaggacgtcggagagcacctgcgacgataggcgttgaaaatcaccacctcaaaagtcgcgttgtgcacactacaacgcccgttagggaacgagatttgttagaagggtatccgttcgaccacacaccgccttcgcaaccacgcccggcgagcaggtgtcggacgcaacagggcacgcccgcagacgaacgagagatttcacgggaaaacaacagccacatcagggggctaatggaggtacgtcactgaataggcctcctgtgcaacacctgttcgcggctgcggcgggcgcagagcccgttggattttgtttagattaactgtgattgctagtacgtgatatggcagatgtaggaggtatacagttagtagaggagaatcaataagtatgaggagagaggtgcgcgggtcgtatctaggactccagcgcgctagcgggacggtgacgagagtggtagattcattgtatacacaagcagagaaatgatataatagaggtgagggagaggccgaagagaaagtgggggtccgaagaattagacgatcgtattgggggtcgaacaaacagaatcaccgctctcactgtttctgatcatatttattgatgtgtgttttattattattattgtcgccctagtttcgagtcgtggaccagctacaaaagatgagcacgagcaagaacaaacagagaccaacataccagccccataacccacacacgagacgggcgcggcggcgatgtgaacaggttcttaaaccaaaacctccctgacagatacactctcccgcgggcaaccccacaacaaaccaacccccgggggcgtgtcgtcggtgcacaagggcgcggcccggtacagccgacgagacctgcggggggtggangggagggcanaaaatcatgggtttttctcngcagcgcaaacagcccgccttagtgtcgacaagctgccggaccctcatccgactccgctgtcggccggcccccctccncncgnataaacaacaaaaa

SEQ ID NO: 820 - DNA, 1367 bp, Glycine max
  misc_feature (72)..(72): n is a, c, g, or t
  misc_feature (113)..(113): n is a, c, g, or t
  misc_feature (116)..(116): n is a, c, g, or t
  misc_feature (288)..(288): n is a, c, g, or t
  misc_feature (294)..(294): n is a, c, g, or t
  misc_feature (314)..(314): n is a, c, g, or t
  misc_feature (865)..(865): n is a, c, g, or t
  misc_feature (871)..(871): n is a, c, g, or t
  misc_feature (904)..(904): n is a, c, g, or t
  misc_feature (911)..(911): n is a, c, g, or t
  misc_feature (918)..(918): n is a, c, g, or t
  misc_feature (922)..(922): n is a, c, g, or t
  misc_feature (929)..(929): n is a, c, g, or t
  misc_feature (1026)..(1026): n is a, c, g, or t
  misc_feature (1102)..(1102): n is a, c, g, or t
  misc_feature (1107)..(1107): n is a, c, g, or t
  misc_feature (1141)..(1144): n is a, c, g, or t
  misc_feature (1146)..(1146): n is a, c, g, or t
  misc_feature (1197)..(1197): n is a, c, g, or t
  misc_feature (1264)..(1264): n is a, c, g, or t
  misc_feature (1344)..(1344): n is a, c, g, or t
  misc_feature (1349)..(1350): n is a, c, g, or t
  misc_feature (1359)..(1359): n is a, c, g, or t
  Probeset Number=SeqID_10599
ctctcatctattacattctaactatatctacatatatctatcacaactcagccctcttttatatcacatatnatacttatcgccttctactcttacatatacccacatttttntantgctcctttattctatatatacctcacttctcatactatcactccactcttccatcatatattttcacatccaattcatactactattctaatatttatctcatctctcttaatttcatcttctctcatactcatctcttccttcgtacttcttctctcttctcactccatntcctcncccactccacctcttctctnactctgttctttctcatgctgcacactcctcttccatctctccatcttctcttctatctctccattcatcttcatctatctcttctcatcctattatttctaatctcttcttatcttctccacatctactttcattactccctcgctttatatccctgccatactactctctctctcatctctacatccttctctacctctcgccttcttctcctctcgcatccacatccctctcattcccttcccttctcccttcacatcatacctactcagccttctttcttctctattaatcactctacttcttctcctacctctctctcatctccctctccttccttctttttatccctctctctcattccatcaccttcctacacccactactctccttccccctctcctctgattcacccctctctccctttccctccttcttctcctatccctatactcttctcatctcttctcttcttcgttctcctctttctcctcctccctctcaccctcctatccccttctcttctttctctcttctttacacctcatancaaaanaactcattccaccgcacaccataccatcgacanacgcacncccttcnctgngattcanacttcacagacccatctctctccatattctctattctcctctctttttcccactcacatcctccccatactctcatctatacatccctatattattnctagcggagacaacacacaaccttcttttcttctctcccacattcccacacccatctactccctctccctctcctnctccnctctccacctattctttatatcaatgagcaaatnnnntngtctatcacctccactcactacttctctgtatatagaataaacctttctcnctcctcacattaccccacatacatactctctttcctattctctttaatattcttaacactaactatncaacaatcttcacttgttccctctctctctcccctcccctccctcctattacttcacctatatctctcttatcttccaanaaaannactaacttngtaaaccc

SEQ ID NO: 821 - DNA, 529 bp, Glycine max
  Peptide Sequence Number=SeqID_9061
  Probeset Number=SeqID_10600
tactatactaccaatcatctatattatgtggatccggtcccacgagttccatgatgtcagtattggcattcgtatgattactcgtcccttgcgacgatgctaatacctctacatgtactggcagctgtccctcggctccctagttctcgacatgcgtgtacaagaacacacgcgcgtttgccatcgtatcctcctcacctacggcgttgacctcgtcctcaacgacgtcaatacgttgctttcctacacgcagtccgaaatcataatactggagattagatccgagttctgacactatgaccctcccgaattctacatgtacctgtaggaacagctgggggagcatctgatccatcatgacgacgccgtgtttggtaataccgtggcggagttgttgtcaaagagagttatctgcgtttggaagccccagaaatcgttccagcccaaaccctggagtcctctctggagtgccggcctttctgaggattattggatcaacacggatctgacttcaaccaagttcgacggc

SEQ ID NO: 822 - DNA, 472 bp, Glycine max
  Peptide Sequence Number=SeqID_9062
  Probeset Number=SeqID_10601
gttggtcgaagaactccgttcacaatctatggcctgtgctggatcctacaacacctatccgtctctatcctgatccatacgcattaacggttacatactcatggatggtctatcatgctaggttgttgaagtttgtacttccaagattgttaatcacgtgtatgcctagggtcactttgctgggatggatattattactgtgatgaatcttgagtatattgtgtcctcttgtctcatctgtgatgttactcatgtgaatcgtactgattaccagttgattgacattgctgaggatggatatgttagcttgcttactgaaaatgggaacaccaaggatgacctgaagcttcctactgatgatagttggcttactctgataaaggatgggtttgctgatggtaatgaccttgttaggtcggttgtgtctgcagtgggtgaggagcatatctgcgcctctgaggatatagtgcca

SEQ ID NO: 823 - DNA, 435 bp, Glycine max
  Peptide Sequence Number=SeqID_9063
  Probeset Number=SeqID_10602
atcatctctttcttcttctactagttataagcaatggcaaagtctctagctgggttggcgcttctggccgctcttgttatagcggttgatgcgtttaggccttctggtttaaccaatggccacgccacattctatggagggagtgacgcttctggaacaatgggcggagcttgtgggtacggagatctctactcggcggggtacggtacaatgacggcggcgctaagcacggctttgtttaacaacggagcttcttgcggcgaatgctataggataacgtgcgactacgcggcggactcacggtggtgcaaggaaggagcttcggtggtgataacagcaacaaacttctgcccaccgaacttcgctctccccaacaacgacggtggctggtgcaacccgccgctcaaacatttcgacatggcacagcccgcttgg

SEQ ID NO: 824 - DNA, 487 bp, Glycine max
  misc_feature (181)..(181): n is a, c, g, or t
  misc_feature (186)..(186): n is a, c, g, or t
  misc_feature (189)..(189): n is a, c, g, or t
  misc_feature (194)..(194): n is a, c, g, or t
  misc_feature (202)..(202): n is a, c, g, or t
  misc_feature (206)..(206): n is a, c, g, or t
  misc_feature (211)..(212): n is a, c, g, or t
  misc_feature (215)..(216): n is a, c, g, or t
  misc_feature (222)..(222): n is a, c, g, or t
  misc_feature (224)..(224): n is a, c, g, or t
  misc_feature (227)..(227): n is a, c, g, or t
  misc_feature (234)..(236): n is a, c, g, or t
  misc_feature (239)..(242): n is a, c, g, or t
  misc_feature (249)..(250): n is a, c, g, or t
  misc_feature (255)..(255): n is a, c, g, or t
  misc_feature (263)..(263): n is a, c, g, or t
  misc_feature (265)..(267): n is a, c, g, or t
  misc_feature (280)..(280): n is a, c, g, or t
  misc_feature (283)..(283): n is a, c, g, or t
  misc_feature (288)..(288): n is a, c, g, or t
  misc_feature (290)..(290): n is a, c, g, or t
  misc_feature (297)..(297): n is a, c, g, or t
  misc_feature (299)..(299): n is a, c, g, or t
  misc_feature (303)..(303): n is a, c, g, or t
  misc_feature (307)..(309): n is a, c, g, or t
  misc_feature (312)..(314): n is a, c, g, or t
  misc_feature (316)..(316): n is a, c, g, or t
  misc_feature (318)..(318): n is a, c, g, or t
  misc_feature (321)..(321): n is a, c, g, or t
  misc_feature (323)..(323): n is a, c, g, or t
  misc_feature (325)..(326): n is a, c, g, or t
  misc_feature (328)..(328): n is a, c, g, or t
  misc_feature (330)..(331): n is a, c, g, or t
  misc_feature (333)..(333): n is a, c, g, or t
  misc_feature (335)..(335): n is a, c, g, or t
  misc_feature (340)..(341): n is a, c, g, or t
  misc_feature (344)..(345): n is a, c, g, or t
  misc_feature (349)..(349): n is a, c, g, or t
  misc_feature (355)..(355): n is a, c, g, or t
  misc_feature (360)..(361): n is a, c, g, or t
  misc_feature (364)..(366): n is a, c, g, or t
  misc_feature (370)..(370): n is a, c, g, or t
  misc_feature (375)..(376): n is a, c, g, or t
  misc_feature (379)..(383): n is a, c, g, or t
  misc_feature (385)..(385): n is a, c, g, or t
  misc_feature (387)..(389): n is a, c, g, or t
  misc_feature (393)..(393): n is a, c, g, or t
  misc_feature (396)..(398): n is a, c, g, or t
  misc_feature (401)..(404): n is a, c, g, or t
  misc_feature (406)..(407): n is a, c, g, or t
  misc_feature (409)..(412): n is a, c, g, or t
  misc_feature (416)..(425): n is a, c, g, or t
  misc_feature (427)..(427): n is a, c, g, or t
  misc_feature (434)..(434): n is a, c, g, or t
  misc_feature (436)..(440): n is a, c, g, or t
  misc_feature (444)..(444): n is a, c, g, or t
  misc_feature (446)..(447): n is a, c, g, or t
  misc_feature (449)..(449): n is a, c, g, or t
  misc_feature (451)..(456): n is a, c, g, or t
  misc_feature (458)..(461): n is a, c, g, or t
  misc_feature (463)..(464): n is a, c, g, or t
  misc_feature (468)..(469): n is a, c, g, or t
  misc_feature (471)..(471): n is a, c, g, or t
  misc_feature (473)..(475): n is a, c, g, or t
  misc_feature (477)..(486): n is a, c, g, or t
  Peptide Sequence Number=SeqID_9064
  Probeset Number=SeqID_10603
atttcttcaaaccttatctttcctcaaaaacacacacagacgatggcgtcgctgctaatcggagctcctccgcgagtcaccgtcgcatcatcttcgaggctatcatcatctcactcggaaaccgtcggcgtctctctcccttgcttcactcagcagctgtctctctccgcttcggcatcangcagntcnattcnccttgtgnaccngggtnnganncgaccncnccnttttttnnnagnnnnagtggcnnactcnctccctcngnnntgtttgtaccctnccnccccngntcggggngngganctcnnntcnnnancnccncncnngncnncncntggtnnggnngtgncccggngcggnntcnnngggngcggnnggnnnnngnannncggnggnnncgnnnngnncnnnnccgnnnnnnnnnncnggcgtgncnnnnnatcntnncnannnnnncnnnngnnacgnngncnnngnnnnnnnnnng

SEQ ID NO: 825 - DNA, 428 bp, Glycine max
  Probeset Number=SeqID_10604
atttttttttttttttttacacaaaagtaataataggcttacatttgaaagaaaaaaattacaaatgtcaatggctacatctaaaagaaaatgaaaaaacaaaataaatttgtcgttgttatgccccaagaatccctgaaacttttggtgtgcatttgataactagccacttctttggtggtggacatatgtgtcataacatctagtgactacaaatatttatttcctagtcttactgaaatcccatgaacacttcaaacgtcttgtccctttaaccttgggctcttcaaccctctccataacccaatatcaaatatcatcaataccaaggataattttcaggttgttctccaaagccaaataaactttagctactatttgtgcctcaaccctcaaccccgtatgatctttgcattttctcctcgtgc

SEQ ID NO: 826 - DNA, 556 bp, Glycine max
  misc_feature (317)..(318): n is a, c, g, or t
  misc_feature (322)..(323): n is a, c, g, or t
  Peptide Sequence Number=SeqID_9065
  Probeset Number=SeqID_10605
tgcggccaacggtctcacccaaacggaaatgatagctctatcaggtgctcacactgttggattctcccattgcaacaaattcactaacagagtatacaattttttgaggaaaagtcaagtgttttttttttttaacgagattttcgcttcacagctaaggtcaatgggcccagggaatgtggcccccccgctcgcaatcgatttggacccagccactccacggtcattcgacaatgtttagttcaagaatcttcagcaagggaagggcctcttctcgtcagaccaagttctcttcacgggctcaagatccaaggccnncgcnnaggcccagctagtagcagcaagatctttcaggccaacgtcgctgccgccaggaccaaagtgggccgaggaaaagctcaatttgatcccaacagaatattgtcacctggacaggggattttcaattaaatgtaaaataatctatgattcaattttccatctttaattttatagtatactacgtctaatttgttgtacaggtgctaataaagcagtttactaggtaatagatgca

SEQ ID NO: 827 - DNA, 767 bp, Glycine max
  misc_feature (484)..(484): n is a, c, g, or t
  misc_feature (493)..(494): n is a, c, g, or t
  misc_feature (497)..(497): n is a, c, g, or t
  misc_feature (506)..(506): n is a, c, g, or t
  misc_feature (533)..(533): n is a, c, g, or t
  misc_feature (540)..(540): n is a, c, g, or t
  misc_feature (560)..(560): n is a, c, g, or t
  misc_feature (566)..(566): n is a, c, g, or t
  misc_feature (596)..(596): n is a, c, g, or t
  misc_feature (606)..(606): n is a, c, g, or t
  misc_feature (626)..(626): n is a, c, g, or t
  misc_feature (630)..(630): n is a, c, g, or t
  misc_feature (636)..(636): n is a, c, g, or t
  misc_feature (645)..(645): n is a, c, g, or t
  misc_feature (653)..(653): n is a, c, g, or t
  misc_feature (659)..(659): n is a, c, g, or t
  misc_feature (661)..(661): n is a, c, g, or t
  misc_feature (674)..(674): n is a, c, g, or t
  misc_feature (688)..(688): n is a, c, g, or t
  misc_feature (695)..(698): n is a, c, g, or t
  misc_feature (703)..(703): n is a, c, g, or t
  misc_feature (707)..(707): n is a, c, g, or t
  misc_feature (712)..(713): n is a, c, g, or t
  misc_feature (722)..(745): n is a, c, g, or t
  misc_feature (748)..(748): n is a, c, g, or t
  misc_feature (751)..(752): n is a, c, g, or t
  misc_feature (764)..(767): n is a, c, g, or t
  Peptide Sequence Number=SeqID_9066
  Probeset Number=SeqID_10606
taactgttatttttttgctactttgttgtatggtttcacaactgttataagaataattttgacagcttgtatgggcctaaatttctagctcatggttatgctacatttacggaaagcaatgttaattcagcaatcagcatggcaaaataatgtcaggatggctaatctggttgagcaaatccgtggtccactttcaagtatttaaaccttaagtaaaatcctatctacagagacaaagaggactcagatttcatatgacattgttgaagacctcttggtgcaaggtgatcgtctgagggatgttctccatcaactacaggataccgtttatttgacaaaggggatgtctctgcaaataaaatgaaaaaatctagtgagtcactttctctaagtgctgctgccaggatatagagatccctgccccttggccctgctccatgcacatgggaatcagacatgcatgttctcagtatggaaaactggnggatcaggnnacnctgccaggnaaaaacgttataaactaggaccctatntcccttntactgtgaaaaaccgcttgncagctncattttgaggcttcatccctgtgagaagtnattgttaggncccctgggcctgctttgtangccnctggcnccccctggnaacgtgtnttatananaacgatggggganggtgaaaaaaatgnccctttnnnnaactngggnggggnnttttttttnnnnnnnnnnnnnnnnnnnnnnnnccnccnncaaaaaattttnnnn

SEQ ID NO: 828 - DNA, 1366 bp, Glycine max
  misc_feature (189)..(189): n is a, c, g, or t
  misc_feature (201)..(201): n is a, c, g, or t
  misc_feature (270)..(270): n is a, c, g, or t
  misc_feature (542)..(542): n is a, c, g, or t
  misc_feature (547)..(547): n is a, c, g, or t
  misc_feature (692)..(695): n is a, c, g, or t
  misc_feature (723)..(723): n is a, c, g, or t
  misc_feature (944)..(944): n is a, c, g, or t
  misc_feature (1002)..(1002): n is a, c, g, or t
  misc_feature (1231)..(1231): n is a, c, g, or t
  misc_feature (1237)..(1237): n is a, c, g, or t
  misc_feature (1239)..(1241): n is a, c, g, or t
  Peptide Sequence Number=SeqID_9067
  Probeset Number=SeqID_10607
ggcgcacagcaggcacacagatgatgtctaggtgaacatctgtctccgcggacacggtgtggatgtgcaggtgtgtcgatccactgtatgtagtgtcgacagaacgcgaagcgaacaacaacaacacgcatcatggtgtagcgagagagatcagcatattaatatgtagtatgagcctcaccaccaacncacacggcgggngcgccagcttctgtcaccttgttgtttcttggtgtgtagctacgcgtgacttgtcatttgacaacaccncgaaatatcatagtcattgaacacagtgctgatatgttatcgagatgtggtggtctgagtgagactgagtgatattatcgtcacaaatcgatcgagtctcgcgtcttaccatactgtatatcgtagaactaggtgtaggctacatccctatattctgttatattagttataccggtattatttcgtgctcgtcgacaggacacaaagtgttgtcgtagtgtatcagtaatcttataagaattatgcagtagtgcttccaccgagtgacgcgnggtgngggagtgagagagcagagagagacgtacgtctccctcttcccactagatgtaggttgaggggggcggagggacacgtgaggtggtgggtgtaacaatgatatcgcttattatttatagttagttattattattatcatactcaannnnacttattaaattatattaattactaatnactattatatactataccatattctactaccaacaactctactgtaaatccattctagcgatagttgtgtcaccttggggagggatagagcgtggtgggagggcacggccgccaccacgcacgttggtccagcggccgaatacgcgcccgcccccagcctacaacttagatatcacataacatcagacggcaagggtgtatgggttgtgtgctccactcangttcttagagagtatgaaagatgtatgagtgaggacgccatacctccaaggactacanttttcctaattgctgatgttggtgttctgttgtttttggaacaattggatgtcttatatgactacaaattcacaccatagtcaaagagaataggggagcatcacccacctatatatgtgtaactactttgatgttgtatattgatacacctcacgacacaagcaagaaagcatagaaaacgacacattcccaccccccacacgtcgagtggggtgtctagtctatgtgnggaagnannnggccggccacccacccggacggaagcacgcgacgacagtatgtcgtggtggtatgatggttgaatacctacgagtaatatccacaataagatacaacacctcacacccacaaaccaccaccaccc

SEQ ID NO: 829 - DNA, 568 bp, Glycine max
  Peptide Sequence Number=SeqID_9075
  Probeset Number=SeqID_10608
agttgctgtttggaagaaagcctgtttaatggttaaaattgtaatgtctgggaatgcagcagtcaaaaggagtgattggccttcattggtccaagtgtttttagcaaacagcaacagtccagagcatttttatgcttgtaagtggacaaaatcggagccacattcctgggaattgttcttcccaatagagggatgtggtcctaataatggttttgaaatgtggagttttgagtgggcaaatccaatttcagggcagttgagtttcttttttggcaatccccaacagtgcacagtttttgtatatttttttgggaatttctcaagattttgaaattggggggaacactcttaggccagctttttttgttccccaggattctgccagatttttttaaaaggcggaatcctccgcatggtctgggatttgcgttttttttagtttgttcgtctgtttaattcaaaaaaggaaattaggcatggccctccctgttgagtacggtctgtctatttaaaaatttccccccctcttttaattgtagtaattatgtgttaagtgtgtgttattttc

SEQ ID NO: 830 - DNA, 1381 bp, Glycine max
  Peptide Sequence Number=SeqID_9076
  Probeset Number=SeqID_10609
attatttatcttcaacaaaggacaggagcagagtgatccaacatacatgggtctcactgggtctaagcttgagaaggctttaggtgctaatgttcctgagaacgagagatactttggacttgaaaattttggaaacacttgttattgtaattcagtgctgcaggcactatatttctgttctcctttcagagatagattattagaatattttgagaaaccccataaaccaacagaggaagaagataatttattgttgtgtttaggtgaattgttttcttcaattaatacacaaagaaaaaagactggtgttattgcaccaaagaaatttgtgcagaaactaaggaaagaaaatgagttatttaggagctatatgcatcaagatgcacatgaattcctgaattatttgctcaatgtggttgctgagatccttcaaaaagaacagaaagatttaaaagaattgaaagataaagagacgaagaaagaagaagaaagcactacagcaaatacagaaaagaacaatatagatgatacaggaagcacatgttccagcgacaacgagacctcgcctgatgacgagcccaaagagaagagaaagaaaaagaagggtcctgcatctgaagtcccagcaaagagttttcctaacacaggtaatttgtctctcttcctttccctcttcttttcttcttcttttctcttaacttgaattagaaggaggaacgtttgttcatgatatctttgagggaacattgacaaatgaaacgaagtgtttatgttgcgaatgtattacttcaaaggatgaatcatttttggatcttagtattgatgtggagcaaaatagttcattaacaaattgtttgtctaattttagctctattgaaactttgtctcgtggagacaagttcttttgtgataaatgctgttctttgcaagaggctcaaaaaaggatgaaaataaagaaacttcctaaaatattagtggtacatttgaagagatttaatttcatcgagcagttgaatcaatacaaaaaattaagttacagagtcgtattcccactcgaaatcattytccagaatacttytcatgatgccgtgcaaccagaaaatagatataatttatttgctgtagtcgttcatgtgggaagtggtcccaatcatggacattatgtcagtatgatcaagagtgcaaatacgtggctgctatttgatgatgacaacattgatgtaattcaagagtcagagttgactgcttgctttgggtcatcacaggatgtggttgccaatacagattgtggatatttgttgttttatcaagcagcgagtgaagaggccaaatgaggtggtgtacattactcattagttagtgttgtacttgtaaaaaatgc

SEQ ID NO: 831 - DNA, 913 bp, Glycine max
  Peptide Sequence Number=SeqID_9077
  Probeset Number=SeqID_10610
atcctgctctctctcccgtccattcatcctccacctctcgatctagcacagcggcatggcacgagcagcgcgcggcggtgcggcataggcaggatcacggcagtgctgcccacctctggcctccacatcttcctccccgacggcggcttggaacaacgctcggttccgctcccgcgtcctcatgcgcacggactggatcccagcggtgcagtccaccggcctccgcctcttcctccccgaccgtggctcagctcgacccgcggccgccctccccgaccgtggctcagttcgacacactgctgccttcccctactgctggaggtcgcgccactgccctcctcgtcgtcaccaccggcgcgggcgcgcggcggtcgcaaccccatggaggagttgagcgggcgcgtgaaggcgctgttggtgggattcagctcgtggatggtgaagcggcccatccatgtcgaggcggcagtgaccccaacgatkgggccggggcgctcgggttccccatgggstcgctcmctgccaawggcgggtysccgtttgtcgtgtcmccggccatggsatytttcaagcaggsgcagttggtacatytcccmcctgattgatgcggacmccmctgtcctcgagctgaacagggtgagtarattttgagctgtttaaggtgtggactgttgtgagttgttkaaggtatggactgttgtgtggttccagtaaaattataaccgtacggatgtttytgtgtgcatgaaatttgcgttgtaccatgtccctgatatcatgcatttcatcgatacagtacactactagarctgctatctyttggtgttcattggttytgattgaacttgtatyttaataaccattaagtaattgctttttccatgtaataaattwatttgkagttgtgcatttt

SEQ ID NO: 832 - DNA, 1982 bp, Glycine max
  misc_feature (22)..(22): n is a, c, g, or t
  misc_feature (66)..(66): n is a, c, g, or t
  misc_feature (70)..(70): n is a, c, g, or t
  misc_feature (152)..(152): n is a, c, g, or t
  misc_feature (188)..(188): n is a, c, g, or t
  misc_feature (302)..(302): n is a, c, g, or t
  misc_feature (364)..(364): n is a, c, g, or t
  misc_feature (366)..(366): n is a, c, g, or t
  misc_feature (409)..(409): n is a, c, g, or t
  misc_feature (444)..(444): n is a, c, g, or t
  misc_feature (448)..(448): n is a, c, g, or t
  misc_feature (530)..(530): n is a, c, g, or t
  misc_feature (541)..(541): n is a, c, g, or t
  misc_feature (617)..(617): n is a, c, g, or t
  misc_feature (749)..(749): n is a, c, g, or t
  misc_feature (802)..(802): n is a, c, g, or t
  misc_feature (807)..(807): n is a, c, g, or t
  misc_feature (843)..(843): n is a, c, g, or t
  misc_feature (872)..(872): n is a, c, g, or t
  misc_feature (1030)..(1030): n is a, c, g, or t
  misc_feature (1048)..(1048): n is a, c, g, or t
  misc_feature (1054)..(1054): n is a, c, g, or t
  misc_feature (1059)..(1059): n is a, c, g, or t
  misc_feature (1245)..(1245): n is a, c, g, or t
  misc_feature (1283)..(1283): n is a, c, g, or t
  misc_feature (1321)..(1321): n is a, c, g, or t
  misc_feature (1395)..(1395): n is a, c, g, or t
  misc_feature (1461)..(1461): n is a, c, g, or t
  misc_feature (1466)..(1466): n is a, c, g, or t
  misc_feature (1527)..(1527): n is a, c, g, or t
  misc_feature (1540)..(1541): n is a, c, g, or t
  misc_feature (1553)..(1554): n is a, c, g, or t
  misc_feature (1563)..(1564): n is a, c, g, or t
  misc_feature (1566)..(1566): n is a, c, g, or t
  misc_feature (1651)..(1651): n is a, c, g, or t
  misc_feature (1657)..(1658): n is a, c, g, or t
  misc_feature (1668)..(1668): n is a, c, g, or t
  misc_feature (1708)..(1708): n is a, c, g, or t
  misc_feature (1737)..(1737): n is a, c, g, or t
  misc_feature (1769)..(1770): n is a, c, g, or t
  misc_feature (1780)..(1780): n is a, c, g, or t
  misc_feature (1789)..(1789): n is a, c, g, or t
  misc_feature (1803)..(1803): n is a, c, g, or t
  misc_feature (1819)..(1819): n is a, c, g, or t
  misc_feature (1840)..(1840): n is a, c, g, or t
  misc_feature (1843)..(1843): n is a, c, g, or t
  misc_feature (1850)..(1850): n is a, c, g, or t
  misc_feature (1863)..(1863): n is a, c, g, or t
  misc_feature (1877)..(1878): n is a, c, g, or t
  misc_feature (1892)..(1893): n is a, c, g, or t
  misc_feature (1904)..(1905): n is a, c, g, or t
  misc_feature (1909)..(1910): n is a, c, g, or t
  misc_feature (1915)..(1915): n is a, c, g, or t
  misc_feature (1917)..(1917): n is a, c, g, or t
  misc_feature (1919)..(1919): n is a, c, g, or t
  misc_feature (1922)..(1930): n is a, c, g, or t
  misc_feature (1932)..(1935): n is a, c, g, or t
  misc_feature (1937)..(1937): n is a, c, g, or t
  misc_feature (1939)..(1939): n is a, c, g, or t
  misc_feature (1941)..(1943): n is a, c, g, or t
  misc_feature (1945)..(1945): n is a, c, g, or t
  Peptide Sequence Number=SeqID_9078
  Probeset Number=SeqID_10611
ccttcgcgatccttcgttgtgnttcctcattcagcacgtgcgttgtagctcgacgtgtccgtcgangttngtcatctgacgtcgcacgcttgttatatcggtgagactagaatgatgactagcgatcgcgtcttacacgtcagcgcagtggntggttgtgtgattaagagcacataagtaactagtgntatgacgacgcaacaccatacaagatcagtgtaatcagtacacatatatagtgttacacgacgcagttgagtctctgatagacgagagcgcgtggtatgtattttcatcgttgnaatgagtgacgatggcattgtgtacaccatctatatgtatgctcgctcatcggcgtcctgcncncgtcgggtcgagtgggacagtagcactcatgtactatcgcgcncgagacctatctggtacagtcgacctccgcatcancgcngtactgactctcgcatccgtcgcacggtgtcggtgtggtcgccgacacgatgctgctagtgcgcgctagctgcgtggcacgnctgtcttcgtngcatgtgtgtagtcgtatgctcgcgtgcgtttctctacagccatattgtgcgtgtgcacatgtgatatcctgctcnaagacgcaacaacgacgagacgagttatccgagcgtatacgcgctgtcgcgagtgctgaagacacagatagatatcactacgcgtgcgtgcgcgacccacgacttatgatactagcggagacgggcaatgcnatcagctcacctagcgctatatcactactcgacgacaagtcgagcgatagatncgtgncactcgaatctcagatacgtgcactctgcgtccgtntttgtgcatactctatactctagaatggntcacaagtctagcatagtgtccgttcactgtacatgcggttgtatacgcagatcatagttataatgtgttggtaggtagatcacgccctgtgaggtcgtataacgcagagtcagcatagtaccgatcacatagtgagtgatccagtgttcgaattcantcacatcgactcggtctnttgcgntgagnaccacaccaactactattattgacataatatagtgatgtgtgtgttgtatgattatatattagtttgtgagtgctgagcgtcgctcaggcaccggtggagagtatgtcactcgttggaggcttggaggtgatccgtgttatatgttctgtaccgtctcctcgcacgcacttctcaccctctctcanactcttcaccaccacacgccgcactgacagatccacgncagacaagaagtctcagcatcacacagatctactgcangagtcggacacgagcgcgacatgaccatgccacagctagactgatgacgtgatgctgatgtaactgattttgtngtattatacgtgtgtttcgccgcgtcgggtgtttcttcgcctacctcgttcgtcggctcgagatcnaaganacaactcgtcacaacacagagcgcggcatggccggcgtcactcctattcactctcgcatgncaccaccacgtgnnaggggtgatatnngacatgtcnntntcgcggggagggactgagcgcaccacgcgacgcgtatctctggtcgccttcgtcgtcgtctcggtagtactagtatcctggctangagacnnaccacatccntacacacacacactacacgacaacatatcgagacgacganagtgaaagcgatattacatcgaaactatnctcccccaatatcatatactacagtgcgcaanncctcttctgnaatattatntgcccccagcaacntacagcgcgtgatcgnaattaaactcacataccagangtnacaccantccgtgacgagtngaggctagatgaannacaggaggagtggnngagaaccacgnncccnngtcgntncncgnnnnnnnnnannnnananannnanaagagagaggggggggcgccacaccacaccaacacac

SEQ ID NO: 833 - DNA, 740 bp, Glycine max
  misc_feature (740)..(740): n is a, c, g, or t
  Probeset Number=SeqID_10612
acgagaccccatcaattttcaaaccaacaactcctcagaagatcttggcctatccctccattgcttccaagaccaccctggcctcattcattggcaatcacaacagacaggtgcacatcaaacacctccttcaaatgaacaccaaatccgaaccctttttgctggctcaaccccaggtggctttgagaaccattatcaaagaagtgtgacttggaacaatgaagcaactaccactgatcatgtgaacaggttggggttcatactcaactcacagccatttataggccaaggttctacttcagcttatgctcaaagtggggggacccttcagtccagtttttcatttccaatgacttctccctctgagcttcacaggccccagccagtgaaccaaccttccatctttgacagcaggtttgtgtctgatggattagctgatttctgcattccagatagaattcaaggtgtggaagagaaccatggagttgcttccaataggccatcttcttcccctagttctatccactgatcccaaactaagcaatgcttaagtcttcctatcaggagtgttctctatcagattggcaaccgagtgaagattcaataggcatattgttatgatctacaaagatttcctttcaatttggctttccttttttcggtttttaattttaaagtgagttgcccttgattcaacccttgaaatctatatgtataattttgaattgatgaaaattacn

SEQ ID NO: 834 - DNA, 1416 bp, Glycine max
  misc_feature (3)..(3): n is a, c, g, or t
  misc_feature (21)..(21): n is a, c, g, or t
  misc_feature (33)..(33): n is a, c, g, or t
  misc_feature (45)..(45): n is a, c, g, or t
  misc_feature (47)..(47): n is a, c, g, or t
  misc_feature (51)..(51): n is a, c, g, or t
  misc_feature (232)..(232): n is a, c, g, or t
  misc_feature (397)..(397): n is a, c, g, or t
  misc_feature (459)..(459): n is a, c, g, or t
  misc_feature (609)..(609): n is a, c, g, or t
  misc_feature (658)..(658): n is a, c, g, or t
  misc_feature (850)..(850): n is a, c, g, or t
  misc_feature (908)..(908): n is a, c, g, or t
  misc_feature (1038)..(1039): n is a, c, g, or t
  misc_feature (1044)..(1045): n is a, c, g, or t
  misc_feature (1105)..(1105): n is a, c, g, or t
  misc_feature (1163)..(1163): n is a, c, g, or t
  misc_feature (1252)..(1252): n is a, c, g, or t
  misc_feature (1284)..(1284): n is a, c, g, or t
  misc_feature (1286)..(1288): n is a, c, g, or t
  misc_feature (1290)..(1290): n is a, c, g, or t
  misc_feature (1333)..(1333): n is a, c, g, or t
  misc_feature (1335)..(1335): n is a, c, g, or t
  misc_feature (1356)..(1358): n is a, c, g, or t
  misc_feature (1360)..(1360): n is a, c, g, or t
  misc_feature (1375)..(1375): n is a, c, g, or t
  misc_feature (1377)..(1377): n is a, c, g, or t
  misc_feature (1382)..(1382): n is a, c, g, or t
  misc_feature (1389)..(1399): n is a, c, g, or t
  misc_feature (1404)..(1408): n is a, c, g, or t
  Peptide Sequence Number=SeqID_9079
  Probeset Number=SeqID_10613
cgnttgtctatcgatgctgtncgtggatctgcncggtcttagcgncngctncgcactagcgtgctcacaacatacatcggcatctgctcgcgccactcagcacgcacggcatgcgccgtacagtaccgacacatatacacgcgacatgccgcatatgagtcgcaggtagtctaagagtgaagggaggtgtagatgattaattatagcgagacatagagtactacgtgaagtnactgcgatgtcatctcaacgtctgtatggtcctcgcagtagtatgcgcgcgatatagtaatatagtatattacgtcgagagctgaagtcgccgctcatccatacactcacatatatagcgtcgtatactgactaaacacatcactcttacgagctcacatgacanaccagtatacacatcatagatatataatgatatgtacactctctctctcctctcttctctanccactgccgcagactctcgcgcctcgtcgcaaccgcatatcacgctactgatcatgatgatcaacataagacagagtattagacatacccatcgcctctaccgatatggttgcgatgagagtaggatgttattaggaatatgcattcatnaatataatacacactagtgctgacagtcgatcgcatgagacaacccgcnttacgcggtcccgagtaagaatgagagtagcaatattgtcacagccgcgctagtacatccacactccgcgcagcgcaccagtccggctccgcgatcgtgatatagacaatgcaatagacaccgtcagaacagacgaagcgggctcacgacgtcgagtagaagggacgcttgtgcgcacgacgcttctgtcgntcgcatgcggtacatgcgcgccaccacatctcgcacgtctgcgcgcgcgcggatagcncgcgactgccgcgctcgcagcgtcagcacgagcagctaccagttatttcttatttctacttctgttcactcttctgacatatacgaccacgtcgtgcggacggtggtcagtagcgaggagggacgaggtnnttggnntgtggtgatgtttttgataggtgtagatatatactatatattaatatatatactaaccanaagtaagaggaccgcgcagtgcaataggtaggagataatagaaggagcatgatagatntacacaatactcttcaccatctacctgagacatcctccatcacccacacccgtgcggctgggtgtgagcggaggctgccgtggagcgtnctgagagagccgcgagccggtcagtgaggcgngnnngnacgcgcggcgccggcgcgaggagagcgacgacgcgatacagantnggcgacagggagggaggaggnnnangagaaagcgtggacnanaaaanaaaaaannnnnnnnnnnaaaannnnnaaaaaaaa

SEQ ID NO: 835 - DNA, 461 bp, Glycine max
  misc_feature (224)..(224): n is a, c, g, or t
  misc_feature (281)..(281): n is a, c, g, or t
  misc_feature (327)..(327): n is a, c, g, or t
  misc_feature (373)..(373): n is a, c, g, or t
  misc_feature (393)..(393): n is a, c, g, or t
  Probeset Number=SeqID_10614
ccccccataatagattaatgatttaaataaccaactgatataaaacactcactatggaaacctactgccataaccatcaagaagaaatcgaactgtctgcaactactcaggctgtgaacatcccttcctctgccttctctgcttccaagaccactccaaaaactgtcctgctgactacagatctgacataagaaaaatccgagtcctcgctgaagacacccaanggattcaagctaaccaaaccaaaagggagaccatcatggcccaaatagaagaaattngccaacaaaagagagaaatccacgctgagaaccagaagcttattancgataaattcagccaaataatgaacatttttgaggttaaatactgngtatggagcgaaggcttatngggtatggttgactcatccagctgttcggagaatcatgaagtgttcaacaagctaagaaatagcctgg

SEQ ID NO: 836 - DNA, 1821 bp, Glycine max
  misc_feature (20)..(20): n is a, c, g, or t
  misc_feature (142)..(142): n is a, c, g, or t
  misc_feature (165)..(165): n is a, c, g, or t
  misc_feature (174)..(174): n is a, c, g, or t
  misc_feature (198)..(198): n is a, c, g, or t
  misc_feature (216)..(216): n is a, c, g, or t
  misc_feature (294)..(294): n is a, c, g, or t
  misc_feature (366)..(366): n is a, c, g, or t
  misc_feature (572)..(572): n is a, c, g, or t
  misc_feature (650)..(650): n is a, c, g, or t
  misc_feature (694)..(694): n is a, c, g, or t
  misc_feature (712)..(712): n is a, c, g, or t
  misc_feature (725)..(725): n is a, c, g, or t
  misc_feature (801)..(801): n is a, c, g, or t
  misc_feature (899)..(899): n is a, c, g, or t
  misc_feature (901)..(901): n is a, c, g, or t
  misc_feature (903)..(903): n is a, c, g, or t
  misc_feature (947)..(947): n is a, c, g, or t
  misc_feature (963)..(963): n is a, c, g, or t
  misc_feature (1007)..(1007): n is a, c, g, or t
  misc_feature (1009)..(1009): n is a, c, g, or t
  misc_feature (1050)..(1050): n is a, c, g, or t
  misc_feature (1137)..(1137): n is a, c, g, or t
  misc_feature (1140)..(1140): n is a, c, g, or t
  misc_feature (1201)..(1201): n is a, c, g, or t
  misc_feature (1238)..(1238): n is a, c, g, or t
  misc_feature (1290)..(1290): n is a, c, g, or t
  misc_feature (1292)..(1292): n is a, c, g, or t
  misc_feature (1324)..(1324): n is a, c, g, or t
  misc_feature (1367)..(1367): n is a, c, g, or t
  misc_feature (1377)..(1377): n is a, c, g, or t
  misc_feature (1450)..(1450): n is a, c, g, or t
  misc_feature (1547)..(1547): n is a, c, g, or t
  misc_feature (1559)..(1559): n is a, c, g, or t
  misc_feature (1580)..(1580): n is a, c, g, or t
  misc_feature (1653)..(1653): n is a, c, g, or t
  misc_feature (1750)..(1750): n is a, c, g, or t
  misc_feature (1787)..(1787): n is a, c, g, or t
  Peptide Sequence Number=SeqID_9080
  Probeset Number=SeqID_10615
tatgtagcgccacaccaacncatataatatgtactgcgcacagacaatcgagagagcattagcgcggggtgtggcgcacgcgccacgcctccagaccaatgtcgcgccgccgagcgagacaacatagcgcaggccgtgtagncgtgttatattctgtgtatctcnacgctgggntgccgtaataggcgcataacgcgnatacacactcattcgtcnctcgcgtgcgcctagcgcgtactataatcgtctgtatatttaaccgcatgcgctcgcgcaccgcaacacgctcgcacnctcgccgcatgatgttagatatagaggctaagcgaagatgggcgagacatgtgataacaagacgctgggtgngtctctatgatcctaacacatcacagacatgagtgatgcgacggaataagcagcggcgagtgatgctacggcacgcgttcggtagaacgcacacgtgtatattatgtcgccgtgatcctgcctctatacagtattgtgcgtcagtgtatatgtactacatatatcgcactacatcgcgatgatcgtatgtcggctgcgccacggtngttgcaacacggcgatggtaataatatatggggtatgatagtgagtatgtggctcgcaatatcgtgccgcgactgacngagcacatcgtaattagtcgactaatcgttgtcgccggtgcgtnttggtcgtagacgctatntctacggagaacnggtacgcgtatactgacatctaatatcaatatcatcacatccacacgcgcatctatacgcgcactacgtacaaagnacgcatacgcgatagatggcgagaatactgtatcgagcggcgtagcataagacgtgatatcgtatgagatacgcgtgttgcggacgagtgcgatagancncntgcgacagcgatatagatacgatcgagatgtcgacgtgatatanccaacacagaatacancgcggacgacgtcgtgatcattcgagagtagcatatgtatatgnantcgtagttatgtctgatatgtataatcatcactcgcagcgncgtgcgctgtacaagactcccataacgcgcgatcgcgaccgacgatacgtgctatatgcggtcatgatatcgtgatgactgcggcgngtnacgttgactgtattaaaatacgcgcagctatgtatctcatcgacctatttcgatcatgtantctgtgaacgatgagtgtagttgtaatacgattgagnagtactatgcgcgcgcagcaacctgatcgtactgtctgatcgagcgtagtantngtcggtcagtctatcgcacgtccgcgtgcgancagtaacgacaatagacacgcactgcgtgacgcatacataatntactctatanttcagttctcccgcgcgcacatacgtcacggcgtctcatgtatatgtgtgctatatgcgtgtatacgtgaganattactatcatctgcgcgtatctccgcgctaggtcgcgacgatgcggtctcgtttagatatatgatatctgcgcgcatgcgcgcgacacgactcgancgcgtatacacntaataacatcactatagcatntcgatgatgcgatagctatgacagtctcagatacgcggcatcacgccgagatccgaacgacaatacatatatnctacgtgtgcctcgtcagcatatgctcgatcacggcgacgcgtctcacgatatatcctgcgaacgcgactaataaaatagacgatatgaatatgaantgagtcccgactatcatcatgagtccagcgaacacantactctgcggcgtactacgtagtcatatcagcgg

SEQ ID NO: 837 - DNA, 1336 bp, Glycine max
  misc_feature (424)..(424): n is a, c, g, or t
  misc_feature (508)..(508): n is a, c, g, or t
  misc_feature (838)..(838): n is a, c, g, or t
  misc_feature (1160)..(1160): n is a, c, g, or t
  Probeset Number=SeqID_10616
gtggccacccacccgcggcccgtcgttatctactgcgggatatgctcggcgcgtactcccccgtcggagttttgcggtcgttgtgcataacactacgggcgaaatattatccatagtagtaaccattagctccggggaacgtcatagtgagtataaaaaaagcggtacgacgagctcgccaccacgccacatacctccatcccccccacctcattgttatcaccagatgcatccgccccaacacttttatatccacactatatttttatatattcaccgacgttgctccttaatatcccgctgtttatttaaaatttacatacccacgccctcaatacatatatatcccgccgcgcgtttatttttttatttgtgtatgccgccggttataaaaaccgggacggggtggctcccccgcggcgcncatagaaaaacacgaagatgtgaattaacagccgcgctcgaggatatctttcgtccctgatcataccgccgcccgcatgaattntatataataatcacagcctataaaaaatgtaatgaaccgcacaatacgtaactattctttttgaggcgccccgctttaattatatggcgcattatagaaatatcggtgcgcccccccggtaaaatattcgtggggtgtggagaagttaataacagcgcgataatattgacccccacatatcttgagtcgaaacagtctggtagatattaaatatgataagggcgatatcgaaaaatactcgcccccccacacatactatgtttatcgtccggacctttatctccgcacaacccgcgcacgggtttctaaatctctgattatttagctccncctctgtacgtactatctgtgctgtacgtgcgtcttaaaaaaagttatgtggttataatggactcataacagagcgtgtgacgttgaggacacctcgaccataacatacccgccgttatcggtggcgccatgatcttaataatattacggcggcggaatattatgcggcgctcgcggcgtaaaaatgtaagttattagcgccgataccacgcccgcccaaaataaaacaaataaaatgggtctaaaacgagggtggacgcggcgtggctagggtgaataatacacggcgacttgtgtctggtatatgcgcacacgacacttncgtcacgcccgcgtgcgttgcttgcgctgtctagtgtcgcacgagcatattctatgcgcgcccgccgtcaataagttatgagtaagagcacgcggtgcgcgtcgctacgcgcattataatttatatactcactttacgcaccgaaaaatacagagagactgctctgacagagcacg

SEQ ID NO: 838 - DNA, 1723 bp, Glycine max
  misc_feature (49)..(49): n is a, c, g, or t
  misc_feature (61)..(61): n is a, c, g, or t
  misc_feature (77)..(77): n is a, c, g, or t
  misc_feature (81)..(81): n is a, c, g, or t
  misc_feature (302)..(302): n is a, c, g, or t
  misc_feature (313)..(313): n is a, c, g, or t
  misc_feature (451)..(451): n is a, c, g, or t
  misc_feature (502)..(502): n is a, c, g, or t
  Peptide Sequence Number=SeqID_9081
  Probeset Number=SeqID_10617
tatcgagaagtatagctgcagatgtgggacaggcgtatggagcgggtanacagtaagagtngtagcgcgcttgctgnggcnctattacactagattctaggagtggaaatagcatccccgtaaaatagcaagtatatccgagactggatgtgatacgtatcgtaattaccatgccacatagtcctgtatccgctgactgagagtgtcggggacgcacacacagtaacgacgactatattacgcatcacacggtgtggcgataggtgatgtcgatcagtactagactacgtaccatatagttnccactctctanacatacaccgagacagatgagtatactgctattacgttgatacgctatgtaggatatgaagtacgacgcacatatactgttcgagcgagtccgcatagtaagtctgatcagcgatctcaccatccctcgcacggacgntcagctcaagccgacgtgatgatcatcaaccatgtgggtaaccggatagtnctacgtgtctccgcgttatatatatgtgacgcgtgagagagagcgcacgaatcgcaatgagcaccatatcggttagcagagcgtactgtgtctgatatcagcagtcgtctggtgcatgaagccgcagaatacatatgctaagactcgctgcgacggacggatatgcagttattagatggcgagggtcgatgttcgtagatagtgtggtgcgtgcagcgatattgtctgagtttatctcgcgagcctacacggcggcgcagctatcatcatcagcgctgtgtctgactagtcgcaagggggaaaccaacatatccgacagtcacgccatgtacttgacggctcaacacgtacacagactctgtcttgcgtgtaatagatgcgactccagtgatgacgttaatagacgagcgtcggagcatatataagagactgcaactgtcgagatgtggagtcgtaaccagttatgtgtaaatcacgcgcgtgctgcgtgtggcggggtctgtctgccgagtggagtaggctacggtaattatccatgttaaggtgcatgacattatgagtatagttctgatctcccccggcttgtctgggtcgcgcccgtgcgccctgtgtccgggttatccaggatccggacgtggattgtgtgtatcggtcagatcgtacgtctctgcatgtgtatgttcggtattattacgaggttagactagaagtatcagtagatccgtcgactacttgttaagagctaggcaggaacgatcccatgcatgatcgagctaagttgagtgcgagcggcacagacggagtagcggaaggccataaattcgtgttgcttaccggatctagcctcatcctcttgttggagaggcatgtgttcatcgtactgagctcactgctgagcttaagcaggattatctctgccggctctcttctgacttcttccgtttaccgggtaagatcgggatgtagtcgtaggcttgcccctcctatgcgatagaccgagaatccctttagcttgaggaccgagcgtctgtcgtcgttttgatgctctcattgaaatatacaacacacacaaccataactacctatatacatgggaacacgggaggcggcggtgggggtgcgcctccccctccgccctgtataataggggtactgaagaaaccttttggtacttactgtgcgcttactccacatgtgggggagaataaaacgcgggtgcgg

SEQ ID NO: 839 - DNA, 435 bp, Glycine max
  misc_feature (85)..(85): n is a, c, g, or t
  Probeset Number=SeqID_10618
cgaagacaggtgtttgtcggtcggctcatgtctatggtcggggacacgaccctcgctattgttgtccatcgcgttctccatgatngacccctcccctgagacttccttcttacaccaccccccccatcaccctgtgaatttgtcccccggtggccccacaagccctcagaacacccaccaacgccttccaggacccaccctatgtcgatttcaactccctctcactccctgcccctcccgccccacaccccccgaccccccccccccgcccccctcccctcccaccctccctacccccccccccccccccccccccccccccacccctcacacccccccccatcccacccccccacaaccaacacccccgccaccccccctcctcccccccccccccccccccccccccctcatctaacatcccccccccccccc

SEQ ID NO: 840 - DNA, 1463 bp, Glycine max
  misc_feature (1)..(1): n is a, c, g, or t
  misc_feature (23)..(23): n is a, c, g, or t
  misc_feature (124)..(124): n is a, c, g, or t
  misc_feature (166)..(166): n is a, c, g, or t
  misc_feature (178)..(178): n is a, c, g, or t
  misc_feature (294)..(294): n is a, c, g, or t
  misc_feature (657)..(657): n is a, c, g, or t
  misc_feature (1233)..(1233): n is a, c, g, or t
  misc_feature (1412)..(1412): n is a, c, g, or t
  misc_feature (1422)..(1422): n is a, c, g, or t
  Peptide Sequence Number=SeqID_9082
  Probeset Number=SeqID_10619
nacagacatcagtcacgtcgcgnctgattcagagctatatcatgaccagaatatgtgatactcgcccgcatatgcatagcatcgtcagactgtgcaatgcctacacaatctacgctgtgtggcnctttacatgatacaatagcgccagccacgcttgaagtctacnatacgtcctacnggtggtacggcgagcgcggtgtgtcttcatcgccactgacatagtgcacactcatataatgtccagcatgacatcgcatgtatcatctccgggctcacacaagaacacaagggggnccacaagcgcacatcttcatatatactatacaattctgcaacagtgaagtaggaggcggagaggagacaatagtctgcatgactatctagtctcgcgcgccacgttattatttagtcatcgcatgttggcgcgcgctgcagaaggacgataagattataactacgcgcgcgccgtagatcatagtgcccaccttatccgtgtaactatcaggtactttgattttcaatcaatactgtcgagatgtgcagacagccagtgaggtgagggtgtggtcgggccagatgagcagactcacattatgttgtgccgcgaagtcataccacatcagagcgtaagtccaatcatctgtcagatgtacggangggtgtgtgggtggaagggtcgtgttctactaattaataacttgaaaacatacgaagtatgccacgaagtgggcatgtgtccttctcccacaataatactattaatccatagcgtactcgtcaaaagcaagctataggcattatgtggtagagtagattgagaaggagggtggtgggagcaagccatttatgattttattttcatagagcacttcatgcgcaggcgcacgtccaccagcatctatccaatacaagatcattagaacatagatccatgctttactatctcagggagagagatttagtaattcagatactaaaactttatgttgcacacaataactctatcacaggcgaagtctgtaaggtctgggttatccagtgtcgtcaagatacgagtattgttttgatatcatagcataattatttgtggcgcgtatcgcacaccgtttatctgacagtagcattccaagtgcaagcaagcagtaacacatatagatgaataagcttgctccatactgagagctgctttgtccgcgcgtgcgtttcgtgtcacggtaggattagtgaaatatnatgtggcgcggccttctcgcttatttctgtttgtttacgtaaagatattaacaacagatactcttgcctcctgtgctctcggaggggttgtagggtagatacctttatatatttgtgtgggcgtctcgcgggatgggggtggtgaagtgtttaattatattccgcaacgtaacgtgggngtagttgtgntgtatttaatgtttaggggggtctgtggggggggtgtcaca

SEQ ID NO: 841 - DNA, 1602 bp, Glycine max
  misc_feature (12)..(12): n is a, c, g, or t
  misc_feature (208)..(208): n is a, c, g, or t
  misc_feature (365)..(365): n is a, c, g, or t
  misc_feature (439)..(439): n is a, c, g, or t
  misc_feature (663)..(663): n is a, c, g, or t
  misc_feature (787)..(787): n is a, c, g, or t
  misc_feature (810)..(810): n is a, c, g, or t
  misc_feature (933)..(933): n is a, c, g, or t
  misc_feature (1066)..(1066): n is a, c, g, or t
  misc_feature (1186)..(1186): n is a, c, g, or t
  misc_feature (1229)..(1229): n is a, c, g, or t
  misc_feature (1262)..(1262): n is a, c, g, or t
  misc_feature (1270)..(1270): n is a, c, g, or t
  misc_feature (1272)..(1272): n is a, c, g, or t
  misc_feature (1297)..(1297): n is a, c, g, or t
  misc_feature (1309)..(1309): n is a, c, g, or t
  misc_feature (1331)..(1331): n is a, c, g, or t
  misc_feature (1370)..(1370): n is a, c, g, or t
  misc_feature (1396)..(1396): n is a, c, g, or t
  misc_feature (1412)..(1412): n is a, c, g, or t
  misc_feature (1501)..(1501): n is a, c, g, or t
  misc_feature (1540)..(1540): n is a, c, g, or t
  misc_feature (1551)..(1551): n is a, c, g, or t
  misc_feature (1571)..(1571): n is a, c, g, or t
  misc_feature (1602)..(1602): n is a, c, g, or t
  Peptide Sequence Number=SeqID_9083
  Probeset Number=SeqID_10620
gaggggtggtanatgagctataacatcaccgcttatcactaaacatgcacgcgacatctaaaccgcacgtagtttcctccacttatttatcaaagacacatgcgtctgcctcagctcggccgtgcggagacgagtataagtatacctacgacgacggatattgattatgactcgcacaagcgacgctgcagagagggagagtactctnactggattcaagcacatatcaattctcaacccccaacacagcgcgatagtctggccgcataataacacagcgtcatgaataaggtctctcctcaagacttatacagccccgacgaggagccgtcagctagcgcgactgttagagacaatgtactatnattgagtgatacgtgaactctgttcttatcatcagacttaatacaatcatgtgttgtgtctcgtgcagttgganttgtaaagcgacgtgcggctggacagcaagcgcgagcgctcgacctccgattgaatacacacatcaatgagataattgtagtattcgtctgttttgtgtcgccaacgacaaatatctcagaactcgtgttaactagactcgtgctggtagggcacgcgacgtgctatgcgaggcgtgattgatatgtgtgtaaagttgtgaagtatgttaagagagatcgggtngatgtacggaccataggtagcgtacagtacatatatacacgctatccgcgcgcaccgcgcggacctcgtatatatagaactctactattagcatgctctggatatactgtttatgaagaggatnagaataatatatggaataatatntgtgaagaaaagtgtgataataattatgaaagcaaatagtagtgagtttatatccagagtatatgatgggtgtgtgagtggcgctggagcatatctacgcacgtatccatctccacgacaaantactcacatcatcggtcttataccgccttagcgctcgactcgcacgcagtttttttgcttactgtgcctaccgtggcaacatctcgcgtcgacgcagtacagcgcatgtcgccgacagccgacgaccattatncagacacataagacggaagttgtatcaatatacgcacatacaactacacgataagtatacgtcgcgtatatataattgttatatattatccagtccatgtgctgccgcaaaccacgtgancataataaatacctgagatgatgcgagacttacattactcggngtcttctctcattactcgtgcgtcggactagantgcggtgntnggtatatgtactacatgatataagngctacatcacgncgcgtctatcttactccatcgngctcgacgtctgtatgtatatgctatatcgtcgcaagtntatctagaactactacacgtgtcgtngattgagctataacangcgagtgacagatacctacgtatattctgtctcttatatgtgctacctcgacactcgcatatctataacacagcgcgagacgcatctangctcactcttaacaaggtgcatcgatgggagtatactgncgcgaacacgncgataatcatagtatatccnagactgtcagccacactcgacatgcgcgcgn

SEQ ID NO: 842 - DNA, 570 bp, Glycine max
  Probeset Number=SeqID_10621
tttttttttggcttgaaatgttataatttattcgataggataacaatcattttttagacatgagttccacttttgttacaatcaacaaaaatatggatatttttttaaggaaaaaggggcgcgagataaagatttggagcaaattaaaagagaaaaattcgagaaatttggttgagttttttttgttttgttgctatatataattcaagtcctaatttaaattaatccaatcattgaatttttaagaagtaatttgtagaggaatagaggaaccttttcagcctcaacatttcggaagatcacttcgatgctaccattctcaagatcgtagcttctccattcgtaggtcatctcggaactaagatcaacattacgtcttttaattggtgtaatggtagctcgtcgagttcgggtaacttttgtgagcatcttgctgatcatttcagtttcaggtttcatttcagtggtaatttcattaagttctcggttaaggtgtttcttggcctttccaattctgtcaccaatagatgatctaatgtattccattttagctttaagttcactatctct

SEQ ID NO: 843 - DNA, 281 bp, Glycine max
  Peptide Sequence Number=SeqID_9084
  Probeset Number=SeqID_10622
ggtttttgctcggtggggaggtgtagtgcttttgcatggtcctaaatgtgtaatggatgaggtcctataccgaacatctagaaagcttcagtagtgttaatgtcgggctttgaaagcattttatatgttttggggattttggcgcaagggatagatgttttcatctcctttttacacatgcagagtcgcttattgagtcagtgattcttgattgttttatggaagtcgtgcagagcggcctccttagttgctagtccctgtggattatcacctatatctgc

SEQ ID NO: 844 - DNA, 1937 bp, Glycine max
  misc_feature (8)..(10): n is a, c, g, or t
  misc_feature (18)..(19): n is a, c, g, or t
  misc_feature (27)..(29): n is a, c, g, or t
  misc_feature (31)..(32): n is a, c, g, or t
  misc_feature (36)..(36): n is a, c, g, or t
  misc_feature (38)..(39): n is a, c, g, or t
  misc_feature (42)..(42): n is a, c, g, or t
  misc_feature (44)..(47): n is a, c, g, or t
  misc_feature (100)..(100): n is a, c, g, or t
  misc_feature (108)..(108): n is a, c, g, or t
  misc_feature (115)..(115): n is a, c, g, or t
  misc_feature (125)..(125): n is a, c, g, or t
  misc_feature (136)..(136): n is a, c, g, or t
  misc_feature (190)..(190): n is a, c, g, or t
  misc_feature (291)..(291): n is a, c, g, or t
  misc_feature (301)..(301): n is a, c, g, or t
  misc_feature (320)..(320): n is a, c, g, or t
  misc_feature (348)..(348): n is a, c, g, or t
  misc_feature (375)..(375): n is a, c, g, or t
  misc_feature (507)..(507): n is a, c, g, or t
  misc_feature (575)..(575): n is a, c, g, or t
  misc_feature (642)..(642): n is a, c, g, or t
  misc_feature (647)..(647): n is a, c, g, or t
  misc_feature (766)..(766): n is a, c, g, or t
  misc_feature (800)..(801): n is a, c, g, or t
  misc_feature (830)..(830): n is a, c, g, or t
  misc_feature (874)..(874): n is a, c, g, or t
  misc_feature (887)..(887): n is a, c, g, or t
  misc_feature (909)..(909): n is a, c, g, or t
  misc_feature (971)..(971): n is a, c, g, or t
  misc_feature (998)..(998): n is a, c, g, or t
  misc_feature (1003)..(1003): n is a, c, g, or t
  misc_feature (1044)..(1044): n is a, c, g, or t
  misc_feature (1061)..(1062): n is a, c, g, or t
  misc_feature (1066)..(1066): n is a, c, g, or t
  misc_feature (1168)..(1168): n is a, c, g, or t
  misc_feature (1185)..(1185): n is a, c, g, or t
  misc_feature (1245)..(1245): n is a, c, g, or t
  misc_feature (1273)..(1273): n is a, c, g, or t
  misc_feature (1284)..(1284): n is a, c, g, or t
  misc_feature (1406)..(1406): n is a, c, g, or t
  misc_feature (1480)..(1480): n is a, c, g, or t
  misc_feature (1507)..(1507): n is a, c, g, or t
  misc_feature (1520)..(1520): n is a, c, g, or t
  misc_feature (1539)..(1539): n is a, c, g, or t
  misc_feature (1559)..(1559): n is a, c, g, or t
  misc_feature (1630)..(1630): n is a, c, g, or t
  misc_feature (1683)..(1683): n is a, c, g, or t
  misc_feature (1686)..(1686): n is a, c, g, or t
  misc_feature (1691)..(1691): n is a, c, g, or t
  misc_feature (1697)..(1697): n is a, c, g, or t
  misc_feature (1707)..(1707): n is a, c, g, or t
  misc_feature (1718)..(1718): n is a, c, g, or t
  misc_feature (1764)..(1764): n is a, c, g, or t
  misc_feature (1782)..(1782): n is a, c, g, or t
  misc_feature (1797)..(1797): n is a, c, g, or t
  misc_feature (1799)..(1799): n is a, c, g, or t
  misc_feature (1838)..(1838): n is a, c, g, or t
  misc_feature (1855)..(1855): n is a, c, g, or t
  misc_feature (1860)..(1860): n is a, c, g, or t
  misc_feature (1866)..(1866): n is a, c, g, or t
  misc_feature (1937)..(1937): n is a, c, g, or t
  Probeset Number=SeqID_10623
aatattannnggcggcannccattctnnntnnctcntnnccncnnnnctgctcactctgacctcgcgcacatacctctctctctgctacgagacgcgcgncgccgtcnccatacnatcaatcganagattatagtngtgatggagaagctctctatacatgctcggcgcgtggaggcgcgcggcgcctcncgattagcctgacggcagatcgttaggcgctcgctcacagcaccgccgcggcggtggggctgcgatagatcagagaggagagagtcgcgcttcattctttnctttcgtttnctctctttgttctcctctngttctgcacgagatgtgctagcgcgtcnttggtcatctctggtgcgccctctctngcgcggcgcgtcttctcgtgggagcatacactaatcgcctaccgctcccagcactccttctcatcatacatatgggcgtgcgatgtaatctaacaaagagcttcacgtgtgttttcaataaggagggtgcgnttcgtatctgagcgccagctgaggtcatagctgagtcgagcagagtctatacaggtgtgtgtgtgtgntgacctctgtgatgggctggatctacgacctgggacctctacgtacattgtcgggctcgtctatcanacgancaattcgttcgagattagtagtgagttcatctgacataacctcacacttctgcgatcttgtttatgctcttcttattcgtgtgtctcatatactctcccatgcggattcaacatacgcncaccggacgcttctattctctcatcacatgcggnnggctgacgtcgtgtcacacagtgtcctantatggtgggcgtgtggttggtcgtgaatcatacaccacttcacnacgctgtctctgncacctcgacagtctggtggctntctactagtggtttcgtcattatatgtataaattgaggatataggtaatttaaatagaaggngagagaaagataaatgcaactcactanagaancaaagacaagagcatctctctcgttatatatggtgcttggnatatagaactggcgtgnnacanaatactgttttcgtgataatatgtactgagtcatatgtgtatgcgataaacagttcgctgctcgccccaccacacccacacgtcggagtcttagtcgtgggngagtaaaacattcacantatagtgcgtcgtggggtgagactactgtgtggtcgcgtgtcgtctctatcgtgctagantctcgtgtcgagcactcatcagtgtacntgctcgcgatnaccctcagctcgctcgtgcgcgcggcagctcacgatctcgctgtctgatcatatatcgggcgtgtcgtgattgtagtatatgacgacatcgctcgtgtgactagtatcactataacgccccntgcgagcatctgtcggtcgtggtgccaatcaactcacacatcacatgtgagatcgcacatccatctcgatcgtntccgtgcgcgcggtgcggtgtagtatnactattcattccncctcgtcagtctgctgaangacgtgttagacgactgctntctgcctctctcactgtgtcgtctgatccgtattgtctatgcggtcgtgtcgctgcgtatcaaacactcantcagcgacgctgcacccgtactatctgatctacgtcagacatctagggaccancanctagncgtgtnacgtcgttcntacgctcactnctatgcgtacactagtgtgcatacacaagttctacgatatatcttnctgctccttgacgtatgngcggatgatacgacncntcactatcatgtgcgactacgtcatatgcatgtattgtngtgacccgtattcggcnacacnacatcngcgatccctcacttcgcgtcgtgcgtcgccttcagcgtcgcgtcgtctactactgccgtggcgctgtgcan

SEQ ID NO: 845 - DNA, 1966 bp, Glycine max
  misc_feature (11)..(11): n is a, c, g, or t
  misc_feature (14)..(14): n is a, c, g, or t
  misc_feature (19)..(19): n is a, c, g, or t
  misc_feature (21)..(21): n is a, c, g, or t
  misc_feature (23)..(23): n is a, c, g, or t
  misc_feature (25)..(26): n is a, c, g, or t
  misc_feature (28)..(29): n is a, c, g, or t
  misc_feature (132)..(132): n is a, c, g, or t
  misc_feature (154)..(155): n is a, c, g, or t
  misc_feature (235)..(235): n is a, c, g, or t
  misc_feature (239)..(239): n is a, c, g, or t
  misc_feature (328)..(328): n is a, c, g, or t
  misc_feature (458)..(458): n is a, c, g, or t
  misc_feature (483)..(483): n is a, c, g, or t
  misc_feature (501)..(501): n is a, c, g, or t
  misc_feature (672)..(672): n is a, c, g, or t
  misc_feature (772)..(772): n is a, c, g, or t
  misc_feature (851)..(851): n is a, c, g, or t
  misc_feature (861)..(861): n is a, c, g, or t
  misc_feature (1021)..(1021): n is a, c, g, or t
  misc_feature (1166)..(1166): n is a, c, g, or t
  misc_feature (1452)..(1452): n is a, c, g, or t
  misc_feature (1497)..(1497): n is a, c, g, or t
  misc_feature (1551)..(1551): n is a, c, g, or t
  misc_feature (1580)..(1580): n is a, c, g, or t
  misc_feature (1586)..(1586): n is a, c, g, or t
  misc_feature (1588)..(1588): n is a, c, g, or t
  misc_feature (1695)..(1695): n is a, c, g, or t
  misc_feature (1705)..(1705): n is a, c, g, or t
  misc_feature (1748)..(1748): n is a, c, g, or t
  misc_feature (1777)..(1777): n is a, c, g, or t
  misc_feature (1780)..(1780): n is a, c, g, or t
  misc_feature (1794)..(1794): n is a, c, g, or t
  misc_feature (1966)..(1966): n is a, c, g, or t
  Peptide Sequence Number=SeqID_9085
  Probeset Number=SeqID_10624
ttcctcctttnttnatttntntncnncnncccttttacagctcatcactacaagagagcgccacaacacacccatagtgccgactgcggcgacgcacaaccgcggacagcgaacaaactcgtgcctccctcncgcccccaacacattcgctcannccctctccaccacacgtattttatctcactcgcacgaccccacagccacgcacgcccacggctacccacgccaatacctnacantcgtctctatagttctgagggacatcattgtctacgccgctcgaggtatctatgtctctgatcctcgattataccctatccagcgaatnacgtgcctgggtacagagagagcagaacgacatacaaacagatcaaaacaacgcatcgtattattctctatccgtttgtcgactcgtacttttactccctctcctattcgtgctcatgtggtgacgatcntgccgtgctactgagtctgtgtatnttacactgagagtgccgncgacgggggagggtaatgttagaggcggatcgacgagcgaaggacacagaagagggataggggggagtgagaacacacactacaatactcacatatacaaccagcgagcacaggagcacttcttatcgtatctaccgcctgcacactgcacactgtgtagcgctgagcatnataccactctgccgcgataatattccagacgcactactcagatggcgtcttatcgcgccacatcaccgcttcaacctcgtatgtactaacactcgctgantagatgtttgtgtgcgtgttcacttctcgagcatgcctcacgacggccctgctcgcgcaccgccaccgactcactaacnactatccatntatatagtcaccgtgagtcagctggctatatcgtcatatgcagtatgcgcgcggctgctcacctcctagaatacagcctggtcgacgacatctcgccgtaaatgcgacagcgatacactctccacgaggcaagtgaacagctattactaacgcgccacgncgctcacgcgattactgataccaacacagtgcgactagatccgacatagcgatgacctgacgtaatatattcgggtatatctaaaatataagaacacagatctgcacgcacacgctcggcacgcctatgtgtagacttcggtcanccgatgtatcgacctcgctctccgcattctactgtataatgtatccacgcccgactagtagagattgtgcccaccgcagactcacccgcgcacctccgacacagcgcaccacaactgcggcccacatactctagatcgattgcataacatccgcatgtgtgactttacactccatgcactcaacacatgttacgatacagacgatcaaactggtgagcagcgcggagaagcatgactgccagaacaggtaaatgcagagcgtcgtgacgtatacgtcgcgacaccncacatatacactcgcatacatctctacgtacaccgtacgagcatngatactatgtcgacgacatgacactgcgcaatgaggatgtacttgattcagccncgcgcgacgacgtcgcactgcgcgacatngcttgntnctagtcgattcgatactagttgctatacgatagcgtagttatcacgtcgagatatatagacgtgcagactccgccggcgtgaacagcatcgtacgttgtcatacacncagtgcgcancgtgccacgcgcggtatatacgttcacgactagccacgcacgncggcgggacgctctcatcatgtcacgatngancgtcgcaacagatncatatagggaccatggattcagagccgactcgacgactgagggatgatattcgtagcgatcaacgggattttcagatacgcacgagaagcacgtaacgaatgataataaaatacagtgtcatcgatgtactatgcacaaagagcagatccgataacttcatcgtcagagagn

SEQ ID NO: 846 - DNA, 595 bp, Glycine max
  misc_feature (1)..(28): n is a, c, g, or t
  misc_feature (54)..(54): n is a, c, g, or t
  misc_feature (59)..(59): n is a, c, g, or t
  misc_feature (200)..(201): n is a, c, g, or t
  misc_feature (206)..(206): n is a, c, g, or t
  misc_feature (357)..(358): n is a, c, g, or t
  misc_feature (365)..(365): n is a, c, g, or t
  misc_feature (377)..(378): n is a, c, g, or t
  misc_feature (410)..(410): n is a, c, g, or t
  Probeset Number=SeqID_10625
nnnnnnnnnnnnnnnnnnnnnnnnnnnngcgctatgagatctttcagtctgttntaaantgaagttccccaaatcttttggatccccgagttttccagggtcggaactgaggcatgaatgcataattgaagcatcatctggatagtacccccgagagttttcattatgcactcttttctttcgatgaagcaacataggtnncatgnaccatacagggggcagaatggaatttcacttttagtagcttccagaccagaaaatgctttcctgttaaggcactgaatccttgatgcagcagattcagcagacaaagatccgatgaagagaaaggcttcaagctcaacacccttgaaatgnnaacattnagagattcaccnncaaggggggagaagaagaagtgtagacacttnggggcatgggacgagaaaagaggcatttcgcaaaccacccccacgacccaaaaactagactttccttcctctcttcctaaaggggtgcgtgatctgcaaagaatggtgagaatggcaatgtgggtcggtgagaatataagccaaagaggcgttgagatcgaagagggtgtgcgtgtgaggaatat

SEQ ID NO: 847 - DNA, 430 bp, Glycine max
  Peptide Sequence Number=SeqID_9086
  Probeset Number=SeqID_10626
agtaaaattccctttaactaaataattaattgaacagaataaaatattaacttaatatacaaacttagaaaccagttcaaattttagacctaaaatctcacaatctcaggattctgctgctcatgagtgcctaataatagacaacaaagagtatttgttcatctttcatgtatgtcattcacatagctccagatatcagtaaaattattcacacacttagatgtcagaccttttacgatgtttctctgtcgtgaatatttaataagctaagtcattaggtcagcacggatcagtttaaaggaaatgacgctcacttagctatttggaagtccatgtctgcagggtaggtcaatagatgcgtgtgcataattcaatactctggaaaggaaggttcaaaggcctatgcagggtagctcaaggagatagagtg

SEQ ID NO: 848 - DNA, 473 bp, Glycine max
  Probeset Number=SeqID_10627
aaccaaattaaagccctagtagactcaaaactcggaggcagagatgacggtagaagcagtgaaccctaaggcgtaccctttagctgattcccagctagcgataacaatcctcgatcttgttcagcaagctacgaattacaagcagctcaagaaaggagctaatgaagctaccaagacactgaaccgtggaatctctgagttcgtggttatggctgctgatgctgagcctctcgagattcttcttcatctccctcttctcgccgaagataagaatgtgccgtatgtgtttgtgccatcgaagcaagcccttggcagagcatgtggagtgacaagacccgtgattgcttgttcggttacctcaaacgaggctagccaattgaaatctcaaattcagcagctcaaggatgccattgagaagcacctcatctaatatttatggcaggttatgagtgatggtcttcgttgttttggtg

SEQ ID NO: 849 - DNA, 1928 bp, Glycine max
  misc_feature (3)..(3): n is a, c, g, or t
  misc_feature (19)..(19): n is a, c, g, or t
  misc_feature (56)..(56): n is a, c, g, or t
  misc_feature (76)..(76): n is a, c, g, or t
  misc_feature (92)..(92): n is a, c, g, or t
  misc_feature (135)..(135): n is a, c, g, or t
  misc_feature (143)..(143): n is a, c, g, or t
  misc_feature (189)..(189): n is a, c, g, or t
  misc_feature (225)..(225): n is a, c, g, or t
  misc_feature (230)..(230): n is a, c, g, or t
  misc_feature (235)..(235): n is a, c, g, or t
  misc_feature (237)..(237): n is a, c, g, or t
  misc_feature (240)..(240): n is a, c, g, or t
  misc_feature (244)..(244): n is a, c, g, or t
  misc_feature (293)..(293): n is a, c, g, or t
  misc_feature (302)..(302): n is a, c, g, or t
  misc_feature (335)..(335): n is a, c, g, or t
  misc_feature (384)..(384): n is a, c, g, or t
  misc_feature (411)..(411): n is a, c, g, or t
  misc_feature (421)..(421): n is a, c, g, or t
  misc_feature (465)..(465): n is a, c, g, or t
  misc_feature (479)..(479): n is a, c, g, or t
  misc_feature (516)..(516): n is a, c, g, or t
  misc_feature (521)..(521): n is a, c, g, or t
  misc_feature (661)..(661): n is a, c, g, or t
  misc_feature (685)..(685): n is a, c, g, or t
  misc_feature (696)..(696): n is a, c, g, or t
  misc_feature (746)..(746): n is a, c, g, or t
  misc_feature (852)..(852): n is a, c, g, or t
  misc_feature (867)..(867): n is a, c, g, or t
  misc_feature (929)..(929): n is a, c, g, or t
  misc_feature (943)..(943): n is a, c, g, or t
  misc_feature (947)..(947): n is a, c, g, or t
  misc_feature (969)..(969): n is a, c, g, or t
  misc_feature (971)..(971): n is a, c, g, or t
  misc_feature (1048)..(1048): n is a, c, g, or t
  misc_feature (1066)..(1066): n is a, c, g, or t
  misc_feature (1104)..(1104): n is a, c, g, or t
  misc_feature (1254)..(1254): n is a, c, g, or t
  misc_feature (1276)..(1277): n is a, c, g, or t
  misc_feature (1510)..(1510): n is a, c, g, or t
  misc_feature (1592)..(1593): n is a, c, g, or t
  misc_feature (1698)..(1699): n is a, c, g, or t
  misc_feature (1791)..(1791): n is a, c, g, or t
  misc_feature (1808)..(1808): n is a, c, g, or t
  misc_feature (1823)..(1823): n is a, c, g, or t
  misc_feature (1828)..(1834): n is a, c, g, or t
  misc_feature (1836)..(1836): n is a, c, g, or t
  misc_feature (1838)..(1839): n is a, c, g, or t
  misc_feature (1841)..(1846): n is a, c, g, or t
  misc_feature (1848)..(1850): n is a, c, g, or t
  misc_feature (1852)..(1853): n is a, c, g, or t
  misc_feature (1855)..(1861): n is a, c, g, or t
  misc_feature (1864)..(1864): n is a, c, g, or t
  misc_feature (1866)..(1869): n is a, c, g, or t
  misc_feature (1871)..(1872): n is a, c, g, or t
  misc_feature (1875)..(1876): n is a, c, g, or t
  misc_feature (1879)..(1909): n is a, c, g, or t
  misc_feature (1917)..(1928): n is a, c, g, or t
  Peptide Sequence Number=SeqID_9087
  Probeset Number=SeqID_10628
ctngtagatgctcgtggtngaactgctcgacgtcctcgcggctacacgtatcgtantctctcagtattccgtctcncgtcgtgtcggaaagntccacgcgcgtcacagtaagcactagcgccgtgagatgtcgcnctagctcncctgacatctgatgacgcagatgcgcagtcatatcgcgtcggctantctacgcttctctctactagatctacataatcaatnataancgcantngcnacgnccgcgcacgcgagtcagacgtcagacctcgtcgatagatgagagatgcngcgaacagnagcggtggcgtacgcgatagagagacgcatganatctcatgctgattgcgcataaagatacgatgagagagacgagagagcnagagatagatgtacgtcactagcgtcnagagacgatnttatgccatatacagtgtgatcgtagactccgtttgtgctcganagagcatagctatncatatatacagtcagtagcgagtagactgactgactnagatnataatactactcatcagtataatcgtcgaccatatgtgctgctctcgccgatcgtagtgtgtgcggcggcctcgtgtgtacgatgcacacatcgacttatactacgctcacacacaacacctcacgatgcgctgtggtangtgcagcgcatcgacgcgagaganagtgtggaganactagagagaagcaccagaatatcagtcatcgcggagcgtatagatgatngtagagtagagatcatactagcgagagacacagcacaacactaggcacctgcagtcgagctagattacagcagcgccacgactgacgaacgtagacatagtaagtnagatatccagagaantagggatgaagaggatcaagtagcaacgcgcggctgacatagaggaggacgagtagtgtcangattatcaagtatnatanatatggtaatatataaacgacncnatcgtgcgagatacatcactggcggtctgtttctccgctcacagttgataatcgcttaccactatgtatacggcganttcaggttgtcagtcgtntcgtgtagtcgtgtatacgagtacgctactcagtagcnatccggcgcggacagtcacgcatcagcatgagttcaatgtctggcgcgcacgtcccagcctcatgctctcaccaccaccagcgtctcgctctaacatatatcacccacaatgacagatgcgatcgcgctgagtacagtatatatagcagnggagaagaaatagaaaagagannaagtaggactagtgagacgagtatagatagtgtgtccatatggtgttatagaaggcgtgtgtgtgtaagaatcatacagaggatatgtgatatacaaatacaaatatcacagcaacatataacatatacatcaataccataccaggcgagaggcgcagtcattagaaatatatataagatttggtgtagagtataaccgcgatgctcacagcgatcgaagtcgcactttcgancacatcacgatctcatagatgtagagaaaatctatccagcgtaggcacgacaagactcacgcagcgaggaggacgaagtgannactatacgcgaatatacaggacttcagcaggaacgaccagagaaataataaacgcacatgctttctatatcgatcttgtattattttgtgctcttctactcactnntactctatatacttctaagcgctatgcgagtacactacgagcggcgcatagccgcgcgcacgcgaacaacactccacacacacagacacgancacccgaacaggcaacncactacagcgacagncaagnnnnnnngngnnannnnnnannnannannnnnnnganannnntnnaannaannnnnnnnnnnnnnnnnnnnnnnnnnnnnnnccccgttnnnnnnnnnnnn

SEQ ID NO: 850 - DNA, 356 bp, Glycine max
  misc_feature (9)..(9): n is a, c, g, or t
  Probeset Number=SeqID_10629
tacccctgnaccactacttcctaatgctgagtatgcatcacttttcttatctcctcatattatgagaaactcgcagcaccttgaaacggacatcccactcatctctttattgataatagagagttgggcgcctgacgctctaatgtactttgcgggatgatctcctctaaatggttacatggctctcattgttctgagcgtgggcatgtacgttctggacccaactggtaatgtcacgtcccttatctcttgatcttaacaagagacgctggatgcacccattcctgcaaagatcttattatgggatctctatctaacagacttttcactcctgattcctatgaactacaaatcat

SEQ ID NO: 851 - DNA, 936 bp, Glycine max
  misc_feature (936)..(936): n is a, c, g, or t
  Peptide Sequence Number=SeqID_9088
  Probeset Number=SeqID_10630
tcagctacgtaggccccccccccaatcataacaacaacaatacaaaacaagtcaaacaaacaaaacacaacacaacaatattcaaaaatgtttagcaaaactggaaccttaactgtcaagccaatcatggccgaacttaagaaagacgaagacacactcacaaagcaagatccgtacgtcgttttctacttcggtgataagaaagttaaatcaaagacttgccgtggaggaggaaagaaaccttcttggcaagatgtgttcaccttccaaagaacaagcgaggatatgctcagaattgaactctgggacagagattacctctcccgtgatgactttttgggcgaaggagtagtttctatgtctagccttatgagcaccggcagaaccactaactgggtcgacctcactcacaagggaagatttgccggcaagcttttaatcgaaacggacttcagaggtgaccaaatcaagacaaccacaacaacaaccatgcaacaacctggttatgctatggacaagggtttccctaccatgcaacaacaaggctacatgccacaacaacctggttaccctatggataagggcatccctatgcaacagccttcatatcctatgcaacaacaaaacttccctatgcaacaacaaggcttccccactatgcaacaacaaagcttccctatgcaacaaggaggatacccaatccaacaagggggatacccaatgcaacaaggaggatacccaatgcaacaaggtggttaccaacaaggctatccccaaggcaagttttagtagagtagtcggataaatgcatataattcataataagaattaactcattccatagatttgaatgtaatcttctatatgattactgatagtatcaacaggtgtacaaaataatttacttcctgatcgataaaaaaaaaaaaaaaaaan

SEQ ID NO: 852 - DNA, 632 bp, Glycine max
  Peptide Sequence Number=SeqID_9089
  Probeset Number=SeqID_10631
aactttacttttcaccgtcggagctaagttcgcgcgccggtcatcctaaacccatatcagcgatcagccggccaggaactcgccgtagtgccgtggcgtgttctggtagcgtggaaagagtacttctgtcatggaaccaagtcagcccgagctcgaggagttctcagctgccaccgcgggcgaggtgctgaaaccagtggaggccccatccgatggtgaaggatgccccatatgcttgggtcaagaggaggccacggagaccacttggatgaagacagcgtgcggacacatctttcatgggcggtgcgtggagaggtggctcaagatgaagggaagttgccccgtgtgccggcgccagctttcgataccgcatgttggtgcaaaacaagatgttccatttatacatccctttgacttgaggacgatagagtcaatgcggaggtttcctcacatattcccagatccagatggatatttctcaatgtatacgcaggatatgtttgaaggccattgaagatgatgttgccacgtacattatgctttcggtagctctacatataagaccggtgctaagaatgttatgtaaagtatggatctcttcactttcaaactaatagaacacgtgatttccg

SEQ ID NO: 853 - DNA, 1590 bp, Glycine max
  misc_feature (1)..(1): n is a, c, g, or t
  misc_feature (164)..(164): n is a, c, g, or t
  misc_feature (217)..(217): n is a, c, g, or t
  misc_feature (231)..(231): n is a, c, g, or t
  misc_feature (329)..(329): n is a, c, g, or t
  misc_feature (340)..(340): n is a, c, g, or t
  misc_feature (391)..(391): n is a, c, g, or t
  misc_feature (432)..(432): n is a, c, g, or t
  misc_feature (441)..(441): n is a, c, g, or t
  misc_feature (473)..(473): n is a, c, g, or t
  misc_feature (494)..(494): n is a, c, g, or t
  misc_feature (498)..(498): n is a, c, g, or t
  misc_feature (559)..(559): n is a, c, g, or t
  misc_feature (561)..(561): n is a, c, g, or t
  misc_feature (640)..(640): n is a, c, g, or t
  misc_feature (722)..(722): n is a, c, g, or t
  misc_feature (739)..(739): n is a, c, g, or t
  misc_feature (907)..(907): n is a, c, g, or t
  misc_feature (926)..(926): n is a, c, g, or t
  misc_feature (944)..(944): n is a, c, g, or t
  misc_feature (971)..(971): n is a, c, g, or t
  misc_feature (1253)..(1253): n is a, c, g, or t
  misc_feature (1362)..(1362): n is a, c, g, or t
  misc_feature (1422)..(1422): n is a, c, g, or t
  misc_feature (1427)..(1427): n is a, c, g, or t
  misc_feature (1446)..(1446): n is a, c, g, or t
  misc_feature (1542)..(1542): n is a, c, g, or t
  misc_feature (1567)..(1569): n is a, c, g, or t
  misc_feature (1590)..(1590): n is a, c, g, or t
  Peptide Sequence Number=SeqID_9090
  Probeset Number=SeqID_10632
ngtgttcgtaggtcgagtgtgcgcgtgacgatagtcaggtcgacacagctgcatgctcgtcgtcgatatactcgatcatagtggtgctagcacgtgtatagagagtcaactctatgcaagttaactagcgatcggcgtattctgctacgcgcagcagctgcgcncgcgcgcagcgatgagatagtgaagcagctagacgccacgagtgcggtggtgnaagtgtcgtctatnacgactcgctgtgtgcagagccacgcggtgtagaggcatgaccgagatacaggttgcgagttatcatgaatctgcgcgcgtcgacgagctgcgtgtanggtcgggtctntgttatgtgtcttgtagtgagtgttgtatcagtgtagtgtgaatatagatnactatatagtaagttgagacattgtgttgtgcgcagtatgntctggagantagtgtcagctctaactgtcgacagtgatgtntgtatgctatatggagctcgnacancatgtatcgagtcaggagcgtcgttatacatcgctatatacgtatatataatcttgtgcgntngtaattgcctcacgttgtgtttgtaggtagatgagtatataactataccacacccaccacgactcgcgcgtcgcattcnagatcacgtgctctgcttcgcatcagacacacgactactttggtgatcttacttcattcatgtagtgtaatatagacacgtngcactgctggctacagnctgcgatgcgtcgagttgtgtcacatctcgaacaagtgtatgatgtggatcgtctaggatcataatgatcataatactatataatcagtgagaagtgtcgcgtagagcgtgatagtgtgtctatatatatgattatgcaaagcaggaataggatatggcataagatantataacgagagaagagacnggatggagagagcgaganccgtagagatgcggcagcgctatgccnggacatacatacggtcctatcgaccaccaaaccgccgaatgctgtcagctaagtagttcatccgatgtctagtatcatcaaaatattctatatcaactattctccaactaatcttgtgtcagatgaggtatcgtgtatgtattgagctattagtatatgaacatatcataactttgtatgggtgtcttgtctgggaggtagggtgtatggtgtggcgtgtcgtgctgtgacggctccgatatgatgcacgcgcgcctataaccatccactccgtcgctaatnctttgcgtcgtataccacagtcctccagccatctatcgctctacctcgcgcggcacggattaatgcgagttttcttatattgtacattctcattctcacattaatatanaatgtatagatgagagacgtgatgtatatttaatatatactctactcattctgtatctcntgttngtatagtatgtgttatatntgctctgtttgtgtgggcgtttggcgccctccactctcaatacttcctgggtgagtcgacaccacgggtcaacacgcccggccgcgcgcgcgcgcncggctcgcgcaggtggcacgtggcnnncaaaaaaaaaaaaaaaaaaan

SEQ ID NO: 854 - DNA, 1972 bp, Glycine max
  misc_feature (128)..(128): n is a, c, g, or t
  misc_feature (204)..(204): n is a, c, g, or t
  misc_feature (281)..(281): n is a, c, g, or t
  misc_feature (302)..(302): n is a, c, g, or t
  misc_feature (364)..(364): n is a, c, g, or t
  misc_feature (394)..(394): n is a, c, g, or t
  misc_feature (564)..(564): n is a, c, g, or t
  misc_feature (707)..(707): n is a, c, g, or t
  misc_feature (757)..(757): n is a, c, g, or t
  misc_feature (760)..(760): n is a, c, g, or t
  misc_feature (819)..(819): n is a, c, g, or t
  misc_feature (829)..(829): n is a, c, g, or t
  misc_feature (835)..(835): n is a, c, g, or t
  misc_feature (840)..(840): n is a, c, g, or t
  misc_feature (876)..(876): n is a, c, g, or t
  misc_feature (1134)..(1134): n is a, c, g, or t
  misc_feature (1236)..(1236): n is a, c, g, or t
  misc_feature (1264)..(1264): n is a, c, g, or t
  misc_feature (1301)..(1301): n is a, c, g, or t
  misc_feature (1307)..(1307): n is a, c, g, or t
  misc_feature (1456)..(1456): n is a, c, g, or t
  misc_feature (1587)..(1587): n is a, c, g, or t
  misc_feature (1617)..(1617): n is a, c, g, or t
  misc_feature (1639)..(1639): n is a, c, g, or t
  Probeset Number=SeqID_10633
tctcgacagctgtcgattatatgtgcttgcgtcttcgatcgactcgtcgatcggtgtacatagccgagacgagtacgtgtcgcaagacgcacaccgacaacacgagatctcgctgagacgtctgtcanagcacaaagtacgacgtctgactcgaaatatgagtgtccgtgtagtgtccgtccgtcagaacgtctagtcatatcnacacactactctcttccatctcgacgtcgtagacgccaatcagatgcatgcgagcatcggatatctgcacatacgangacgtcgcgaggcagcgcgcnctgatcgcatatccgataacgacgcgctacacatgattatcctgctcagactctgacatagngatcggtataccatcgttcagctcgtgatnaacgtaatccgcatacacgatgcatcgcctcactcggaacacgcgcgtcgcgtctcacagatcgtagcacgtcgccctagctatagtgacagacagtagagagagatatgccgagtgcagtcacagattactcacacatcacacctcactggatatgtcgcacatgctcncctctccgcatcgctgcatagagcgaccatcgacgatatacacagtacgagtgctgctaatccaccaagtactacatatgcacactagagctgtcggtctcgacacgcacgaatatatacaactcgacagtacgtggtcatgnatgtgactccatgcttgcgtgatgccaagtagtgcctgatcttcatccgntangacgtcacgctgacactattatcgccctacgcgctcgtcatttgtcgtgaggtcggctncgcgaccctnccacgnctcantccgcgctatctacacgtgtcatactttgcatcgcntagcgacttatatatgtgagcgttgacgaccgatccatcgatcattacacttcgccgcaccgcgtatcgtgctctctcattccggactcgctcacatacagacgcagttaatgattaatcggtgagtctgtggtgcagcgcagctatccaatagtcactagagatcaagccagtcaggcggtctggtcgcacatccgcgatacaatgcacacacatgtcacgcgcgtatcactaatactaagtcatcgcagcgattantatcgtctcacgctgattagtcaccgcgcgagcgatcgcgttctgacgtcgcgctctacgcgcacatatgcgctccgatgcacccgctacctatcacgcatncgttcgcgcatgttatcgacgctcgtcncacacgtcacagtgtcacatactactaactgttatcntgccanacacattaacggcctgcagttctcgacgacgtggcagacgctgacgtgcggcgcgcgcggcatagtagtgcacgcgtatagttattactttctcgtgccatatagagagcacgtcacatgtagcacggtatggtgaagtcgcatctaantacacacacatagaatgtatgacggcgtagcaatgcgtacgataaatggccgccatcccaccatccatcgtgctgatactcgtaatggccgcacttcagactatcacaacatcgctcactacgctactctncgcggcagcagtcagagtgcgtcgatcagntgcaacgcatggttacgtatcncctctagtggctcggtgcagacgggcggtccgtaaatcgagtacgtgcagtgatattactcgcgtgcgttatagcggtttatatagttgatgttatatcatagtatctcaaattcagtgtcgagcttatagcgagagcataaatcgaccgtcatactacatccctctgcatctctcagtatgctgatgagacaatgctcctcgcacgtcggacacgtgtgatacacattcttaccgctcaactcgttgtcactaccatcagcgtctttaggcgatatctctgtgcagtgggtgcgtctactacgcagagagagtcctgccctcgctcaccact

SEQ ID NO: 855 - DNA, 2223 bp, Glycine max
  misc_feature (1981)..(1982): n is a, c, g, or t
  misc_feature (2053)..(2223): n is a, c, g, or t
  Peptide Sequence Number=SeqID_9091
  Probeset Number=SeqID_10634
aagttaaaggcttaaacccttgaaaaaccagagagacctgtgttgtggttcaatctagcatagatcgatcgatcattcatctgtgaataaaaaggtgtaactgtgactgtaatgtttctgaatcgaagctgaaaatgatgacgccgttcaaacgcttacacttagttcggacactctatcgttcatctcagattggagaatcttcgtcgtatctgctcggcagctgcaagagttattcctctgctctatcaaacggttctgagggtaatttcaggagcttccattcccatttgttaaagggccaagatggttttccctttgctggtgtaaaatctttgacgcttcgatctacaatgtgctgctgagttgtccattttcatgaacaataggaggataagtactcaagtcaaagcctcagcacaagcgcgactagtgggacaacaaatatccttatcaagtcttggatttatctatgaaccttatgaaccttgttagaaaatcccattttggaagagatggttcacttgtagtggttggagaagaacataaaatgacatcatgcttaagcttaacaatgcctttgccattgcagatgtaagatcattggcttattgaaatactaagtctgttaattaggctgttattatgtacgaggagaggataagtactcaagtgaaagccttagcacaagcgcgacaagtgggagaacaagtatctgtatcaagtccaggatttatttatgtattctatgcagcttgtcattcaataccatttgtgaagagatggtccacgaggaaaggaagaaaaagaaagaagaaatgacataattcttgagcttgaaaagtgcctatgctattgcaaagttaagaaaaacgggatattcaaaaaatcagttctacaatgaggctgccattctacactggagaatgtagatgcatgattgataataacactctaatagctaaaggtgacaaaagaacattaaggaaagcagttactgagaatatgttttctgcacttaagaatgaaattaaacaaagagaaactgcatggagcagggtatattgggaaatggttgagcctgttgttaagattcggactttgcgtgcacgtctgattggagttgatcggaaagacctaaataaaacatttattcaacttacactagagattttggctaaacagaaatttgaagcatatgactcaaaaggttctgtggtagctggagataaaagcaaggaggttcttgtccgtgatatatgggtatttgagaagtctatgtttcatgctggtgcaacctggcgtctgtgtggacggatatcaccaaaagcatcacagttatctccttgaaaaaagagaccaaagtttatggttgtttttttttattagccaaagtttatgattgttagatgttccgatgttgttgagctgaaatcttacatttgtttgtcactggagccttgtcctctgaataaaatcaaatataggtgtaaacctatgcaaattttgttgttcgaatgaaaacctggcatctgtgtggacggatatcaccaaaagcatcacaaaacatttattcagcttactcttgagattttggctaaacagaaatttgaagcatatgactcaaaaggttctgtagtagctggagataaaagcaaggagtttggaatcaattttctgtgcgatgaattatacagttcttgtccgtgatatacgcgtgccggagaagtctatgtttcatcctggtgcaacctggcgtctgtgtggacggatatcaccaaaagcatcacagttatctccttgaaaaaagagaccaaagtttttggttgtttttttttattagccaaagtttatgattgttagatgttccgatgttgttgagctgaaatcttacatttgtttgtcactggagccttgtcctctgaataaaatcaaatataggtgtaaacctatgcaaattttgttgttcgaatgaaactcnnaaaaaaaaaaaaaaaaaaaaaaaaaaaaaaaaaatttataaaaaaaaaaataaatgatgaataaagagggnnnnnnnnnnnnnnnnnnnnnnnnnnnnnnnnnnnnnnnnnnnnnnnnnnnnnnnnnnnnnnnnnnnnnnnnnnnnnnnnnnnnnnnnnnnnnnnnnnnnnnnnnnnnnnnnnnnnnnnnnnnnnnnnnnnnnnnnnnnnnnnnnnnnnnnnnnnnnnnnnnnnnnnnnnn

SEQ ID NO: 856 - DNA, 224 bp, Glycine max
  Peptide Sequence Number=SeqID_9092
  Probeset Number=SeqID_10635
ttttttttttttttttgccgatgcccccgccgccggtcgccggcttcttggccgagccgcccgcgtcgtcggggagcagctcggccgcgcaggcggagagggagcagggcggatggatttggaatgggaggccggcacggagaccaccacgcggagggcgcggcccggacgaagcgaggacagatgaaggaggcgagctagaggcgcggcccggacgaagagag

SEQ ID NO: 857 - DNA, 676 bp, Glycine max
  Probeset Number=SeqID_10636
gttagggttttaggtctcaaagttaaaacctttgctatcaatacgccgatcgatcaattgattccatggcgatggctatgagacttcctgcgatagcgagagcggctacggaaatggctgcggctccggttggattgagacgtctcttctgctcgaacgctacaaacttttcattcctctctccacaggctaattccgaaactccggctcgtcctcaggcggatcccagcaccaatctcttcgtctccgggcttagtaagcgcaccacttctgaaggtcttaggacagctttcgctcagtttggagaagttgctgatgccaaggttgtcacagacagggtctcgggatattcaaaagggtttggatttgttcgatatgccaccttagaagattctgccaaaggcatagctggaatggatggcaagtttcttgacgggtgggtcatatttgcagagtatgcaagaccaagagaaccatatcgacctcagaacaacatgcctccttctccatatggtaaccgctactgaagcaaagaccgttgctgaaatctttggggacgaatctttatcagtgttgtgcgtcattctattatctactatgattgaactgtcttttagtagcgtcttgtgccttgagaagttcagaaactttatattatatttttgagtaataaccc

SEQ ID NO: 858 - DNA, 1540 bp, Glycine max
  misc_feature (1)..(13): n is a, c, g, or t
  misc_feature (45)..(47): n is a, c, g, or t
  misc_feature (64)..(64): n is a, c, g, or t
  misc_feature (68)..(68): n is a, c, g, or t
  misc_feature (75)..(75): n is a, c, g, or t
  misc_feature (116)..(116): n is a, c, g, or t
  misc_feature (127)..(127): n is a, c, g, or t
  misc_feature (136)..(136): n is a, c, g, or t
  misc_feature (153)..(153): n is a, c, g, or t
  misc_feature (181)..(181): n is a, c, g, or t
  misc_feature (197)..(198): n is a, c, g, or t
  misc_feature (349)..(349): n is a, c, g, or t
  misc_feature (376)..(376): n is a, c, g, or t
  misc_feature (490)..(490): n is a, c, g, or t
  misc_feature (497)..(497): n is a, c, g, or t
  misc_feature (521)..(521): n is a, c, g, or t
  misc_feature (568)..(568): n is a, c, g, or t
  misc_feature (575)..(576): n is a, c, g, or t
  misc_feature (582)..(582): n is a, c, g, or t
  misc_feature (675)..(675): n is a, c, g, or t
  misc_feature (790)..(790): n is a, c, g, or t
  misc_feature (1038)..(1038): n is a, c, g, or t
  misc_feature (1420)..(1420): n is a, c, g, or t
  misc_feature (1431)..(1431): n is a, c, g, or t
  misc_feature (1435)..(1435): n is a, c, g, or t
  misc_feature (1540)..(1540): n is a, c, g, or t
  Peptide Sequence Number=SeqID_9093
  Probeset Number=SeqID_10637
nnnnnnnnnnnnncccccccccccccccacccccgcccccgcgcnnntggcgtgagaccccaancaantaatcanataatccactcccacctgtgtgtgtgtgggatgtgttggtnttcttgcacantaatggaanagaaccatcattatctnccttcttctgcctgccccaatcctaccngcaactccgtcaccgnngtatgtatgaaacaattgtaggtatcaatcatacgcctataaatatctctgaggtgtcactcgtccaagtcggaccgaacgacagtgagcggaatgtgtgacgggcgctctctctctgccgcgcctctcttcatccgatgatctccgtgtntcctcctctctcctctactcgtcacanctatccactgttgacattgctgctgacgcgctcgatgcgcacatctcgtcactccacgccacacacatgctggttacatccgctcactacctcaccacacccggtcacagccancaccctntctctcatcgcaacgcgcgccagnactactctaccgcaacccacaaccactcgccacacaaacaccccatnatcacgnnatacantccgacgatactcagcgtgttgggacgaatttcgtcagtggggcggagtagtgagagagtggaagagtgaatcgacaggtgcgagagggaggngagacgcgtactacgctaagactatactcaatcattgatcccgagttcccgccactgccacagcgcgacgcatgtgcgccgtgggaagcgaaggagtggggcgcatatctgagtngtgggctgtgtgtgtatgcgtctgtggcggcgcgactgcgccacgccgctatgcacgcaccacggtgcacctctagatcttatatcgatcgcgttacgtataggggctacgttgtctgaagtacaatgcactcacatgactattcctgccgaagatagtatgataagagagcggacgtgcacgcgtgaacatagcgacagtccgtgtcgtcttacgatcatcccgaccgctcgcacgctcgcacgcancgcggcgttagccgacaatagactgagtagcatggacgtaacatcgactgttatctcacatctctcatctagccgtatatcagtgcgagcagaggcgacacggagtgcgtgaggcgcgctgcagccacacgccatacactacccggcctccatgcataccacgtatgagcgagacgccgcatcccgtcctcgtgcgatagagcgtcgtgtgcgagcaccgctcttggctcggtgagatagtcgggtgacgatgatctatatgtacaatatgagtgattcttatacatgatcgctgttctgtctttctgctgcttcgctatatgttctcatgcgctccgggtgtatacgagcccatgtatctatgctcggcaacgtcagctgnctctgctcgcngcgntgcgctcgttatacacaccatcgcacagtccacgcaccgcgcgacggccgaacatctcactctcatgacactgcactcacactcacttaatccacacactcaacn

SEQ ID NO: 859 - DNA, 1006 bp, Glycine max
  misc_feature (1)..(94): n is a, c, g, or t
  misc_feature (1006)..(1006): n is a, c, g, or t
  Probeset Number=SeqID_10638
nnnnnnnnnnnnnnnnnnnnnnnnnnnnnnnnnnnnnnnnnnnnnnnnnnnnnnnnnnnnnnnnnnnnnnnnnnnnnnnnnnnnnnnnnnnnnncaggatttatgtgatcgcaacatgggagtttgtttgagcgcccaaattaaagctgaaagcccatataacactgggttcaattcaaagtatgtgagtacggatggaaatgatttcggcagcacaaacgataaggtttcagcaaactcaattcctcaaactcctcggagtgagggtgagatcttgcggtcatccaatttgaagagctttcccttgtcagaacttaagacggccactagaaatttccgttcagatagcgtgttaggagaaggtggttttggattagtttttaaggggtggattcatgagaattcattgactgctaccaaacctggcactggcattgttattgctgttaatagacttaatcaagatggcatccagtgtcacacggagtggttggctgaaatcaactatcttggacagctttctcatcctcatctagtgagattgattgggttttgccttgaagatgaacatcgccttctcgtatacgaatttatgccacgtggtaactgtgaaaacccatttgtcatgaaaggctcatatattcaaccactttcttggagctaacatttgaaagtagctcttgatgctgccaaacggctcgcatctctgcacagtgcataagcaaaagtgatatatcgagatattaagactttcaatatcttgctggatacaagatataatgcaacactttctgattttgcgctgtcaaaggatggaccaacagcgtacaaatgtcatgtcttcctcatgtgtatgtaactctatggatactgcccacctgtaattctatccacagtgcatcttcttgtaatagtcatgcctatagttatagtgatgtacttcttgaaatgtattcttgcacgtagaattgtagacaagactatacaacatggacaacacgatttn

SEQ ID NO: 860 - DNA, 2212 bp, Glycine max
  misc_feature (10)..(10): n is a, c, g, or t
  misc_feature (42)..(42): n is a, c, g, or t
  misc_feature (73)..(73): n is a, c, g, or t
  misc_feature (81)..(81): n is a, c, g, or t
  misc_feature (86)..(86): n is a, c, g, or t
  misc_feature (90)..(90): n is a, c, g, or t
  misc_feature (171)..(171): n is a, c, g, or t
  misc_feature (178)..(178): n is a, c, g, or t
  misc_feature (272)..(272): n is a, c, g, or t
  misc_feature (294)..(294): n is a, c, g, or t
  misc_feature (297)..(297): n is a, c, g, or t
  misc_feature (315)..(315): n is a, c, g, or t
  misc_feature (359)..(359): n is a, c, g, or t
  misc_feature (388)..(388): n is a, c, g, or t
  misc_feature (423)..(423): n is a, c, g, or t
  misc_feature (545)..(545): n is a, c, g, or t
  misc_feature (581)..(581): n is a, c, g, or t
  misc_feature (608)..(608): n is a, c, g, or t
  misc_feature (670)..(670): n is a, c, g, or t
  misc_feature (718)..(719): n is a, c, g, or t
  misc_feature (758)..(758): n is a, c, g, or t
  misc_feature (878)..(878): n is a, c, g, or t
  misc_feature (882)..(882): n is a, c, g, or t
  misc_feature (892)..(892): n is a, c, g, or t
  misc_feature (967)..(967): n is a, c, g, or t
  misc_feature (981)..(981): n is a, c, g, or t
  misc_feature (1037)..(1037): n is a, c, g, or t
  misc_feature (1102)..(1102): n is a, c, g, or t
  misc_feature (1128)..(1128): n is a, c, g, or t
  misc_feature (1130)..(1130): n is a, c, g, or t
  misc_feature (1132)..(1132): n is a, c, g, or t
  misc_feature (1135)..(1135): n is a, c, g, or t
  misc_feature (1223)..(1223): n is a, c, g, or t
  misc_feature (1285)..(1285): n is a, c, g, or t
  misc_feature (1289)..(1289): n is a, c, g, or t
  misc_feature (1346)..(1346): n is a, c, g, or t
  misc_feature (1349)..(1349): n is a, c, g, or t
  misc_feature (1387)..(1387): n is a, c, g, or t
  misc_feature (1396)..(1396): n is a, c, g, or t
  misc_feature (1562)..(1562): n is a, c, g, or t
  misc_feature (1580)..(1580): n is a, c, g, or t
  misc_feature (1821)..(1821): n is a, c, g, or t
  misc_feature (2000)..(2000): n is a, c, g, or t
  misc_feature (2108)..(2109): n is a, c, g, or t
  misc_feature (2114)..(2114): n is a, c, g, or t
  misc_feature (2136)..(2136): n is a, c, g, or t
  misc_feature (2149)..(2149): n is a, c, g, or t
  misc_feature (2169)..(2169): n is a, c, g, or t
  misc_feature (2178)..(2183): n is a, c, g, or t
  Peptide Sequence Number=SeqID_9094
  Probeset Number=SeqID_10639
ttgctgtgtngtagtttgtactgagtcgtggtgtagcgtgcngcattttctgtgcgtccgccgcatacgggtntcgttagngacgnctcntagtaacgctgcagagctgggtagcgacagctgctactgctaagtatctatagtattatagaagtcggatgatagatcagntagtganttgtctcctgtgtactagtacgagagtaccccgatgatgacgacgagttcagatgtgttattgtcgttacgactactatataatcatcctcgtnttaatgcattataccgacaatnagngattcagacaggaggaanttatactagttatgacagtgatgtgtgtgtgttgcgtagtagantcgtcgagtaggactatcagtactctgtnagtcgacactcatatatatcgtatggtagtatcantatagtgagagagtaaatgatgtagtagcgtgttacagatcatctgttgtagcgtcgtgttagtagtagatatgctattgtgcgtagtcgatgcgtagttggtgtgtgttggtgcgcgcganggtaggtcgtgagtcgcagcgatctacgcggtcggncgcagtcgtgcgcgtagatcagctgcnatctatgacgtcggatcgtgtgtctagtgcagcgagcgtggtgctgtcaccgtgttcgagtnatgtgcgtcttgcgattacgatgacgtactagacagaataggtagcgnnacgagtgacgtgtatattactccccagtgtcatactatnctgtcatagctctcgtctgcctcgctgcgtgtctagctgtgtatggactcctgagctgtcgggactgtcgactcgacgagtgcgcgctcggtgcgtgtctagatagtctcactagtagtntagnttctcgtgtnttagctctcgtcgcgcagtcgcgtacgaatagaggggtagagtaagagagagataggaactaatcgcgtcgcgtntgagtagagtgccncgcgctcgcggagtgtctgtcctgacgtgcgcgcgcgacgcgcagatcgtggctgncttgcactactcgcagctgtcatcgtctagtatgtatctctagctcgtgtgtggagtaaaagganagagtgcatctttgagtggagtgtgntntntanttactcatctgtgtgcgatggtggtatatagtgtggctgtcacgttacgatactctctatacgagtatctcattacgcgtcgctatcngcgttgtacacaatgctatgcctccttcttcatcgtgtgttcatcgtattgtagtgatggtnggtncggtcaggcacttgacatgtcatcagtattgataatacattcataggcaagcgtacnacnatgtatgtagcctatgctcacactcacgactgcacatnatatatctnttcactcctatatcatccctcatgtagtactagctgagaatagtaagatatattattatatctagtacgttcgcgcatactccattctagtatgtatgatgatgaggtgtgatgagcagtgagtagtatgataattttgtcgctatcgtggcttgcgtgcgtttangtagtggtgtagtgtggntgtgcgtgtctgtctgctcgtgtgtctttcatcgtgtctgtttgtctcagacggctattgctggctagcatcgcattagtctgagtgcatatcgccacgacgatgtagcgacccacaccacagagtacgggtgacaggacgaggacagcgcgacaacacagataggaagatcgactcgctgtgctaatactgattctcgtctctgttattgcggagctagagcgcaataccactgtcatcnctacccactccctcttgctacgtatgctgtatgctgttgagttggccggcgcgcgcgtgcggtgttgccgcggcggtggtgtcgcgtggtggcctcttggtcgcgcgtacgcttagtgccgtcacacatcgggcgcgcggatggcgggaaaatcacacaaatatattatttgtactgtntgcgccttcgcatctagatggtgtatgtccgtttcgcaatagcaatcaggtaagatatactccgcgtattgggtacttggtacgatgtgcagagaatcagagtgtggnnggtgnagataacccgcaccctctatancacaaccccacangtgcagcggggcggggtcgnggtgggggnnnnnnaaaaaaaaaaaagaaaaaaaaaagccccc

SEQ ID NO: 861 - DNA, 913 bp, Glycine max
  Probeset Number=SeqID_10640
ccgtctctgatctcttatcactcactctctctctcccctaactcgccaagcagctacaatggccgttaccttctcagatctacacacagagcagggtgtcaagtccgtggaggagcacctcgccggaaaaacctacatctccggagatcagttgactgtggatgatgtgaaggtatacgctgccatcgtggagaaaccgagcgatgccttccctaatgctagcaagtggtacgattccgtcgcgtcccaccttgctaaaagtttccctggtaaggccgtaggagtttcaatcggtggctctgctgcttctgctcctgctcaagctgaggcacctgcagctgtagctgatgatgatgatgacatggatctgtttggtgacgagaccgaggaggaaaagaaagccgcagaggagagggaggcttctaagaaggacaccaagaagcccaaagagagtggaaagtcatctgtgctcatggaggtcaagccatgggatgacgagactgacatgaagaaacttgaggagtgtgtccgcgctgttgagatgcctggtcttctatggggagcttcaaaactggttccagttggttacgggatcaagaagctcactatcatgctcacaattgttgatgacctcgtgtccccggacaatctcatcgaagactacctcacctgtgagcctaacaacgagtacatccagagtgttgacatcgtcgcattcaacaagatctagagactttaagttgtctccctaccaaaagatacttgatttccttccaagttttgttctttttttttgtgttgttttgcttgagatgtttattttctagtagcaagacctctttcatgttgcagaaaacataaactatcaacgctttactattccttttgccattactaaaaaaaaaaaaaaaac

SEQ ID NO: 862 - DNA, 462 bp, Glycine max
  Peptide Sequence Number=SeqID_9095
  Probeset Number=SeqID_10641
gccattcctcctctcgtcgcaatgctcgatgaaaccgaacaaaacgacgtcaattcgctcgtctcttcgctctacgcgctgctcaacctcggcattggaaacgacgcgtcggtttttttttttccttcacttctcttcctcaatttttttttctgttagcgttttattttatttatttgttttttggatgaattattatgtgttgtcattttctattaacattgtttctttcttttttttttttttttggttaggttattcattaatgattgatacgtcgcttcgcctttgatcgtttttttttttaatgtcgtttttgctcgtaatttctttaattgttaaaacgacgggttcattttggtagtttttgattttctgttttgcatttccagtttgcatgcatcgatattttttttatgtgatataaactgttttctggttaatttccagtactacacttgg

SEQ ID NO: 863 - DNA, 1940 bp, Glycine max
  misc_feature (4)..(4): n is a, c, g, or t
  misc_feature (113)..(113): n is a, c, g, or t
  misc_feature (148)..(148): n is a, c, g, or t
  misc_feature (211)..(211): n is a, c, g, or t
  misc_feature (303)..(303): n is a, c, g, or t
  misc_feature (319)..(319): n is a, c, g, or t
  misc_feature (592)..(592): n is a, c, g, or t
  misc_feature (737)..(737): n is a, c, g, or t
  misc_feature (768)..(768): n is a, c, g, or t
  misc_feature (841)..(841): n is a, c, g, or t
  misc_feature (922)..(922): n is a, c, g, or t
  misc_feature (1151)..(1151): n is a, c, g, or t
  misc_feature (1158)..(1159): n is a, c, g, or t
  misc_feature (1171)..(1171): n is a, c, g, or t
  misc_feature (1190)..(1190): n is a, c, g, or t
  misc_feature (1195)..(1195): n is a, c, g, or t
  misc_feature (1230)..(1230): n is a, c, g, or t
  misc_feature (1256)..(1256): n is a, c, g, or t
  misc_feature (1273)..(1273): n is a, c, g, or t
  misc_feature (1317)..(1317): n is a, c, g, or t
  misc_feature (1325)..(1325): n is a, c, g, or t
  misc_feature (1343)..(1343): n is a, c, g, or t
  misc_feature (1348)..(1348): n is a, c, g, or t
  misc_feature (1376)..(1376): n is a, c, g, or t
  misc_feature (1397)..(1397): n is a, c, g, or t
  misc_feature (1400)..(1400): n is a, c, g, or t
  misc_feature (1424)..(1424): n is a, c, g, or t
  misc_feature (1428)..(1428): n is a, c, g, or t
  misc_feature (1430)..(1430): n is a, c, g, or t
  misc_feature (1472)..(1472): n is a, c, g, or t
  misc_feature (1478)..(1479): n is a, c, g, or t
  misc_feature (1484)..(1484): n is a, c, g, or t
  misc_feature (1514)..(1514): n is a, c, g, or t
  misc_feature (1520)..(1521): n is a, c, g, or t
  misc_feature (1529)..(1529): n is a, c, g, or t
  misc_feature (1543)..(1543): n is a, c, g, or t
  misc_feature (1559)..(1559): n is a, c, g, or t
  misc_feature (1565)..(1565): n is a, c, g, or t
  misc_feature (1573)..(1573): n is a, c, g, or t
  misc_feature (1629)..(1630): n is a, c, g, or t
  misc_feature (1632)..(1633): n is a, c, g, or t
  misc_feature (1640)..(1640): n is a, c, g, or t
  misc_feature (1643)..(1643): n is a, c, g, or t
  misc_feature (1646)..(1646): n is a, c, g, or t
  misc_feature (1658)..(1659): n is a, c, g, or t
  misc_feature (1710)..(1710): n is a, c, g, or t
  misc_feature (1734)..(1734): n is a, c, g, or t
  misc_feature (1797)..(1797): n is a, c, g, or t
  misc_feature (1824)..(1824): n is a, c, g, or t
  misc_feature (1832)..(1833): n is a, c, g, or t
  misc_feature (1842)..(1843): n is a, c, g, or t
  misc_feature (1846)..(1847): n is a, c, g, or t
  misc_feature (1856)..(1858): n is a, c, g, or t
  misc_feature (1870)..(1871): n is a, c, g, or t
  misc_feature (1880)..(1880): n is a, c, g, or t
  misc_feature (1892)..(1892): n is a, c, g, or t
  misc_feature (1910)..(1911): n is a, c, g, or t
  misc_feature (1936)..(1936): n is a, c, g, or t
  Probeset Number=SeqID_10642
cgancacgacgtgaatacgcactcagctcaagttataagaagacgacactaagctcaagcacagacgtacgatggtctacagcgcgagacgtagcgatgtcctcatcgctgtncactcgactcctcatacgtcacggtgtctcatcgnctgcggctgccgagcgcgcacgatcacgcctcggcctcacgtcgtctcgtgacgtcacgccgncggctccgcacccctcgacctacatcacgctgcacgacactacgcaccgtagcgagcactctgcgcacagcacaagtgagcgacagatatcntgtgatgcatggtgcngatcgttcgtgctaatacacaattcacagacatacagtgctactacatatcacgaccgtactagaagacgatatacatcgtagattcgagcgtggcgtgctagtcggatctcgagatgatgacgtaatgatatagtatcacagagttgatcaagacgtacacacgcgcagcagcgctcacagcgtgcggcgacatcatacgagttgtgttctgttgtaggagcgggacactagctgacataggctagctatcagatgacgtcgcacgcagatncgatccgagcagacaccgggcgtgcggcgcgcggtgcagtaggacgcgccgaataacagaactacgatcacagaatcagaatgtagtacatacgaccacgcaactacagatgagtgcaggtagaaattatattccgttagcgagnctatgctcatcgatggtaaggcgggagtgtngtggtagcgacaggagcagaacgcaagtataggagtgacagatgctcatatcatacacatgatcgcttagaanaggtatatcgggatgcggcggtgataatatgacatattatattatacgtgtgccactatccgctagcacgtagtatacgtngagtcgcgaggcagttggagtacagaagataaccaacgctaacgacgacatcaaaacaagacagagacaaagcacgcgacaacagagagtggactagcagtccgctagagatggtggaatgagtaaagagtaggtgtcggacacacgtatagattaggtccgatagtcgacaacgtcgtgtatagtctcagtatctcactcataaatgtcgtcttctcgttcatattgncgacttnntgatgcatagtngtcgtcggtctctagtagntcgtnttgtgtttgtgatgctgagtgtgtgtcgcgtgagngtggttattctgtctgtgtaatattntatgttgatctatgagntttatttatttttcatacatcagttaatatccgctctctctctncctatacnttcagagctctatcacgntagtntgacatggtgcttgtcgtcgtccgctcntgacgtgtgtcgagtgcgctnatnaccggctgcttgcgcaacgtaganagtntntgtatacataacacactgcagcggtaaacatctatcgtcgcncaaggnncacantatatacctacgagatactaataaatatanagagtnnggtcacgncaaacacatatagntgtgtgtatattgatntacaantatatatngaattaggtatatgagatatgtctgatataatgataattgatagggagatgacgannanngacgcgngcnacnccaatgtttatnnccacttctcgtgcttctatggacctactcctgcccgccgcagagctttatncttcaatatttaactcgtgactgnctgcttccatcgtagatcatccgtagaagccacacatatcacgtccacagtgtagctgatagntctacactctccatcctcatgttagcnaggcgggnnagtgtgtgnnttnngattataannnaaccaaccaganncatgggcantaagtgtaaatngcagagggcgggggaggnnggggaaggggaggagggcgggaggnaaaa

SEQ ID NO: 864 - DNA, 955 bp, Glycine max
  misc_feature (792)..(792): n is a, c, g, or t
  misc_feature (955)..(955): n is a, c, g, or t
  Peptide Sequence Number=SeqID_9096
  Probeset Number=SeqID_10643
tgatgaatatatgagaagaaatcacacgtgcaaatctggctacagataaatgatccgacactcacgtggcacaggacaaagcagggaaaaatacgcgacaatgacatgaatgcgatgtaaaaaaaaaaatcataacatagaatccaaggcacctaaccaccgcgcctaccacaataaaagttagccccctccgtcataagaaacatggcttcctccacaaacgagaaacgactgatctgatccatgtatttgattgaccatatgcaacctaacccacagccctgcattgccccccccccgacctacaccctcaaccatagagtccccaggcctacaccccgttcacggtgcacaagtcaagcgatagcagtggcacactagagtgttttaatcagaactcaaacaggtccgctaggtacaagactaccactgccctttccacaccttactgccccccgctcaccctggacccgctccccgtattccaccgctcccactatttttcccccccatttttttatttcccaccccctccacccatgtcccccccttccccccaccatttcaccccccgttgagcccccttccccccttttatatcccctttctctcccccctgatttttccgccttgtaccacccatgtccctttatcttcacccacaattttcacaccccccttgtattcaccaccctctccacctttaatccccccctttgtttactcccccgtctttctccacccaacccttctcccgatttttttacagcccacttttaacactacccaatntatttttccccccctcatttcctcttctcgcccccacttttccaccacaattaacacccaattcatcccacccacccccttataccccgcatcttttcaccccaccggcgtttttgcttttatagccccccccccctccaccccttgtcccctttttccaccn

SEQ ID NO: 865 - DNA, 1229 bp, Glycine max
  misc_feature (171)..(171): n is a, c, g, or t
  misc_feature (261)..(261): n is a, c, g, or t
  misc_feature (1229)..(1229): n is a, c, g, or t
  Peptide Sequence Number=SeqID_9097
  Probeset Number=SeqID_10644
cacaggagaagacaatgaagagtgtcgaatataagcaggcacaaaaagtggaatgtagtcgaacggggttaatagaatgttgtgagaggcaaccgaatacaacacagtggttagggtggcagaagagtggagttatacacgagcgaccggctaggaggcgacagctgactnatcgaataattggggtcgcgtactccagtactacggataagacagcgaagaaaagcgatgtgccgagatcagctagtgagagatgaaggnacatcactctaaaagcagccgccgcattcggagggaatagaggaagaggaggcggtagataacgggagagaatgagggaaatagtgaggatataacagaatgagcggagagaaatgtgaagcggcgtaagcgtgagggatatgtagtcgacgcacacggggcaccataggcccgaacaaaggcagaacagcttcaggacgtcgcatgagtagaagatacatgtaagcaaaaatcattttattaggtccctcctctgcatgtcagagcgatgagggttaggaacgatggaactggataacgctcgcgtgcccctccctcgccgccacgtggatcgccgtcctcccctcggagtacaccgcatccacttccaactcctcgccgtcgtgccgtagcgctccaactgaaacttcatcgtgtcgattcggtccattgccgcggcctcgtgaagaaccgattcgtcgattttgcagccggaggcttccagaagcttcaccgcttggaggctcccaaccctaattgcgagcggcatgagggattccgccgtcgcgcagcaaatccgcgacgacgtcggcgctgccgcattccatggcgacgtgggggccgacgagggagacgtgggggccgggtttggagaatagttggcggaggtgttcgtcggtggcctttcgggtggggagcatggtgcatcggtcggttatggcttcgggagggttggagagagcgtgttgatcagcggtatgagagagttgtcgtgcttaagaagcagtagagagtgggggcattgtcgagaacggtttgtggtggttaaagacccttccactagcatggtctccatgaggttggtgagattgaaggaggaatgcatcttttgtcccttgtggaatatctacgcattcttcaggttttcattctttcaatagcctgttcaggtgtttaaacacaataaagttggaactggaggggggaan

SEQ ID NO: 866 - DNA, 744 bp, Glycine max
  misc_feature (275)..(275): n is a, c, g, or t
  misc_feature (621)..(621): n is a, c, g, or t
  misc_feature (649)..(649): n is a, c, g, or t
  Peptide Sequence Number=SeqID_9098
  Probeset Number=SeqID_10645
gatcgatttgagcgtatataaccagagacgaacagagagacggcagacaccaatgccacccgaaggagacctgaagttgctaggcttgtggccgagcccattcgtagttcgcgttcgcatggcgctccccatgcaggacttgacctactagaatatcgaacagcacctcttcaacgaaagggagctcctcctcaaggccaacccgggcggaagacgaaaggggccccgcacctcattccaaggaagggtcggaacacctagatcccgaaacaccnaaaagcaacttcgcgcccccgtcacactacaaaaataggtcggcgccaccacgcccccgtggaccctccgcccacactccaatcctgttggtcaccccacttaaggatcggtttccgcccgtcctcgcggccctttgtggcgcgctctctacaacctcacatcgagcgacgctctcttaaatctcccaacgggacacttcctgtccctaattctctttacggaaaaatgaacgaggcaattgcattatcccctatatccgtccctacatcccgaagtgggtgatcacccgtgaaatcctcatcttctctgcccgcagcgtcccgagcgattccacaaattgcgctnctcgcccaccacacggcgaccgccctcntacttccaaatcgagatggatacacatgagagaagatatgcccctcggcgcttctggccgcatactatatacctctccctcttttccatgctcaa

SEQ ID NO: 867 - DNA, 258 bp, Glycine max
  Peptide Sequence Number=SeqID_9099
  Probeset Number=SeqID_10646
agtatatagtttaataatatttcactgattttatatttttatatctagacatatttatattacaggaatctataaatttattaatattcttgcaggcatctaaacaaatttgttactctttatttcactgattttatatttttatatctagacaaatttgttgctccttatatcgcgcatgccaaaaccgaagaggaaggcaaacatcgtggccgataccggaagcagtccggttaccgccgcggggcgccaggcgct

SEQ ID NO: 868 - DNA, 179 bp, Glycine max
  Probeset Number=SeqID_10647
agctcacaatctgactccttttcggctgatttcgttggagctttgatctctccgttgaaatggttgctttccggtttcaccaataccaagtggttgggagagcacttccaacagagaaagatgtgcagcctaagatttaccgtatgaagctttgggccactaatgaagttcgcgccaag

SEQ ID NO: 869 - DNA, 2251 bp, Glycine max
  misc_feature (11)..(11): n is a, c, g, or t
  misc_feature (31)..(31): n is a, c, g, or t
  misc_feature (37)..(37): n is a, c, g, or t
  misc_feature (39)..(39): n is a, c, g, or t
  misc_feature (52)..(52): n is a, c, g, or t
  misc_feature (83)..(83): n is a, c, g, or t
  misc_feature (86)..(86): n is a, c, g, or t
  misc_feature (90)..(91): n is a, c, g, or t
  misc_feature (117)..(117): n is a, c, g, or t
  misc_feature (127)..(127): n is a, c, g, or t
  misc_feature (156)..(156): n is a, c, g, or t
  misc_feature (159)..(159): n is a, c, g, or t
  misc_feature (192)..(192): n is a, c, g, or t
  misc_feature (237)..(237): n is a, c, g, or t
  misc_feature (240)..(240): n is a, c, g, or t
  misc_feature (242)..(242): n is a, c, g, or t
  misc_feature (262)..(262): n is a, c, g, or t
  misc_feature (268)..(268): n is a, c, g, or t
  misc_feature (284)..(284): n is a, c, g, or t
  misc_feature (290)..(290): n is a, c, g, or t
  misc_feature (294)..(294): n is a, c, g, or t
  misc_feature (302)..(302): n is a, c, g, or t
  misc_feature (334)..(334): n is a, c, g, or t
  misc_feature (338)..(338): n is a, c, g, or t
  misc_feature (340)..(340): n is a, c, g, or t
  misc_feature (368)..(368): n is a, c, g, or t
  misc_feature (379)..(379): n is a, c, g, or t
  misc_feature (387)..(387): n is a, c, g, or t
  misc_feature (431)..(431): n is a, c, g, or t
  misc_feature (450)..(450): n is a, c, g, or t
  misc_feature (455)..(455): n is a, c, g, or t
  misc_feature (484)..(484): n is a, c, g, or t
  misc_feature (495)..(495): n is a, c, g, or t
  misc_feature (533)..(533): n is a, c, g, or t
  misc_feature (543)..(543): n is a, c, g, or t
  misc_feature (600)..(600): n is a, c, g, or t
  misc_feature (609)..(609): n is a, c, g, or t
  misc_feature (629)..(629): n is a, c, g, or t
  misc_feature (649)..(649): n is a, c, g, or t
  misc_feature (653)..(653): n is a, c, g, or t
  misc_feature (671)..(671): n is a, c, g, or t
  misc_feature (678)..(678): n is a, c, g, or t
  misc_feature (688)..(688): n is a, c, g, or t
  misc_feature (725)..(725): n is a, c, g, or t
  misc_feature (736)..(736): n is a, c, g, or t
  misc_feature (750)..(750): n is a, c, g, or t
  misc_feature (769)..(769): n is a, c, g, or t
  misc_feature (794)..(794): n is a, c, g, or t
  misc_feature (797)..(797): n is a, c, g, or t
  misc_feature (814)..(814): n is a, c, g, or t
  misc_feature (833)..(833): n is a, c, g, or t
  misc_feature (862)..(862): n is a, c, g, or t
  misc_feature (880)..(880): n is a, c, g, or t
  misc_feature (890)..(890): n is a, c, g, or t
  misc_feature (903)..(903): n is a, c, g, or t
  misc_feature (964)..(964): n is a, c, g, or t
  misc_feature (973)..(973): n is a, c, g, or t
  misc_feature (978)..(978): n is a, c, g, or t
  misc_feature (1002)..(1002): n is a, c, g, or t
  misc_feature (1007)..(1007): n is a, c, g, or t
  misc_feature (1032)..(1032): n is a, c, g, or t
  misc_feature (1076)..(1076): n is a, c, g, or t
  misc_feature (1091)..(1091): n is a, c, g, or t
  misc_feature (1106)..(1106): n is a, c, g, or t
  misc_feature (1117)..(1117): n is a, c, g, or t
  misc_feature (1121)..(1121): n is a, c, g, or t
  misc_feature (1267)..(1267): n is a, c, g, or t
  misc_feature (1283)..(1283): n is a, c, g, or t
  misc_feature (1382)..(1382): n is a, c, g, or t
  misc_feature (1392)..(1392): n is a, c, g, or t
  misc_feature (1474)..(1474): n is a, c, g, or t
  misc_feature (1491)..(1491): n is a, c, g, or t
  misc_feature (1496)..(1496): n is a, c, g, or t
  misc_feature (1502)..(1502): n is a, c, g, or t
  misc_feature (1544)..(1544): n is a, c, g, or t
  misc_feature (1587)..(1587): n is a, c, g, or t
  misc_feature (1773)..(1773): n is a, c, g, or t
  misc_feature (1805)..(1805): n is a, c, g, or t
  misc_feature (1826)..(1826): n is a, c, g, or t
  misc_feature (1874)..(1874): n is a, c, g, or t
  misc_feature (1889)..(1889): n is a, c, g, or t
  misc_feature (1948)..(1948): n is a, c, g, or t
  misc_feature (1961)..(1961): n is a, c, g, or t
  misc_feature (1963)..(1963): n is a, c, g, or t
  misc_feature (1966)..(1966): n is a, c, g, or t
  misc_feature (1973)..(1973): n is a, c, g, or t
  misc_feature (2037)..(2037): n is a, c, g, or t
  misc_feature (2042)..(2042): n is a, c, g, or t
  misc_feature (2183)..(2183): n is a, c, g, or t
  misc_feature (2190)..(2190): n is a, c, g, or t
  misc_feature (2198)..(2200): n is a, c, g, or t
  misc_feature (2211)..(2211): n is a, c, g, or t
  misc_feature (2213)..(2213): n is a, c, g, or t
  misc_feature (2217)..(2217): n is a, c, g, or t
  Peptide Sequence Number=SeqID_9108
  Probeset Number=SeqID_10648
cgcagtcagcntaggcatacacgacagctgngatgcnanacgtctactaacnagcacatctgagtacggcgcgtatgcgtcantgnatannctgatatcgacgactagagcagtgtntggttgtcantactacacgcacatgatgactcgcccgancangcgacatcagatgtcagagatagtagtatagtncagctctgctgacggcgaacgaccgtaggacacgtagcatgatangtngntggcagcagcattcagtatntggtantagatcagtagtacgnaggtancgcngtagactnccgtcgcgtcggcgcagcatgctcgtatcgcnacgngnacagagtgcgtcgagtgagtcagcgtcngccggtcgtanagtacgantcaagcatagtagaggagtggtagcgctgatcgtatgctgagtnagtatcgacgtagcatgtncgtcnggtcactgtacgttagtattttacgctgntagcgctggtngcgcgcgatgcagtcgacatgacgtgtcatggagctangacgtgttcnacttagcaattcgcgcgcgtcatcgtcactgactcgtcgactcactatatgacaatnaggacgtangccactgcattatcgtcgtnacatcgtgacgaagtgatancgcngcatagtcggtgcgatgntacgtancacgggagancttgctacttagaacgtgtcgtcgctacgctagcgancagatcgtgantggtatcactcatnatcacagtagctacgagtnagctgcagcgcgcgggacggccgtnggntcaagtgccgatgatgntagtcgcgttatgtagtanatgtcagttagatgcgcatgtcgagcganggggtagtcagtctgtangcgtatcagncagagagcagtanctgcgactctctgactacgccgatcgatctcacgataaattgtgtagcggtcaatatgtancatcagtgngcgantcgatcggaacatcatgcgagagngcagntctgtgtaatggcagtgctgcgtgnctagtcgtttgctatgagcgtacatcagtcgctagcgtgtgatnagggatgtgttactntgcaatactatatgngacaacgagangganatacacgagagcgagtggtgacgtcgagtagagcgtcatctcgtgtgtctgagttctcgaagatagtgagtacagcgcgatcagagatgagcagataagagtgagatgacgtacgtgatcgatcgagcgcgcatctatatcgagtntgcggtagaccgacgnctacgtaatcgctagtgtctatagacacgctcggcggtcgttgtatacgatagtgaggtagatacagaaacatgaggcaggagagattgtagactgtgngacgcagtgngcgacataagcatgatgagtcatgtcacgacagtatcagagatgcacagagacagcgcatgcagtggcagctcagaacgacnaactatatgcacatatntaganctatgnttatcgtagtcgcacgctagcacggacgcgcgacgactcatnacgcgtagtccgccgcagtcgtactggactatatatactatangagacgaaacgcccagatccacagtcggataagtctaagtaatacactcaatataatatgtactgtgtactactagtgagtatgacacaacatacataacacggcaacacgacgagtcgcacacacgcgctatacagagaaatacatattgtatactacttacgatatcactcgtctgtcgtgctntgtgcatcgtcggttcgcgctcacatcactcntgcgctctcaacgcacgtctntgcgcacatcagtaatcgggagccacgagtcggcgtgctctacgttgntatgtgtcacagtcntctcgagcgctgaacgtccacagtcctatacactttactgctgtcgagtattctgagantccatccttcatntntcncctactnctacccgtcgccctctcatctactcttcgtgagcatgtagtatatctcggctgtctctatcatnctagnacccgactcactctagacacctcatcccgtctgtgtggtcagaggatgatactgctctgtgacacgatacctgactgatgcgtgatagcatcgatactgcactctatatgtgtgtagtcgtgtcgacgtgtagctagtcgntactcgnagctagtnnntaatacgctgnantctngactagggagtcgtcagcgcgcaggcgcgtcaca

SEQ ID NO: 870 - DNA, 218 bp, Glycine max
  Probeset Number=SeqID_10649
ctgcagaaaccttttgtatatatttacatcaattcttgtcacattcacagaatgcagaggataataagtatgctgaaggagtgagtccatcacttgaattcatcataacttcaaaggacataacagctactggtgcatcagccacattgctaattttcaacaatgaaaagggtttctctcgcgaaaacattgaatctatctgcaggtcgcctctagag

SEQ ID NO: 871 - DNA, 783 bp, Glycine max
  misc_feature (601)..(783): n is a, c, g, or t
  Peptide Sequence Number=SeqID_9109
  Probeset Number=SeqID_10650
atttcgtatcaatgttatattaggaaaaaaaattcccacgtgccaattaacaccataaataatcccacacctccctcgatagcttcaagctccaaccatcacttcccttctccaacatgccaaacgacagcgttctgagtcttttcttcttcgttaccctcttcacatgccttctctctgctacttcccacgatgaccatattttcctaccgagtcaactccatgacgatgactcagtgagttgcactgctaccgacccaaaccctaactaccagccggtgatcgggatccctgacccaccccggcgacggtgcctctggccggctcagcaacgccaccggggtttcctacatcgccgcctcctacgttaaaatccgtggaagccgggtggtgctaaaagtatctccccctatccacaatggagtcaccgtgaagaaccttaacaagagcctcgatttgggccaatgaagtgcccctacactggggggggggctggtttcgggcccaaaatttggatacccctgtgaaacatttttaagaaaggtttaaaaaaaatggtggcgtggccccctccctccctggccttcaactaggggaaaannnnnnnnnnnnnnnnnnnnnnnnnnnnnnnnnnnnnnnnnnnnnnnnnnnnnnnnnnnnnnnnnnnnnnnnnnnnnnnnnnnnnnnnnnnnnnnnnnnnnnnnnnnnnnnnnnnnnnnnnnnnnnnnnnnnnnnnnnnnnnnnnnnnnnnnnnnnnnnnnnnnnnnnnnnnnnnnnnnnnnn

SEQ ID NO: 872 - DNA, 474 bp, Glycine max
  Peptide Sequence Number=SeqID_9110
  Probeset Number=SeqID_10651
ttcatttctaattgctttcgaccaagatcgatcgtggagacgtctacctcgtagacctctctctcaacttgaactcccatttcttgttgcggacatcaaatatgcgtctttctcgcttcgttctcctcatttgtctcgttcttgttgcaccagccgtatcggctgatttagctatcttgagaacggattactaccaaaaaacatgccctgattttaacaaaatcgtgcgtgaagccgtttcaacgaagcaagctcaacaaccgacaactgcggccgggacactacgcctctttttccacgactgtttccttgaaggttgcgatgcatcggttttgatagccaccaactcgtttaacaaagcagaacgtgacgatgatctcaacgaatcccttccaggagatggttttgacattgtgaatcgcatcaagacagctctcgagctgtcttgtcccgatgtggtatcatgcgctgata

SEQ ID NO: 873 - DNA, 1712 bp, Glycine max
  misc_feature (1)..(1): n is a, c, g, or t
  misc_feature (11)..(11): n is a, c, g, or t
  misc_feature (13)..(13): n is a, c, g, or t
  misc_feature (34)..(34): n is a, c, g, or t
  misc_feature (77)..(77): n is a, c, g, or t
  misc_feature (139)..(139): n is a, c, g, or t
  misc_feature (148)..(148): n is a, c, g, or t
  misc_feature (160)..(160): n is a, c, g, or t
  misc_feature (164)..(164): n is a, c, g, or t
  misc_feature (168)..(168): n is a, c, g, or t
  misc_feature (210)..(210): n is a, c, g, or t
  misc_feature (230)..(231): n is a, c, g, or t
  misc_feature (237)..(237): n is a, c, g, or t
  misc_feature (240)..(240): n is a, c, g, or t
  misc_feature (254)..(254): n is a, c, g, or t
  misc_feature (303)..(303): n is a, c, g, or t
  misc_feature (332)..(332): n is a, c, g, or t
  misc_feature (413)..(413): n is a, c, g, or t
  misc_feature (432)..(432): n is a, c, g, or t
  misc_feature (517)..(517): n is a, c, g, or t
  misc_feature (616)..(616): n is a, c, g, or t
  misc_feature (748)..(748): n is a, c, g, or t
  misc_feature (826)..(826): n is a, c, g, or t
  misc_feature (1154)..(1154): n is a, c, g, or t
  misc_feature (1160)..(1160): n is a, c, g, or t
  misc_feature (1454)..(1454): n is a, c, g, or t
  Peptide Sequence Number=SeqID_9111
  Probeset Number=SeqID_10652
ntcgatgaagntngcgtgtagcgcagagtgaagnagtatcacacaatgatgtagccgctcgcgtgtgacatctcacntgaatgaatggaatatgtgtagtgactctcttagtagtagtcgtgacgtcgcagaagcagantcgtccagncgtgcgcgtgtnatgnagcnctgggaacaatctgatagtcatatcacgtttcgacgtcactngggtgtggcgtggggggcgnncgctgnggnaaaaaatgaaagtngatgggtaggcgcgcaacagcacgcgcggcgagtcaatcgtataatctntcatcacataatcgctatatcgttgttgnagtgcagcgcagaagttggctcgacagagcaaccgcacatatgtgtgttcgtgatatctcgtgtagtattgtacgctacantattagatatactgagcanaacatcgactgtccgtcggcacgcgctacgcttatcagctgcgattcagacagatctgtcataacacatattacagcgcggtcgncgcgctggacggaagatacgatgcagcgggtaatcacacacgagatatagcttgtggagaagagacagttgtgatgcagcatgtcgacgtccacgattngcgtcgcaaactgtatagcgcttacgacgcgggcatgcacgagccgggtgtaggcagcggacgggcgtcgaccgatagtgatgctggagtcgttggataggagtaacaggatataactaaccgcgacgaganagatgacgaacgtcgcggtagttgcatcaatatgtcacgccgcgcgaaacatatagtcgagtgtgataataaactacnacataaacacacaaagcgcacacagactcagcgaggcgtaacatatacgccgggtgcactataacatatacatgatgtcggagatatattatcataattgcgcggacagggcacggacgccagataagtaagctgcgtatcataatatcatagctgcactgatagagtgagtgcgtcgctggcggtcgtgctgaggcatcatatatgatgttatagtgcgtggcggtagccgcgcagatgttgcgcggcgagtatcacttgacggtggtggggtagcgaccgtgagatccctgatcacatttactaaccacatgacgcggcggcgcgncgccgntcggcgcaccgcgacacgataatacagacagcagacatatcagtactggaggcggctgaagtctctcatctattaatctaactattatcagccggaggtgatcaaagagaatgtataatcagtctacaggtgtagacacggaggcccaccaatagtagagattcgatgtgagttcgtgcttacatccgcgagtataggagacgcacgatgtgacgtccgaggcgagcgaagccgataaaagattaatatgaagtgatatgacgagtatatcagcggcgcgtacacaacaatcanatcacacacgccgcgatcatatatgatgacagtgcgaggataatatcgcgacgcccataactagcaggaggagaggggagtatataatctcctccttattattgacgtcacagcggtgtggcgacgcggaggttgctggcgggtcagctggcaccacgtatcaacgaaggtggatgaaagtgcaacggctatgtctagctagggctgtgctcgactcatcgctcggtattgtgtgtagatatatatatatgtgcggtg

SEQ ID NO: 874 - DNA, 1794 bp, Glycine max
  misc_feature (34)..(35): n is a, c, g, or t
  misc_feature (37)..(40): n is a, c, g, or t
  misc_feature (42)..(42): n is a, c, g, or t
  misc_feature (125)..(126): n is a, c, g, or t
  misc_feature (136)..(136): n is a, c, g, or t
  misc_feature (192)..(193): n is a, c, g, or t
  misc_feature (197)..(197): n is a, c, g, or t
  misc_feature (216)..(216): n is a, c, g, or t
  misc_feature (257)..(257): n is a, c, g, or t
  misc_feature (266)..(266): n is a, c, g, or t
  misc_feature (542)..(542): n is a, c, g, or t
  misc_feature (622)..(622): n is a, c, g, or t
  misc_feature (625)..(625): n is a, c, g, or t
  misc_feature (876)..(876): n is a, c, g, or t
  misc_feature (997)..(997): n is a, c, g, or t
  misc_feature (1310)..(1310): n is a, c, g, or t
  misc_feature (1497)..(1497): n is a, c, g, or t
  misc_feature (1682)..(1682): n is a, c, g, or t
  Probeset Number=SeqID_10653
ctattttctcctctttaaatccatccccaccccnnannnncngataaaaaaaagacaaacaaaaaacggccacgcgcccgttcactaccaaggcgcggggagatgagagtcgtttgtgagcgttnngggcggtggntgggcgaagggaaggatttaattttgcaaccggttgaaagtgataataaaaccaannaaanaacctactggaaaagtgantgtgttagttcagcaatatgacatcggccgccgataccgcngggacgggngtgaggtgggttgaaatgcggatgccagaaccgcctcagagcagacgtcatacgggaggcattcgtcgactgtgtggctactgcgcggcccgcggcgagacgagattatggttagaaggagaaaaaagagaaatttgagagttttaataggaaaatgtctatcattttccgagtgtgtatgtctatgactttcggcgactccgttgctccgcccgccgctgtccccctgcagaaaacttacagggtcaggggacggagagaacccccccccaccanaccacccaaacacgcccaccgcctcaacaactatccaccacacacgcacgcaaaagtatgtatttattgtgggggagggncgnggatacagaagaaataaaataattgacactaataataaccacgataatgtttatatggatgaggcgcgccccccccttgccccgcgtcggggtggttcgtcgtgtcggacgaggcactcacatatcagataagaactcgaaagaagagcagatctcgcctctcgcccgcttctatctccgtgcttgtttctccccacgccgcttcgatccgcgccgcgccccgcaggccacgttctgaggtggagtgtgtngtggttgtaccgcctgcgcccgcgcgctatcagctatgtgtcgcgcggcagatttcctaagtaccagcgactcgctgtctgctacgcatttctcagcgctctcgctccaggtcacgctggnggagtccgcggtgggcgccacgcgcactggaagtcacacatccccacatcattatagcacccctcatcacgctctccacgacttaatgattatgatgcttcacatcccatcactgtcgctcttcgtctgtgtcactgcctgatcgacaacgatgtggtatcgccagaagcccgcgttcgtcgctctatatcactatcgcatcacagccgcagacaacacaggagaggactacgatgactaacaagacgaacacgacagatcatgctggaaacaacacatacgttggactatatcgttatcacgccggacaganacgtacgagtgccgccgccaccgcccccctctcgctcgcgcgcccctcactcatatacatctcacacacaacatagagacacgtctacacgcggggcgactatactcgacgaagccagcaacacaggacaaaccgactgtcatatctaacgctcagcactcaccagaccagtacacacgcactccanactgtaatatctctatagagctataaataggagaaaatatagcaccggctacgcgacgcgaacaccacacccgacaccgcgccctccaccgaaacgactctcctcacgggaaccgtgggcgcgcgccgcgcggcggtcagtgcgggcgcgtgccaaacgacgtcgcctgagtctggagactcgtnagcgcgtggtggactaggggcccatcacagaccagatacggactcatacatcatccgagctcctccatccctacgactcgtctgatcgccgtctgtcaccgctcctggcacg

SEQ ID NO: 875 - DNA, 465 bp, Glycine max
  Peptide Sequence Number=SeqID_9112
  Probeset Number=SeqID_10654
gattgttataccagcagcaacacctttcgttgcaacatggtcatcatcttcagggcacacatcgccaacaagaagctcaccatatggttggacaaagttgaggcattagcattctaagaggatgtcaggttagcaagttgtgatgttataacacacataaactccttccgccagtacaacaagagctccagccccatgagagccgttttcacagggcaacaattgttgatgttgaacaatgatccagtctcatagttcacccaagccaggaaaactggtgtttatggcatggtatgtgaagctatatttcaggatgaggttcagggtcggggtctttatatccaatggatacaagcccaaggtcaaatgtcgtcctcaaggttcccttcagtaaaaatggcacctttagtctgtttcagaccgccaacatgtgatgtggatttttagggactacgctttttatta

SEQ ID NO: 876 - DNA, 458 bp, Glycine max
  Peptide Sequence Number=SeqID_9113
  Probeset Number=SeqID_10655
agagacgatgagcaacgggaggaggagcatcggagacgatgacaagggattgctgtggagacttcctaaggttaggatcaaagacgtcggcaaagttggtcccgcctttggactcggattcggttgcggattcggtttcggcgccggtcttatcggaggtgtaggattcggaccaggagttcctggactacagtttggtctcgggtttggagctggttgtggaatcggtgtagggtttggctatggcgtcggaagaggcgcggcttatgatcactctcgctcttattacaacgtcggaaaaccatctctagatgaagttgattctcttatcgatgaactagttgttcacaccaagaaacttgtcaaagctactacaaaagaaatcgacaagtggagaagaacttagccaaacttatcagtgttgcagcagctcctttcaagtaaatgccagtgttgta

SEQ ID NO: 877 - DNA, 632 bp, Glycine max
  misc_feature (67)..(68): n is a, c, g, or t
  misc_feature (83)..(83): n is a, c, g, or t
  misc_feature (90)..(91): n is a, c, g, or t
  misc_feature (118)..(118): n is a, c, g, or t
  misc_feature (141)..(141): n is a, c, g, or t
  misc_feature (143)..(144): n is a, c, g, or t
  misc_feature (146)..(146): n is a, c, g, or t
  misc_feature (148)..(148): n is a, c, g, or t
  Peptide Sequence Number=SeqID_9114
  Probeset Number=SeqID_10656
acaccgtttgttctattcttaactcaacttctgctaccccactctcttcttccaagtcccaaccacnngcttttctctacagntcatggnngcaaggttcaagaatcggaatcaacgnattttgggaagaattggccgttngnntngncagagtcgctctgcaagagacgatgtaagctcgttgccgtaacgaccttttcataccaccgataactgacatacatgtttaataaccacgggggtcacggaccctggaaggatcacgaagtccccgttaaggaggaaaaagacccttttcttcggggaaaaaccaattcattgtttttgggaaccgggaaccctgaaaaaaacccctggggggcacacgggagctgaattatttgtgggggccccccggagattttcaccaaaagagaaaaggccccccccaaattttaaagggggggggcaaaaaaatttatttttttttcccccccaaaaggggcccccccgtgtttgtggtgggggtgtttaaagggcccaaaaaaaccccggtagtttttttttttttttcgcggggggggggagaaaaaatatggggttttgtccctttttaaaaaaaataaaaaaaagaggggttgttttttttgtga

SEQ ID NO: 878 - DNA, 1452 bp, Glycine max
  misc_feature (48)..(48): n is a, c, g, or t
  misc_feature (56)..(56): n is a, c, g, or t
  misc_feature (58)..(58): n is a, c, g, or t
  misc_feature (127)..(127): n is a, c, g, or t
  misc_feature (131)..(131): n is a, c, g, or t
  misc_feature (134)..(134): n is a, c, g, or t
  misc_feature (141)..(141): n is a, c, g, or t
  misc_feature (169)..(169): n is a, c, g, or t
  misc_feature (172)..(172): n is a, c, g, or t
  misc_feature (209)..(209): n is a, c, g, or t
  misc_feature (223)..(223): n is a, c, g, or t
  misc_feature (255)..(255): n is a, c, g, or t
  misc_feature (257)..(257): n is a, c, g, or t
  misc_feature (313)..(313): n is a, c, g, or t
  misc_feature (759)..(759): n is a, c, g, or t
  misc_feature (778)..(778): n is a, c, g, or t
  misc_feature (780)..(780): n is a, c, g, or t
  misc_feature (881)..(881): n is a, c, g, or t
  misc_feature (951)..(953): n is a, c, g, or t
  misc_feature (955)..(957): n is a, c, g, or t
  misc_feature (999)..(999): n is a, c, g, or t
  misc_feature (1030)..(1031): n is a, c, g, or t
  misc_feature (1035)..(1035): n is a, c, g, or t
  misc_feature (1037)..(1037): n is a, c, g, or t
  misc_feature (1041)..(1041): n is a, c, g, or t
  misc_feature (1174)..(1174): n is a, c, g, or t
  misc_feature (1206)..(1206): n is a, c, g, or t
  misc_feature (1225)..(1225): n is a, c, g, or t
  misc_feature (1227)..(1227): n is a, c, g, or t
  misc_feature (1306)..(1306): n is a, c, g, or t
  misc_feature (1394)..(1394): n is a, c, g, or t
  misc_feature (1405)..(1407): n is a, c, g, or t
  misc_feature (1409)..(1409): n is a, c, g, or t
  misc_feature (1420)..(1420): n is a, c, g, or t
  misc_feature (1422)..(1425): n is a, c, g, or t
  misc_feature (1427)..(1429): n is a, c, g, or t
  misc_feature (1432)..(1432): n is a, c, g, or t
  Peptide Sequence Number=SeqID_9115
  Probeset Number=SeqID_10657
ctcgataatatacataatatctataaaagtctacatgtgatagatacncagtatananagagattgacatctcttacactccgcacgcctgccacgacatatatgatcaggtgtggcggtgatggtntgancgngatatanggaataagtagagtatatagagagaagntanacatagcatgtatatgtatacgacatctcacatactnaatcgtcattagangagactgctatcatgagagcggagaggtacanangtacacgagaggtcgtgagatccctgatgatagagagcagaggattctcatcccanagagcacgcagtgttgtctcagacgcacacccacaagcaaaaggatgatttcaacacaccgacagaacgtgtgacgatatcgatgcgacagctacaacatccatcgtcacacggataaacgcggcgccctcacacactccacgcggcactccactcctactcgtccgacgttgtctggtgtggatgatagtgcagtgtggtgttaatatacaataaaaatcgcacacgatgacatggtttgtggcgtagttcactgctattccatgcgagggtgggcgtgagagatttaggtcatgagcaggggatttatatatatgacgttctcacgctataccaaacaagcgcatacgagaggagtaaatacacgtcacctcgtcgttttagactttcttcactagtcttagtatgtaatctcactggctctattaatcggagtggtgtagttnccgtatagaagggcgagtntnctgtgggcgtgcgttcgcgctgcattgtctgatcttcgcgagctctttcaatgaaaactatctctccggtgtgagcaccgctgccgcgctcgcgtcctcanggcgagcagaatctccatgagaggggtgtacacccacgccacacccgacaaatagtgagcggagggcacnnnannnccggactagccaaaactacacctatcacacaccccagaggcngcgccgacgcagaccgcgatcaccacgtggnngcgncngcgncttacaaataccacgtgtacgtaatacaggaggaggatagcttacccaacgagtcacgacaatatcaatacatagtacgttcttgttcagttgatataggtatggtgtgtacttctactaccccccatctttnttagcaagtccgtgttactattctcctgtgtnactcctcacagagagtagngnagcgtgttgaccgcggcgccggcagccctcggagacgcgcaactctcccgttcagcaacccacttttttccatggcgcncggtggtgtattgagagtagtgctcgtttttgtatggggtgggggccccggtaacccagatttgtggaggattgggggggaccccccncaaaccacaannnancaaacaataanannnngnnngangggacccgccgaaaaaaaaa

SEQ ID NO: 879 - DNA, 1508 bp, Glycine max
  misc_feature (1)..(1): n is a, c, g, or t
  misc_feature (21)..(21): n is a, c, g, or t
  misc_feature (23)..(23): n is a, c, g, or t
  misc_feature (89)..(89): n is a, c, g, or t
  misc_feature (125)..(125): n is a, c, g, or t
  misc_feature (231)..(231): n is a, c, g, or t
  Probeset Number=SeqID_10658
natgggatcgcatatagacananttttcgtgtgatatatatgtgtcgcatggcgcgcgtgacggacgcaccggtcatcgcaatttgcanccgcgcgacgcgcgcggccagcgtattctcacgacntatattttcatgcggcgcggcgcgctgtataatatctccgcgatagtgtgtagtatacgagcgtgacgcctacacgcacccgcgtctgcgatgtgtatgattggtntgttcacatattccgcaccacacaacagcggcggctatgtattgtttgtgagcagtatacacagagtctcgagcatcgcagctgattgttcgacccgattcgtattgtttctatctattatgccgccgcgcgccggtccttcagacgctattctatcatatattttctccacacctgacacccactcgttatattctgcgcgcgcgcgatatttattatattgacatatgtgcgagcgcgcatatcaccattgcagcacgctctttcataacagcgcgcgcaagacgcgcgagcgaatttacctcacctgtcatgtatccagcgcagctacacccacgccacctgtctttcacatgtgacacatcttaacatcggatccgatggaacaagacggtcgttatcttacaacagagatggatattccaacaacgcggcacgcggtggtatatggatcaacaagaggcgtgtggttgttctacaaatcagtatttgttagtgagatgaatccctgcaacacacaccatcttcttccgtctttattgatccgcgcacttgtttctaggtacgaacatgtggtctggcaaattaacgcgccttttattatacttgccgccgcgcgagaggtgtttttaacgcgctagctcaacttaatctaaacgggcgcgcgaataaataagagggggggagaaaaatagatatggtcggtatgtgggcactgagtgtttcgtttcagaaataaatacatttttcattctacacgccgcgcgatgcttgcgcgtggagcataaaacaaccggctcgggtatatcaattgtgtgtgtgtgtggtttgagggaggggggtgcgcaccgccactacgcatcggatactccggagcgcgacgacataccgcgtcgcatataagggctcgcgaataatagataaaaaggggggagtaagacggatatatatcacatatttagtggatctttatcagaggtgcgccgcgtctcaaaaattaaaatgtcaagttggcctaaacaattgtgtagcctaaataggttgttggaaacgttgtaggggatggaacgcgttgagtctggggttgtgtggcggtgatcgttacacaataagaactccatataaactagtgtcggagaggtggaattgattcacaacatccgaacaccgcagcacatacgcggaaaagacaccgaacagaacaaacgcggcgaagaggccgcggcggaacaatagcggcggctgatataagtagggcgagaggaaggggaggatcc

SEQ ID NO: 880 - DNA, 522 bp, Glycine max
  misc_feature (497)..(497): n is a, c, g, or t
  misc_feature (511)..(511): n is a, c, g, or t
  Peptide Sequence Number=SeqID_9116
  Probeset Number=SeqID_10659
atcacacacacacacaccagcaaaaatattccaacgaagcagaagatcatcgatcgatctccaactccaacaactccggcgccgggctttgatcggaagggaagaaggaggaggaggatgcggatgagctgcaacgggtgccgggtgctccgcaaggggtgcggcgagggctgcaccatccgcccctgcctggagtggatccggagccccgacgcgcaggccaacgccaccgtcttcctcgccaagttctacggccgcgccggcctgctcaacctcctcgccgccgaagacgccgccctccgcccggcgctcttccgctcgctgctctacgaggcctgcggccgcatggtcaaccctgtctacggctccgtcggcctgctctggtccggccagtggggggcctgccaggccgccgtcgaggccgtgctcaagggccgccccatcgtccgcgtcacgtccgacgcgcccctcacggcgtgcgacatccgccatgtcgncaaggccgaccgcnctgctgcggcg

SEQ ID NO: 881 - DNA, 890 bp, Glycine max
  misc_feature (496)..(496): n is a, c, g, or t
  misc_feature (608)..(608): n is a, c, g, or t
  misc_feature (617)..(617): n is a, c, g, or t
  misc_feature (622)..(622): n is a, c, g, or t
  misc_feature (639)..(639): n is a, c, g, or t
  misc_feature (654)..(654): n is a, c, g, or t
  misc_feature (658)..(658): n is a, c, g, or t
  misc_feature (667)..(667): n is a, c, g, or t
  misc_feature (717)..(717): n is a, c, g, or t
  misc_feature (745)..(745): n is a, c, g, or t
  misc_feature (763)..(763): n is a, c, g, or t
  misc_feature (765)..(765): n is a, c, g, or t
  misc_feature (802)..(802): n is a, c, g, or t
  misc_feature (812)..(812): n is a, c, g, or t
  misc_feature (835)..(835): n is a, c, g, or t
  misc_feature (877)..(877): n is a, c, g, or t
  misc_feature (880)..(880): n is a, c, g, or t
  Peptide Sequence Number=SeqID_9117
  Probeset Number=SeqID_10660
ttcggcacgggtttcatctttcttccatcttccaccaaattaaaaacccaaaccaacataacataacataacataacccaaccctttcttttcttttctattcacaccacttggttagtgtctctttctgtatcaaacaatggacgagtttctcttgaaagctgagaagggccaacgccattcgaagacacaacaacgaacattttcgccgtcttttccaaagcccttcgcattctcgaactttgtctcgtccttgttctcctctcgtggatcctcacgcgcctccccttcgcgctcgcactctccgccgagttcctccgccgcctcatcgccttcgccgccagccccctcgtcgtcttcgccgtctccaacgccatcatcgccgccctcctagcccagtcccgccgcctctccgcccctcactccgccgactcactttaccgcgagttcctccacacgcgcactgccgtcaccgaaactcacgcgcctccgtcancgccgccgtcaccgccaccgccagaacccgaattttcacgaaaaagcaggtcgtcgtcgaaaaagtgcatgaagcgccttccgccggaacggccgcgaaattaccgcaggantcagcgganaaaanaaaggtggacgccgccnggaaactgccgcccngaancagtgcggnggtcggaaaacgaaaaagagggggaatgcttgccggaaatttgttccgcnggaagactcagcaatgaagatttcaacncgcctaaaacgttcatcncnaaacaattgaggttctgggaaaaaaattcttccgccnttgttgttcnaaatccccctaaatttaaaaccnagggaaaaaaataaataaaaaaatgcttcaatatcaaatccntcnaaaaaaaaaa

SEQ ID NO: 882 - DNA, 1358 bp, Glycine max
  misc_feature (28)..(28): n is a, c, g, or t
  misc_feature (45)..(45): n is a, c, g, or t
  misc_feature (1280)..(1280): n is a, c, g, or t
  misc_feature (1339)..(1339): n is a, c, g, or t
  Probeset Number=SeqID_10661
cataggtcgtcatcggtgactcgaagtnatcacgtcacgacggcngcgcatcgctcacactctcgtatcgcagcctctatcatgtgttgaagcccctccctacgttcgcagctacaaatgcatccgtgactcgtcgcgagctatctctctcagatatggagtatagcatagtgttgaagcgagagcgatagacggtgcgacgcgacatagtcagaatgcagtatcatagttcatttaagaacatataatcaagcttgcaatgagtacgagtcgtataaatatcgatccgaatcagcctgcagcttagttggcagactcgacatcgaacagcatcttatcaatatctgccgattcttatattagtagctctgtaatagttgtatatgatgcgccgttctgttggaagtataggagcatggatatatttcacgtagcattcgtataacttattcgtcgccaacaatcttgtgtactgctcatagtaagctgtgtgagtcgtcgtgtaggctgcgtgaattagagggacgctggcgtgatacaactgaaatagattaaagtacagcacgtgacggagagcgcgcctgacgagaatgtgtctacgtcttggcgttataatagtgagcctgttatatgtatctgtcggcgtcatatcgatatcaaccgctacgtaaatatcgacaactctgtgttggctgcggctgtggtgtaatagccatttaacgatcgagcctgcgacagaatcgaagagcgccgagatacggatgagataatggggcgcgtgtgctgagttaatcgcagcgaatgatggagccacactgaggtctacgccgcatctcagcactacaactgagtcgtgcgaccgagtgcagcctagaattaaactgtgtcgcatatactcgattctgacgcatcgcatgtgcgcggccgttctttgtgttgacttattatggcttcttggttagaagtatgatatgatgatgataaaaataaacatgtacatctataacaactacagggaggcggagcgcgctcaacgcagttcgacctatatgacattattgttaacatacagctctcctatcaatatttctctgccgtcgtttctccactcactcggtgaaagttgcagttgtagactaataaatactgagacgatggtggaacgagcgcctacctccctctgtgcgtgtacctatgcatatataataaaccctatacgtaatataaaatagggtcgtgctgcgtgccgcgcgggcgtcgcgtgcggtcggcggtccctnctatctctcctattataagatcgtactagagccgagagcgagcgagtgtgcgcgagggnaaggaagggaaggggaggg

SEQ ID NO: 883 - DNA, 300 bp, Glycine max
  misc_feature (285)..(285): n is a, c, g, or t
  misc_feature (290)..(290): n is a, c, g, or t
  Peptide Sequence Number=SeqID_9118
  Probeset Number=SeqID_10662
tcagctacgtaggcccccccccctttgaatgaaaataccgcgagtctcttgggaagaagcgcagcatatgataataactttggaaaaacttctttgactcttcaagaaaaatatggattggcgcctgaaaacagaactctttcatttggggcaagcaactacagctcagatttgaagaacctgggtcttggaaaagaagagtataaaacctctttgacaactgagaacagatttacctccaaagatgctagtccaagcgcaaatctcaaatactctgactatctnaagtntaaaccctca

SEQ ID NO: 884 - DNA, 470 bp, Glycine max
  misc_feature (453)..(453): n is a, c, g, or t
  Probeset Number=SeqID_10663
agccgagtaatcaatcatcctaggtttttggtggcaagcagctcgctacaatgacaaagggaacagggagtttcggaaagaggaggaacaagagtcacacgctgtgtgtgagatgtggacgtcgtagcttccacatccaaaagagtcgctgctctgcctgcgcttaccccgccgctcgcaagaggacctacaactggagtgtgaaggcaatcaggaggaagacaaccggaaccggcaggatgagatatctcaaaaatgtcccccgtcgcttcaagaccggtttcagagaaggtactgaagccaagccaaggaacaagggagcagctgcttcatcaacctaaaagaaaccccacttggtgtttaaggcagcaagggactaaaatttagcacttttctctcgctctatctagttttgagatttgctattcctgaatactattttatgtttttggnttcaagttttcgaaccc

SEQ ID NO: 885 - DNA, 393 bp, Glycine max
  misc_feature (131)..(131): n is a, c, g, or t
  misc_feature (146)..(146): n is a, c, g, or t
  misc_feature (152)..(152): n is a, c, g, or t
  misc_feature (173)..(173): n is a, c, g, or t
  misc_feature (201)..(201): n is a, c, g, or t
  misc_feature (233)..(233): n is a, c, g, or t
  misc_feature (266)..(266): n is a, c, g, or t
  misc_feature (291)..(291): n is a, c, g, or t
  misc_feature (297)..(297): n is a, c, g, or t
  Peptide Sequence Number=SeqID_9119
  Probeset Number=SeqID_10664
cttttgcgtgtacatcttggtggaaacgtgacaaaatgactacgaagcgtcgcaatggtggacgttccaagcacggacggggccatgtgaaccctgtccgttgcaccaactgcgctcgttgcgtccctaangacaaggcgatcaanaagttngtgattcgtaacattgttgangctgctgctgtcagggacatcactgaancttcagtctacagtatgtaccagctccccaanttatacgcgaaacttcattactgtgtgtcatgngccattcactccaaggttgtgcgtnacaganctaaggctgaaaggcgtaacaggaacccacctcagcgcaactttgcacgaggtccacgaccgggaggacagcagcccaggaagtaatttgtctcgt

SEQ ID NO: 886 - DNA, 1468 bp, Glycine max
  misc_feature (23)..(23): n is a, c, g, or t
  misc_feature (26)..(26): n is a, c, g, or t
  misc_feature (41)..(41): n is a, c, g, or t
  misc_feature (48)..(48): n is a, c, g, or t
  misc_feature (90)..(91): n is a, c, g, or t
  misc_feature (212)..(212): n is a, c, g, or t
  misc_feature (240)..(240): n is a, c, g, or t
  misc_feature (260)..(260): n is a, c, g, or t
  misc_feature (287)..(287): n is a, c, g, or t
  misc_feature (416)..(416): n is a, c, g, or t
  misc_feature (615)..(615): n is a, c, g, or t
  misc_feature (630)..(630): n is a, c, g, or t
  misc_feature (733)..(733): n is a, c, g, or t
  misc_feature (736)..(736): n is a, c, g, or t
  misc_feature (742)..(744): n is a, c, g, or t
  misc_feature (746)..(746): n is a, c, g, or t
  misc_feature (749)..(749): n is a, c, g, or t
  misc_feature (757)..(758): n is a, c, g, or t
  misc_feature (761)..(761): n is a, c, g, or t
  misc_feature (774)..(774): n is a, c, g, or t
  misc_feature (857)..(857): n is a, c, g, or t
  misc_feature (879)..(879): n is a, c, g, or t
  misc_feature (1032)..(1032): n is a, c, g, or t
  misc_feature (1077)..(1077): n is a, c, g, or t
  misc_feature (1128)..(1128): n is a, c, g, or t
  misc_feature (1130)..(1130): n is a, c, g, or t
  misc_feature (1157)..(1157): n is a, c, g, or t
  misc_feature (1194)..(1194): n is a, c, g, or t
  misc_feature (1205)..(1205): n is a, c, g, or t
  misc_feature (1212)..(1212): n is a, c, g, or t
  Peptide Sequence Number=SeqID_9120
  Probeset Number=SeqID_10665
gtagttggtggtgtgtgttgttntantactttatatccacnagccacncaccacaacagagctgtgacgactactcctctctataccacnncccgcaccaccgcgccgcagaggactctccctctccaccatgatattgtataatagatagtgtatcttctcacaacatatataatacgtcacggtgctctgcctcggtttcgagtgtcaanactagctgcgtcactctcctacatccancccactcacatctctcgtgnaggacgctggatctcgctgtactcccncaacgccttctgtgacccgcggcgctttcgttcactctaactaacttatttataatatatatcaagaataaccatagtgtatatgtatattacattatccaggcatgccatcgcttgtaccactcctantcttagacttaacttgtctaacgattgtctgttgctgtagttcctctggtgtttctctcacatcccttcacgcgctcgctacgcccctctctagtagtctctctctatgactctcccccactctcgccttcgactgactcgtctctctcgccgctctgcgtgcgcgtgtgcgacttactgtatcgttatatcgtcgtgntgatagattgtgatnatatatatattattggtatagcgtgagtggcgcgtgctattattagtgatgagttgagttgcggcgtctattggttgtcgacgggtctgacgtggaattagtnagntaagannnanaanccaagtcnnacnctcgttctgcgcnactccctcctatcataatatatggctgtagccgctacgtcccatccctctggctgactcgtgtgtgtggtggtggattagagngatgtagagaaatacatgttanattatagtatctcggatatacttcttccctcgccatcgcgctccctgctcgagtcacacatctatattatctactgtgtgttcgtcagctcgctagcgcatgacactctacgcctactgatgcctgcggacagatgttctgtactgttggtgngtcatcggccgcgctcgcttctctcttctctctcacctactcgancagcgccctctcacactgtcagacagctgtcatgactgacacacatatgcntnttcgactctacgcacgctcatgctgantgactgatctggcgcgatggctgttgtcttctgaccnccaccacgcanctactcnctccgcagccactaccaggtcgctacgcacatatctacacaacgttccctcactccatatcacgtatgcacgacgtggtcgcgcggccgctctcctcaccgtctctgtcgatacctcctgccctcgcgcgtgcgatctctgcgtgcctctggcatatagctctgtatagtactgcttcttctcttagtcgtgtcacgatcatccacttgagctgtctatcacattcttcactcatctctcactacgtgtcctacca

SEQ ID NO: 887 - DNA, 1848 bp, Glycine max
  misc_feature (19)..(19): n is a, c, g, or t
  misc_feature (25)..(26): n is a, c, g, or t
  misc_feature (33)..(38): n is a, c, g, or t
  misc_feature (46)..(46): n is a, c, g, or t
  misc_feature (64)..(64): n is a, c, g, or t
  misc_feature (101)..(101): n is a, c, g, or t
  misc_feature (113)..(113): n is a, c, g, or t
  misc_feature (115)..(115): n is a, c, g, or t
  misc_feature (131)..(131): n is a, c, g, or t
  misc_feature (141)..(141): n is a, c, g, or t
  misc_feature (243)..(243): n is a, c, g, or t
  misc_feature (248)..(249): n is a, c, g, or t
  misc_feature (253)..(253): n is a, c, g, or t
  misc_feature (260)..(260): n is a, c, g, or t
  misc_feature (272)..(272): n is a, c, g, or t
  misc_feature (304)..(304): n is a, c, g, or t
  misc_feature (325)..(325): n is a, c, g, or t
  misc_feature (474)..(474): n is a, c, g, or t
  misc_feature (514)..(514): n is a, c, g, or t
  misc_feature (552)..(552): n is a, c, g, or t
  misc_feature (587)..(587): n is a, c, g, or t
  misc_feature (596)..(596): n is a, c, g, or t
  misc_feature (605)..(605): n is a, c, g, or t
  misc_feature (609)..(609): n is a, c, g, or t
  misc_feature (664)..(664): n is a, c, g, or t
  misc_feature (704)..(704): n is a, c, g, or t
  misc_feature (724)..(724): n is a, c, g, or t
  misc_feature (776)..(776): n is a, c, g, or t
  misc_feature (780)..(780): n is a, c, g, or t
  misc_feature (788)..(788): n is a, c, g, or t
  misc_feature (822)..(822): n is a, c, g, or t
  misc_feature (853)..(853): n is a, c, g, or t
  misc_feature (860)..(860): n is a, c, g, or t
  misc_feature (867)..(867): n is a, c, g, or t
  misc_feature (881)..(881): n is a, c, g, or t
  misc_feature (883)..(883): n is a, c, g, or t
  misc_feature (885)..(885): n is a, c, g, or t
  misc_feature (896)..(896): n is a, c, g, or t
  misc_feature (905)..(905): n is a, c, g, or t
  misc_feature (984)..(984): n is a, c, g, or t
  misc_feature (1004)..(1005): n is a, c, g, or t
  misc_feature (1033)..(1033): n is a, c, g, or t
  misc_feature (1040)..(1040): n is a, c, g, or t
  misc_feature (1070)..(1070): n is a, c, g, or t
  misc_feature (1239)..(1239): n is a, c, g, or t
  misc_feature (1251)..(1251): n is a, c, g, or t
  misc_feature (1316)..(1316): n is a, c, g, or t
  misc_feature (1327)..(1327): n is a, c, g, or t
  misc_feature (1392)..(1392): n is a, c, g, or t
  misc_feature (1402)..(1402): n is a, c, g, or t
  misc_feature (1450)..(1450): n is a, c, g, or t
  misc_feature (1452)..(1452): n is a, c, g, or t
  misc_feature (1486)..(1486): n is a, c, g, or t
  misc_feature (1501)..(1501): n is a, c, g, or t
  misc_feature (1530)..(1530): n is a, c, g, or t
  misc_feature (1542)..(1542): n is a, c, g, or t
  misc_feature (1602)..(1602): n is a, c, g, or t
  misc_feature (1781)..(1781): n is a, c, g, or t
  misc_feature (1786)..(1786): n is a, c, g, or t
  misc_feature (1804)..(1804): n is a, c, g, or t
  misc_feature (1824)..(1824): n is a, c, g, or t
  misc_feature (1848)..(1848): n is a, c, g, or t
  Probeset Number=SeqID_10666
gtgggagtgtgagtgcctncccccnncccgcgnnnnnngggggagncttgtgggtgacgatggntcgggcgctgcctcggtgtgttgtgtgttacactttnatctatacgacncnagcaccacaaacttcntgtaattggntggaatatgatattaggagtgttatagaaaatataatctattcttatattatgtttgctgttttgtttattataggtactcaggtaggttgtgtggtgaatnataannatgnacaaccncactctcatcantgtgtgatgatgaggtgtgtgtcatatcggantgaccgtccagactatacatnagatgacacccgtctcgtcactcgtgtgctagactgtctacttttacatagatatgtatggcgtaacgtctacgtgcacagcttgttgggtctgtgtgatatctattcgtctctcatcatctgctcactctgtgacatcatagaactgntgcgctagaacgacatggcagtgcgtgtgcatgagaattncacatactatctcatcacccatgtagcgtgctggcgtntgatgaaggagagagagtgtatgtagggatgtgantgaagagangaaggaganagangactgcatatgtgctgagtcccactcgtatactacgtgtatgttgtgagagtgangacatgagcacagacaggagccgcagaccagtagacatgntccgcaggatagcacatatnctatgtagttgactattatgtagttgagattgtagaggatgagagattatanacantaaataangctgtatgatatgtactaagaccaaacttcatanatagtgctcgcgcacgacgaggcgaggagcnggatacncacagancgcacgccgagacngncncgcacgaatancacacatgncactcaacacaactacactacactatacacagtgtacatatgatactgactctcatgtatgatgactatagatgtgtgntacgaggtcaacagcgaaannaggcgagtgacgcatagcactatgatgnacatgancgggtcagctgtctgatcgatggcgactanatgctgtgcgtctgtctgcctgtatgtgatctactcgtctccccccacacacccacgcactgttgacgttgtcacgatctgcatcactctctcaacgtctatgtacaccacgtaacatgcctgtagtacgacatatactgtatagtagcatattagcacatactgcaantgagcacacatnttcgaacaactctcgatacagagtactatagagcaagatagactatctgctgcagtgacgtagtngtcatcgagcnatatgtacgtcatgtctcagactcgcgtatgatgaggttgattcgtctccaccaacatcctctcntcactatggntgcgacccatatacgctctgtgagtattgacgtagatgatgatcatcntncttggcatgaagtgagttctgctcactgtgatcntagtgcgctctcctncatgtgggttatgtacgatggcgcacacngcctcacgtccnctgtcgcgaacgacctctcacgcgcgcgtacgcgacagctctagccactcatggcgacgntgcacgcggcgtgtatgtaatgatcacgtcaagcccgatgtgacagaggacgccatgacagtggtgtcatgtgcatcgtggtactctgagcatgccgggctcgatcgcgtatgtcgctagatacactctgcggcagcgcgacctatgataccacgttccaatgtatacattctcccgancagcncttctctacgagatgccnacgagtcacgatacacaccntcatcagttgcacacatacctcgn

SEQ ID NO: 888 - DNA, 409 bp, Glycine max
  misc_feature (51)..(51): n is a, c, g, or t
  misc_feature (132)..(132): n is a, c, g, or t
  misc_feature (160)..(160): n is a, c, g, or t
  misc_feature (290)..(290): n is a, c, g, or t
  misc_feature (379)..(379): n is a, c, g, or t
  Peptide Sequence Number=SeqID_9121
  Probeset Number=SeqID_10667
cgcggctggctgggcttcgttttgctgggtggctttgtgctgtgttgggtngcgtcggtgctgctttctttgggtctttccctccccttcttgcttgtgtttttggtcttgtggtgccggctttctgtgggnttggtggcgctcgtccccttggtcgggnggtggtccggtggtgcttgttcgttggctgcgtgggtgttgtcgctttggttgccggctttttgcggcctttctgctttggttttgtgggcgcgtctctggcggccggcgttcggcgcgtggtgttctcngccctgctccgcccttgggtggggggggttcctttgttggctttccgccccccccccctgtccttgcgtttggccggtggtgctaaaanaaaacgggctgctttttgcgtcgggctttc

SEQ ID NO: 889 - DNA, 1584 bp, Glycine max
  misc_feature (670)..(670): n is a, c, g, or t
  misc_feature (933)..(933): n is a, c, g, or t
  misc_feature (999)..(999): n is a, c, g, or t
  misc_feature (1270)..(1270): n is a, c, g, or t
  misc_feature (1274)..(1274): n is a, c, g, or t
  misc_feature (1284)..(1284): n is a, c, g, or t
  misc_feature (1319)..(1319): n is a, c, g, or t
  misc_feature (1372)..(1372): n is a, c, g, or t
  misc_feature (1390)..(1390): n is a, c, g, or t
  misc_feature (1427)..(1427): n is a, c, g, or t
  misc_feature (1467)..(1467): n is a, c, g, or t
  Peptide Sequence Number=SeqID_9122
  Probeset Number=SeqID_10668
gagtacgcgaccgcatcgacttagcgcgtccttctcttctatatatatcttcgctcattgctctatcagcgctaatatatcactctaccgacaataagattgaggacgatagaggccgcccccccttctcagctgggagcatgatgtctacgtgtgtggttgccctcgctcccaccaatagatactgtgaggagagatggacgtaaacgaacatcagagatccgcatagaaaacttagtgtagtttgatgacatgaggacgagcgtcgttgcgacggcgtcgtcccggcgacactccacggaatggactgcatcgcgtcctggacggtcgagtaagagttattgcattataggtacgcaactatacctaagcgagaactagcgcgacagacgcggacggtcatggatataattagtatatatttacctaggccgcgcctacgtcagcatattacaatcataacagcagctaatgctatctcgcactgctacctctcgcgttgtactactcgaactgtttctatctattgggaggatagctaaatacagatgttggtgagacattatgcactggatccttcagttccctaatgtatacctcgtggaatataacaacatccacccataaatagcgagagcggttaggtggccgcatagcacgaaatagatantaaatgagcgcatcacatatatagtatgctgtcgccttcgggatacactcttatatagtatacccaccttccctggtcacattgtgtatcgcgtatgatcggagtgttgtcatgggtatatgctgcttttaatttgtaaactcgcgctatacgtacggtatattatgtgttgactagtgcggctcatccgcattatgattgcatattattatgtgtacgacccaccaccacaccgagatatcatcttcttgtgctagaactantgtattcatcgccggttaatagctgtctcctcatattcgtctccgtcacatccgcgtagaagaccnatcgcatttctctcacaattcagtacgtaatctattgtgtactagagtagtccttcacgccgtctgccataatgacctccgtcgcaacgagactcgtgctcaaataacgttctgcgtcataatgtggtatgtatagatcacgacctaagcgcacacgacgtttgtctcgcgtatctatatataccttcactgccgctatatatatacacattcgaaatatagcgtctcaaacgggaatgcatatcatagagagtgatatacacgtatcgtncganatgttaatancacaaacacactgatagggtatgacacacatctcncactcatgcgtctatgatagacacacaaccgtgtgcgaattataacacgacgntctagacgtcgagatgcngtgtagcacggtgtactatagttcggagaagtcgccntagctactacgtattatactcgtcatcacatgcgtcgcgntatagtcagtcgaagcacgagcctactcacgtccgcgcgagtatagaagtgagcgcgcgtcatctgtacacacaccagccgtagcgtgagtatagctacatcatattcgcctgcgcg

SEQ ID NO: 890 - DNA, 451 bp, Glycine max
  Probeset Number=SeqID_10669
aaattttattgtttgacactcatctccacccaattaactttcaatgaccaggagctagtcatccatggtggcaacggcatcggtaagatctcaccttgcttttttacttggatttatagcctgggtttgttggtgaagtaatgatcgaaggagatattaaattgttgtctgtgatagcaaatggcttgcctacaacagaggactttgagcatgtcactgatttggaaatattgaaggttccacctatccccatggataaattcatttatctttttattgggttaatctctacagcaaataattttaaacatagaatagtggttcatagaactggggtatcatgcgtgggtagtgactaccttattgaagatccttcttcctgttttgattgcattttcgttcactatgtacttggttacaccttgtcacaagatagcactcttcaaaattt

SEQ ID NO: 891 - DNA, 475 bp, Glycine max
  misc_feature (458)..(458): n is a, c, g, or t
  Peptide Sequence Number=SeqID_9123
  Probeset Number=SeqID_10670
gttgggtgctctctctctcttctctctaaaaaatctttcagagagagagagtcttgtttttccggttactttggtggttctcttccggcggactcttcaccggtcctagagattggtctcccgtaaaagtggtttcgttgacgtttttacttggacttttgactccggtgactctctatcttggaatttgacagccggcttttgactctggcgaagtcgacttgttctccggtggcgtcggacggcttgttccggagtttttttctttgatcctcgtctctgttttactcttcaagtcttagccctcttttgatttggatccgattgtttaatccttcccttggttagggtttgttcatcttcagactaatctttatcatcaaagaaggttgtttcagatgcaggataattggatctttaaaatcgattgaaagtggctgattcttctgtcgtaggcnaagatttgcgttatatg

SEQ ID NO: 892 - DNA, 239 bp, Glycine max
  misc_feature (112)..(117): n is a, c, g, or t
  Probeset Number=SeqID_10671
tcatcagaacagttgacataacatgaggcctataactgggagcaatgagtgttacgccctgacagtcattaaagccaagctggatgaacacatactctgtgactcggtagtnnnnnntaacattgcccagacaatggaaggtgttaagaacttatctttggaatcaacttttggatgggagctagaaacatatttctgtcaggtgctggcagatgttatagaatctatagcaggagcga

SEQ ID NO: 893 - DNA, 1336 bp, Glycine max
  misc_feature (28)..(28): n is a, c, g, or t
  misc_feature (45)..(45): n is a, c, g, or t
  misc_feature (67)..(67): n is a, c, g, or t
  misc_feature (72)..(72): n is a, c, g, or t
  misc_feature (121)..(123): n is a, c, g, or t
  misc_feature (125)..(127): n is a, c, g, or t
  misc_feature (178)..(178): n is a, c, g, or t
  misc_feature (217)..(217): n is a, c, g, or t
  misc_feature (253)..(253): n is a, c, g, or t
  misc_feature (607)..(607): n is a, c, g, or t
  misc_feature (754)..(754): n is a, c, g, or t
  misc_feature (954)..(954): n is a, c, g, or t
  Peptide Sequence Number=SeqID_9124
  Probeset Number=SeqID_10672
aaaaaattaaaagaaaaatagatggaancgagggaggaggggagnagcaatataaacattataaacncactnaactatacttataatctgctgtataataagataagagggagagagaggnnntnnnctactcatcagcgtgcttatctactgacctcatacttgacaaatacaaagnggattgtatgcacagatattataggcaggcctaggatcngaagtcctgagtgagcttgtttgtgtgcgaggtacngcagtagggcgtctcgtgtctgtttggctactacttctctctgtctcttgatggagctgccttggttatgcacgccctctgcgtcgtgcgccgtgcgctgatccgactcgcgcgcgcggagcggatcggtcgtgactgatggtgacagagatcatagagtaagagcgagagatctgttaccaggcagctcaatactatagtgttcaccaggcacaatacggtggagtatattcatgcataataatctcaatcaataacacacagtcgctgtatctcgcatatttctcactctatatattagtctagcgtacagaagccgatatagagaagaatacagacataatgaactatatncgaccaacatatatatctgaacatattaccttaatcatataacaaatcaatcatcatatctaacaacggcggagcagcgacgaggcgtggagagaagcaagaaatacagcaatctatcatatcatactaatttctaatatccatgcncctaagtaaacataaactatatcaatagacgacgtaagtaatggcacgcgagcagatacaagactcaagaaagtagcaactatagcacttacaacaatacattctatcgctcatactacagatcactattgagctgctgataggtagagagagtacgtcgtgcaggagtagtattatagatataagacacacggcgactnagagtctcgctcaagtctagatcctacatacacatctacccgctatgtagatacgctctactgtgcacatcgttgattgatgtagtcgacgcgtgagcatgagcgatgtgtatacagatatgaattacattatagtttagtatggtgtgtcattgagtgattccagaaaacaagaaacactatgcacacatcgtcctgaaatatagtgcattgtacgtagcgacgtagtagcttggctcgtgcgtgtggagtggttgacgtgagtacagagcgtacaagagtggtcactagtctattagtatattacgtatatactccagctacgaatgcagagcactcacataccgataagctcaagcttcgtcctacgtagagcgacgag

SEQ ID NO: 894 - DNA, 1062 bp, Glycine max
  misc_feature (1062)..(1062): n is a, c, g, or t
  Probeset Number=SeqID_10673
gccgctcgaggcggcgggccggagaatcctaaaaagctttttccacaatgttgggttgagccttttgaatggggtcgttaactttatgaacattgaaggcatgaaagggtattatcataagcacaccaatgggcgaaactgaggagtcgacaaggacaacatgtacgcggccataccactttttgtggttggaatttaaaaccgaaacaatattagatccagcatccagctaatgtgtttctaccgttacaacttagttctactgcatcatctaatctttttttattttattttgtcggttctgcatcatcatctccttttatacgagagaaggaatcatctattctacactcgaagattaagcaagcaatggctattactacaccttccaattcttcaattctcctctccctttctctattgctcatctccctctccctcgctgagtcgcaatctttcatcggagtaaactagggccatgtcctttacatccttccagcaccgcaagacacttgcacccttcacagatacaccgcaccctcattgctcatattagatcattgatggggacaactatgacgccagtcaatggttcgaacactaacattaacccactctatcaagaggagctaagaccgtgcccatcatctgcacttgcatcggatatgtgcaaaactgatcgcaccgactgggacaatttccaagtaaccaattatagtcggggaactacaaccaactcctctactccagaggcaaacactgctgatgtgcgtgaaggacaaagctgaagatgaagatgctgaggtgattgacagcattgactacgcctgggaccaaggtatagattgcgggccaattcagccaggaggctcttgttttgagcctaacacaatagcatcccatgcggcatttgccatgaatctctactaccaaacttctggcataaatcaatggaactgtgatttctctcaatcagcaacactcacatcccaaaatccaagttacaaagttttctaaatgtcactctctattgctgattaaaatttattacaaattacaaan

SEQ ID NO: 895 - DNA, 614 bp, Glycine max
  misc_feature (594)..(594): n is a, c, g, or t
  misc_feature (614)..(614): n is a, c, g, or t
  Peptide Sequence Number=SeqID_9125
  Probeset Number=SeqID_10674
tcgagtcagctacgtagggcccccccccccgagcttaagacgaagggaacatttgctacaagcacatccgacgccaacgtctacttcaccaggcttaccgaagacgaagtcactgtcttctcttctgtttcgcacggcgtattaggtcgctggaatgtcaggggctctccgacacttgcgggcgcctaccctgtgcatggtcagtctgaggttgtcctgaagtctggcgtcgctagcgctgtacggtccgctgtcctgtactccaacggacagtgggcactcctgcgaaacgatgaaatcgcctggacccggcccgagtttttgtcgggcactgtctctgcaatctgggccggccttcctgaggaggaggccttggcacaagcacttgccgatgagagccatcgtaacctcgtctccgcttacatccaccgtgtgcagaggcatattgaagatctgaagtacttcccagaatgggcgcagaatattccccagcgcattttgggtagtgtggttggcaagcccaaggaaaccacagtcgacgatatacaacaagatacctttggcttccacaaactggttgtcgtcgccaccaanacgggtcgcatcgctgcccn

SEQ ID NO: 896 - DNA, 1916 bp, Glycine max
  misc_feature (1)..(1): n is a, c, g, or t
  misc_feature (5)..(5): n is a, c, g, or t
  misc_feature (28)..(28): n is a, c, g, or t
  misc_feature (56)..(56): n is a, c, g, or t
  misc_feature (59)..(59): n is a, c, g, or t
  misc_feature (111)..(111): n is a, c, g, or t
  misc_feature (124)..(124): n is a, c, g, or t
  misc_feature (137)..(137): n is a, c, g, or t
  misc_feature (148)..(148): n is a, c, g, or t
  misc_feature (195)..(195): n is a, c, g, or t
  misc_feature (255)..(255): n is a, c, g, or t
  misc_feature (269)..(269): n is a, c, g, or t
  misc_feature (276)..(276): n is a, c, g, or t
  misc_feature (301)..(301): n is a, c, g, or t
  misc_feature (342)..(342): n is a, c, g, or t
  misc_feature (380)..(380): n is a, c, g, or t
  misc_feature (491)..(491): n is a, c, g, or t
  misc_feature (509)..(509): n is a, c, g, or t
  misc_feature (562)..(562): n is a, c, g, or t
  misc_feature (630)..(630): n is a, c, g, or t
  misc_feature (666)..(666): n is a, c, g, or t
  misc_feature (809)..(809): n is a, c, g, or t
  misc_feature (835)..(835): n is a, c, g, or t
  misc_feature (876)..(876): n is a, c, g, or t
  misc_feature (905)..(905): n is a, c, g, or t
  misc_feature (927)..(927): n is a, c, g, or t
  misc_feature (942)..(942): n is a, c, g, or t
  misc_feature (974)..(974): n is a, c, g, or t
  misc_feature (976)..(976): n is a, c, g, or t
  misc_feature (990)..(990): n is a, c, g, or t
  misc_feature (1028)..(1029): n is a, c, g, or t
  misc_feature (1071)..(1071): n is a, c, g, or t
  misc_feature (1120)..(1120): n is a, c, g, or t
  misc_feature (1135)..(1135): n is a, c, g, or t
  misc_feature (1185)..(1185): n is a, c, g, or t
  misc_feature (1187)..(1187): n is a, c, g, or t
  misc_feature (1212)..(1212): n is a, c, g, or t
  misc_feature (1331)..(1331): n is a, c, g, or t
  misc_feature (1336)..(1336): n is a, c, g, or t
  misc_feature (1349)..(1349): n is a, c, g, or t
  misc_feature (1378)..(1378): n is a, c, g, or t
  misc_feature (1551)..(1551): n is a, c, g, or t
  misc_feature (1785)..(1785): n is a, c, g, or t
  misc_feature (1797)..(1797): n is a, c, g, or t
  misc_feature (1840)..(1840): n is a, c, g, or t
  misc_feature (1874)..(1874): n is a, c, g, or t
  misc_feature (1879)..(1879): n is a, c, g, or t
  misc_feature (1882)..(1882): n is a, c, g, or t
  Peptide Sequence Number=SeqID_9126
  Probeset Number=SeqID_10675
ngtangatgcgtagctaggctcgaagtncgacatgtatatcacacgttgcgatcgnctnagtgagctctctacgagtcgacgacgtacgagatactatagtaatctcgacntcaggtgcgaatntagggcgtagcancgacctgcaancatagtagctcaattaaagataggatgttatggatgatatacgatgncgagcgagacagcgatattcgtatctcgccaagaaagagctcgtgagcggcgcagcgtgngcgtgtcgcgcgancgtgcgncgctcgttgaatcgttgcgtgttgnacgtcatagtacgcgtgcgtcgcgctgcagagtggagacgncgagtcagatcacagcgtgccgagatgaggagcacggncgtagcgagcgagcgcgcgacgcgctagagtcagacacacagcgacgagcgacactacggagcgcgcatgagcagatgcgagatgatgtacggatgcgtagcgcgctgatnatgacacatggcggccgnggcgtcgcgactagcgcgcgcgataatcgtatatgacctacggcttagagcgncacagatgatggcgagagcgtcgacgctttagtactcggcgcgtgcgacacgtccggtggctgcacgngagcatgagccacgttgaagcggtcgaccgacgcanagagagcgtcgaatggagcggcacatgcgtacgctcaagtcacacgtcgtctgagagatgaatcggagatgacgatgtatcatcgatactcgggcatcgtagcgatcatgtagacggttcgatatcgtagagtagatggtgcntatagagcagagtacatatgtggagntcgagcgcatcgacacgcgagtgcggaccgcgtccactcgnatcacccgatagtctagtcactagcaggngcgtacgagtcgtattagtatngaggcataatgtaangctatcggcgtatgatagtataaatagacgangncgcgcgcgtcgcgnctcattcgtcgtgcacgcgacgacaacggcgcacagcnncagcgtcaggtcgagagaggtgcatggtaatgtagagagcgntggcgatagtgacgatacatgcgatggatgagcgtacatagtaccacgnggaggtatgagtgancagagagcggcacgacgagcgagacgcgcagagtatagtagaagcgacantngttactgtaagagacgacgcggcgnttacgcaatgacacacagctactcgagcaagcagctatactgatcgcgcggtgtggaccgcagatgacaatgcgtcgagggttagtggcgctagtgacatagatagattatgtgttagntatcntatctcctgtcgnctactatgtgcggatcgcaactagagcgngttgacgatagacgtacgcgagacctctcgcagagcgcacgtcgctacgtcgcgaagatgatgagacagatagaacaccagacacgcatagaagataggcgtactattcacgtcgtcggtctccacgtcgagacgacagtcgcttgcacacgcagcgcgatagtgcatggcgnccgtcaccaacgcccacatattctcattatgttaacactaggttgcgtcaggagcatgagtcgcggcgaccacatacgtcagaagcgccgaggatgagtaaggatcacgagagtgcacaacggagcgctgaatgaaagactgctcgcctgtgcgtatagaactcacgagaaagaagaactactatatcatatagagtaagataggtgcagctcgactactgagacataacgcgncgtgagatgagnaagtacgacaacacatatatgaatacataatagaaaaatatgntgatgagataactgactatcatagatcatacganacagngcnaggcaggagcgtcagcaaaaaacagaaaggaaaa

SEQ ID NO: 897 - DNA, 600 bp, Glycine max
  misc_feature (104)..(104): n is a, c, g, or t
  misc_feature (119)..(120): n is a, c, g, or t
  Probeset Number=SeqID_10676
catcttggcttcttccttctggggtgtctctccatgatctcatatgctaatggttatgtcagcaatgggggttgggacaatgcccatgctacattctatggtgnaagtgatgcttctgnngacatgggtggggctttgtggtattggaacttgtatagtcaaagatattgggactacacagcagcacttagcactggcctggtcaacaatggtttgaggtgtgggtcatgctaccaaatcaatgtggcaatggaccacaatgggggctccccggggacccttgtaacacctgccacctaatttcttgcccccttgggggatggggtggaccctccccacaaccatttttgacttttttcaaaccgtggttttaccaaaattccccaaaaagaagttgggattttggcccttggttttaaaaaaagatcccccggcattataaaaaaggggaaaaaggtccccaacaagggggcctcctaattccacttttacccccgtgacaatagatgaaagaggtcgtgaatatccattttttgggccctaaaaagtgtaaaaaaccaagtgggaccccttggaaggaattggggcccaaaatggcaa

SEQ ID NO: 898 - DNA, 1386 bp, Glycine max
  misc_feature (1)..(2): n is a, c, g, or t
  misc_feature (28)..(28): n is a, c, g, or t
  misc_feature (90)..(90): n is a, c, g, or t
  misc_feature (273)..(273): n is a, c, g, or t
  misc_feature (497)..(497): n is a, c, g, or t
  misc_feature (818)..(818): n is a, c, g, or t
  misc_feature (823)..(823): n is a, c, g, or t
  misc_feature (839)..(839): n is a, c, g, or t
  misc_feature (859)..(860): n is a, c, g, or t
  misc_feature (925)..(925): n is a, c, g, or t
  misc_feature (967)..(967): n is a, c, g, or t
  misc_feature (1309)..(1309): n is a, c, g, or t
  Peptide Sequence Number=SeqID_9127
  Probeset Number=SeqID_10677
nntttattggcaatgtgggtggcgtgtngatttgtttagatcctgcgagcattttaggatcactgtggtttgttgatgttagttataaancaatcgctctccgcccgcctcattcatctcaataatggcgtgagtggttctacactccactaaatactcgctgtgtacgcgcagcgactagtaggagaaagatgtgatcagtggatgactcgtcctctgctgtgtgtatggtgtcagttgtaggagtgtcttcggcgtgtcgggattgatggngtgtgtggtgagggcgaagactggtgattggcgtgatatggcgctcatgcagattactctaatcgacgccagcaagatactgtccacgtcctctcgctgacgcttccggtctatgtgtggacaggtcgtcacggtatggggcgacgcgtagttgtgagtgttggggttattggtagagggtgtgcataatgatgcgcgcattatgtactgtgttgtggtagttnctatctcagcccatacgaattgatatatggtctgcctaccacgtctataatgattgcgctaatatgttgatattctgtagggtgtggtccctcttgtgtctattgctatctcgcatcactacactccaccatctatctagtgtctagtcttgtgtcgagcgcagcactcgccggtccgcgccacacatgtgcgaaagatgacgtagtgtcataactctacgactcgactcgacgagatatatatggagcgtgctcagttcgaatacatatagcgtatagtgtatcatgcgagcgtcgagatgatggtagtatctctgtgangattncgtgatgagcatgtangtacgagttgttagcaactnnctatgtcactcacgtatggatatggtgttgattatgcggaagtgtatgtggtcgacgcctctgcnagctctgtagtgtctgctccgacactctcctatgattatgangtgtggcctctcgcgcgtgcgcacgcgtcagctatgttgtaattgtcgtgtgatcgtgggtgccgtcagcgctgtcgcgtgtcaccagcagtgagcacgatatattacgtcacgtattgacaactcatataagaggaagagatcgagatgatgtggtcgggttcagtgtcggctaattcgtgagtcattgtgctgaccgatatggcatatagtatgaatgagacagacaggagatggcgtgctgacacgcgaagacacgagcaatatcagaacaccaccacaatatataacatcttaagcatacacatacaaaaacatgagcacacaatcatcaatatgatngtgttcacacaccacactgtgcgcgcagtggtagatttggcgttgattttggatgcgcggatgcgtgtgtcgcgtcg

SEQ ID NO: 899 - DNA, 515 bp, Glycine max
  Probeset Number=SeqID_10678
tcgagtagctacgtaggccccccccccaacaagccttcgactccaagcgtttctctacaatcctcatgaaacgtccattacttacgattactacgacatccaaaggctcatctacaaacaaaagcatcaagatcaacaaaattccgtcttcattgactacaaaccccgctctctccctcaattccaagaactcaagcaaaagatctcctcttctggtgccaagatcggctctattctccttgagtttgtccgaaaagaagtcaccaagcctggtgattctaagaaatctaagctttctcatgtgaactccttcgatcctcaagatattgacctgttgttttaccttacaggccaagaagccagtgtagtccaaggctttagtgatattggtgatgattctaatgagtttgacttcatcacattgaccggaaaattatcatcaggagctccttatactattaagctcagaaaccaaaattctgagggctctatgactagcgctagagtcagcttaa

SEQ ID NO: 900 - DNA, 1418 bp, Glycine max
  misc_feature (73)..(74): n is a, c, g, or t
  misc_feature (84)..(84): n is a, c, g, or t
  misc_feature (103)..(103): n is a, c, g, or t
  misc_feature (141)..(141): n is a, c, g, or t
  misc_feature (171)..(171): n is a, c, g, or t
  misc_feature (256)..(256): n is a, c, g, or t
  misc_feature (710)..(710): n is a, c, g, or t
  misc_feature (733)..(733): n is a, c, g, or t
  misc_feature (790)..(790): n is a, c, g, or t
  misc_feature (1020)..(1020): n is a, c, g, or t
  misc_feature (1119)..(1119): n is a, c, g, or t
  misc_feature (1185)..(1185): n is a, c, g, or t
  misc_feature (1200)..(1200): n is a, c, g, or t
  misc_feature (1265)..(1265): n is a, c, g, or t
  misc_feature (1322)..(1322): n is a, c, g, or t
  Peptide Sequence Number=SeqID_9128
  Probeset Number=SeqID_10679
cacacaccgtcagcacgatactagccaccagcatacgtaacaggcacgcagcggagggagagggagagagtannttatcgcctnccgcgagattctttattanattatatatgataaatgtaaattagtaagtcaatctanctgcgagtgattgaatcgacaattctgctncatctccttatcctctgcccacgcttcttcatcacacccgcagcgccacgcggtgcatacgccgaatccacatgtactcttcacntctcatcattctttcacgacagtgtagatgagatgaaatgatcaatgtgtatactaagtataagttatccgatagaccactaagccatagagatagaccgcatgtagcacagccccatcacatattctctatctctctctattattactcatcactctgattaagtctatctcttttttatcgcacgcaacgccggcggtggacgcgctgctagcgcgtcgcgcgcggctgttcttgtttagccagcctacacctgatatctagtacagtgttgatgtattaagaaagacacatcgcaattgacattcatgcgggtgtgcgcatatcgattgcgcgacgtacgcagtagttgagtgcgccacactgtgagcctagcgttacattattgcatagtgcggattcacacacaggcagggatagtaactcggatgacgtctgcaggcagccgaacccnacacggtgcaacaaaagatacangatgccggcacagagagatcaagtactaagtctaaggataacttgtgctagtatatntcttatcactctcagctcagtgtcagagcatcatgcgtctgcatcacgacacgactagtcatgctcacagcagtcaggatcgcactatcatattaacgtctgtgatactacacatagtactgaatttaccgacaatatacgtagacagacagatctttgtcacacagataggtgccgtgaagagatgaggacacaacaggattgatagacctcactagacgcaacatagnccactcgcactgatctcgcttcgttctcggcgaacggtccgatgtctaatcatacgatagctagtagttaatctaacgcagatgaaccatacgctacantaaatagaccacagacgatgatatatagatcgtaacacaggcctagtgcgttcatctctctgccgngcacaactcgcgacnaccgctgatattaggtattacatgaccgatattgcacgagcagatcgcggtcgacatgtagtgcnactcgtatgtgtgtatatagcagcctgtcagtacacagactccaactctctactaantagacacgctctacgacatactagcaatatgacactacgcagctctatgtaacccgactctagacgagcgtctagtctgcatctcagtcgctaccc

SEQ ID NO: 901 - DNA, 386 bp, Glycine max
  Peptide Sequence Number=SeqID_9129
  Probeset Number=SeqID_10680
ggcttgatcttccaccttttgtttcggacatctctgccgccaaggccgaccgggagcagttgaaagtgcctgcgttcacaaaagccgagatagagcccgtgagcatgacggccaagtgagatcccaggcatggcaagtacatggctcgctgcatgaagtaccgaggtgatgtcgcccctaaggacgtgaatgctgcagtggcccccaccaatactaagaggactgttcagattgttgattggtgtccaacaggattcaagtgtggtataaactaccagcctccacttgatgtacctggaggggaccttgccaaggagcagcagtctgaatacatgaacagcaacaacactgcagacgctgaggtgatctctcgcattgaccacaaa

SEQ ID NO: 902 - DNA, 335 bp, Glycine max
  Peptide Sequence Number=SeqID_9130
  Probeset Number=SeqID_10681
ttttttttttttttttcttttttttatcacagcattcataatttatcataacaacataatctttcacagcaaacggttcatcacagacactacatcattttgcaccaaagataatgcagacaaatgtatccatcttttggtgtcatggtcatctagtattgagaacctgggagaaatttattcatccagcttgtttattgttgcttcttttggtgcatgcgaaccaccggggagaaagccagtatgctggaggagtaacaccggtgtcgaggcgtcggggcgtcgggcggagttgggcggcggggaggaggctggcggcgtgcgctgggacgagc

SEQ ID NO: 903 - DNA, 1807 bp, Glycine max
  misc_feature (1)..(1): n is a, c, g, or t
  misc_feature (142)..(142): n is a, c, g, or t
  misc_feature (226)..(226): n is a, c, g, or t
  misc_feature (475)..(475): n is a, c, g, or t
  misc_feature (506)..(506): n is a, c, g, or t
  misc_feature (646)..(646): n is a, c, g, or t
  misc_feature (703)..(703): n is a, c, g, or t
  misc_feature (731)..(731): n is a, c, g, or t
  misc_feature (737)..(737): n is a, c, g, or t
  misc_feature (747)..(747): n is a, c, g, or t
  misc_feature (750)..(750): n is a, c, g, or t
  misc_feature (794)..(794): n is a, c, g, or t
  misc_feature (870)..(870): n is a, c, g, or t
  misc_feature (909)..(909): n is a, c, g, or t
  misc_feature (931)..(931): n is a, c, g, or t
  misc_feature (938)..(939): n is a, c, g, or t
  misc_feature (986)..(986): n is a, c, g, or t
  misc_feature (989)..(989): n is a, c, g, or t
  misc_feature (1014)..(1014): n is a, c, g, or t
  misc_feature (1062)..(1062): n is a, c, g, or t
  misc_feature (1084)..(1084): n is a, c, g, or t
  misc_feature (1088)..(1088): n is a, c, g, or t
  misc_feature (1105)..(1105): n is a, c, g, or t
  misc_feature (1115)..(1116): n is a, c, g, or t
  misc_feature (1129)..(1129): n is a, c, g, or t
  misc_feature (1143)..(1144): n is a, c, g, or t
  misc_feature (1146)..(1146): n is a, c, g, or t
  misc_feature (1166)..(1166): n is a, c, g, or t
  misc_feature (1190)..(1190): n is a, c, g, or t
  misc_feature (1198)..(1198): n is a, c, g, or t
  misc_feature (1200)..(1200): n is a, c, g, or t
  misc_feature (1210)..(1211): n is a, c, g, or t
  misc_feature (1224)..(1224): n is a, c, g, or t
  misc_feature (1331)..(1331): n is a, c, g, or t
  misc_feature (1333)..(1333): n is a, c, g, or t
  misc_feature (1348)..(1348): n is a, c, g, or t
  misc_feature (1362)..(1362): n is a, c, g, or t
  misc_feature (1368)..(1368): n is a, c, g, or t
  misc_feature (1385)..(1385): n is a, c, g, or t
  misc_feature (1410)..(1410): n is a, c, g, or t
  misc_feature (1469)..(1469): n is a, c, g, or t
  misc_feature (1476)..(1476): n is a, c, g, or t
  misc_feature (1488)..(1488): n is a, c, g, or t
  misc_feature (1492)..(1492): n is a, c, g, or t
  misc_feature (1495)..(1495): n is a, c, g, or t
  misc_feature (1509)..(1509): n is a, c, g, or t
  misc_feature (1514)..(1514): n is a, c, g, or t
  misc_feature (1524)..(1524): n is a, c, g, or t
  misc_feature (1538)..(1538): n is a, c, g, or t
  misc_feature (1565)..(1565): n is a, c, g, or t
  misc_feature (1570)..(1570): n is a, c, g, or t
  misc_feature (1579)..(1579): n is a, c, g, or t
  misc_feature (1582)..(1582): n is a, c, g, or t
  misc_feature (1601)..(1601): n is a, c, g, or t
  misc_feature (1624)..(1624): n is a, c, g, or t
  misc_feature (1630)..(1630): n is a, c, g, or t
  misc_feature (1666)..(1666): n is a, c, g, or t
  misc_feature (1668)..(1668): n is a, c, g, or t
  misc_feature (1680)..(1680): n is a, c, g, or t
  misc_feature (1688)..(1688): n is a, c, g, or t
  misc_feature (1707)..(1707): n is a, c, g, or t
  misc_feature (1719)..(1719): n is a, c, g, or t
  misc_feature (1727)..(1727): n is a, c, g, or t
  misc_feature (1730)..(1730): n is a, c, g, or t
  misc_feature (1732)..(1732): n is a, c, g, or t
  misc_feature (1734)..(1735): n is a, c, g, or t
  misc_feature (1738)..(1738): n is a, c, g, or t
  misc_feature (1741)..(1744): n is a, c, g, or t
  misc_feature (1746)..(1746): n is a, c, g, or t
  misc_feature (1748)..(1752): n is a, c, g, or t
  misc_feature (1755)..(1755): n is a, c, g, or t
  misc_feature (1757)..(1757): n is a, c, g, or t
  misc_feature (1761)..(1765): n is a, c, g, or t
  misc_feature (1767)..(1785): n is a, c, g, or t
  Probeset Number=SeqID_10682
ngtggattgttgtatgagtgattcgtctcgctcgtgtactgctctagtgtcattgtgtatcgtgtggtgctgtgtgtgctggtctagggatgtgattacagatcgtgagatgcgtgtgtctctatctccacgactccgcacncgaagagcgatcgctacagagcgtgcacgcattatgatcgaagctagtcgtgtgtgtttaggatcacaagatgcagaaggcatncaggcacgaggcgacgcgtgacgagcaacaacacagacacagtcacacatataaaacagcatcactgactagtctgttgtgacgatggtataggcgtcctgcggaggagactcacgtcgcgcgacatacgtaccagcgagagtactctggagcacgaatcgcagaccagtctagctaggtgtgtgtgtgaggtggtgtgaactacataatgtcactctatatcagatagttctctacagacattggatncttgtgagctgtgaacgtgcacgcgatcctncgctcgtgcgctgtttcgttctactactctcttcatagtagtatgtacgtgctagtgcctcttaccatccgcacggatatcaatgatcatatcagctatacgcatcgaaagatcgtggctagaggtcggttgttgcacgngtggtgtacgtatgatgttatacacaataacacagtagcggcacgacaacgcatacncgtacagcggtccgtgtgtgtttgtgtntttgtncttatcattntcnttgttctactactatcacatgctactacgtatatcgccgtgttntgttttgtgtactcgcagtgacagtgagcgagtatctcttcacgatagtacgagtgctcctaactatcacatatcnatgatcaatagtcttagattagttatagataacgcgcanatctgctctctcgtggtgtttnatttatnnttacatgtatcgtacagagtgcagtatcagttgtgcggtgagttagnagnagtcggacgcgacggtaggagcganccgagagcgctgacgtctagctctctcgacgttccacttacacgttancatcatagttatatgaagtaantgtnatctactatacctatantacgtttttnnctcataatctctnttattataattaannanaaaatacgtaacacacaacncaaccaccaggcgcaagacacccncgcctgcncncgcaccgcgnntcacacaggacgntacctatatatacttatactacagaactactatgcagctgatcgcgacttgatctatcataacacttcgatgtacagactgcgctgacgtgcctcagacgactcccntncgcttcgcgctcccntattgagtcaagtntactgngcatcttaacgcatgcntcgtcgcgtccgacagagatacagntagcgatatcattgcgtcgttcatccgcgacgtgcagtcgggcgtggcagctgcgccgncgagcangacgcaatgcancctngcntcgcgagcggttcntgtgngtgcgacganctcgcgtgtgtatnctctgctcactcgtggccatacacacnactcntcacactcnctnctacactcatcctcaacantccctcatcacgccagactctcncgcgangtctcgtctcgctctctctcttctccctctccgtcntntagagaatgttnatattaantagatatagatattgtggnagtgagcgcacntggcagtntgntngnngtnctnnnntncnnnnnttntntatnnnnngnnnnnnnnnnnnnnnnnnncacaatccaccctatccctaca

SEQ ID NO: 904 - DNA, 1495 bp, Glycine max
  misc_feature (1)..(1): n is a, c, g, or t
  misc_feature (3)..(3): n is a, c, g, or t
  misc_feature (7)..(7): n is a, c, g, or t
  misc_feature (51)..(51): n is a, c, g, or t
  misc_feature (54)..(54): n is a, c, g, or t
  misc_feature (86)..(86): n is a, c, g, or t
  misc_feature (100)..(100): n is a, c, g, or t
  misc_feature (108)..(108): n is a, c, g, or t
  misc_feature (142)..(142): n is a, c, g, or t
  misc_feature (159)..(159): n is a, c, g, or t
  misc_feature (207)..(207): n is a, c, g, or t
  misc_feature (231)..(231): n is a, c, g, or t
  misc_feature (245)..(245): n is a, c, g, or t
  misc_feature (250)..(250): n is a, c, g, or t
  misc_feature (254)..(254): n is a, c, g, or t
  misc_feature (271)..(271): n is a, c, g, or t
  misc_feature (284)..(284): n is a, c, g, or t
  misc_feature (286)..(286): n is a, c, g, or t
  misc_feature (345)..(345): n is a, c, g, or t
  misc_feature (354)..(354): n is a, c, g, or t
  misc_feature (363)..(363): n is a, c, g, or t
  misc_feature (378)..(378): n is a, c, g, or t
  misc_feature (416)..(416): n is a, c, g, or t
  misc_feature (520)..(520): n is a, c, g, or t
  misc_feature (525)..(525): n is a, c, g, or t
  misc_feature (543)..(543): n is a, c, g, or t
  misc_feature (545)..(545): n is a, c, g, or t
  misc_feature (548)..(550): n is a, c, g, or t
  misc_feature (616)..(616): n is a, c, g, or t
  misc_feature (703)..(703): n is a, c, g, or t
  misc_feature (964)..(964): n is a, c, g, or t
  misc_feature (992)..(992): n is a, c, g, or t
  misc_feature (1014)..(1014): n is a, c, g, or t
  misc_feature (1075)..(1075): n is a, c, g, or t
  misc_feature (1136)..(1136): n is a, c, g, or t
  misc_feature (1197)..(1197): n is a, c, g, or t
  misc_feature (1222)..(1222): n is a, c, g, or t
  misc_feature (1256)..(1256): n is a, c, g, or t
  misc_feature (1363)..(1363): n is a, c, g, or t
  misc_feature (1371)..(1371): n is a, c, g, or t
  misc_feature (1461)..(1461): n is a, c, g, or t
  misc_feature (1463)..(1463): n is a, c, g, or t
  misc_feature (1474)..(1474): n is a, c, g, or t
  Peptide Sequence Number=SeqID_9131
  Probeset Number=SeqID_10683
ncngcgncatagtacattcgacatgatcagtagagattggcgcaaggtagntanccgacacgtgatgcgcagtagtgtgcagcgancgtcacatggtcgntgtcagangcagtgatcgcatagcgcactcatcactcgacangatcatgccgtcagctntgcagtgcggccgacacacgagacgtagctgcgttagactgtcgcgcngacacggtgcgcgcatatagcgtnagtcagtacagtantactngctnctacgagctacacgacngcatacatcgatngnatgtgtttgcatcatgacgactatagcagcacagaatgtcgtgcgtgatgtcgagcgangtatatatnatcatcacngtggatcgtagcatngtctgtggtcatgagtagtacgtagggtggtgaagatnagtggtcgaggagtccaattggagcatactcagatcgtgtcgccgcaagagcgcacactcgctgtggttaccagcgcacatatcagatgcagaggtgtaggtgnggtantatgtgcatattgtgtgngngtnnnagaacgcttcctttcatcatagatgtcgtagactagatgatgatgtgagcgactatatgtcagaancatgtacgatcgataattactcacactgtatcgacacttgagcgatgtatggtgatgagcagggagtcgtgtaggtagctgatgacnaaccacgacgagcagatagtagtcatcgtgacgtgtatatctgaatatatgaacacacacatcatcatatcagatgagttacacgcgtcgtcagcagtacgcagatgtgtctcagacgtgctcacgctagtcgtagattccattcgaatatctaatatgtatcctaatcggctaccagaacttctcaccacatgccacagcacacgatcattgcgatatgataagattgatacatgaagtaagtgtgtgcgagagtattangtctacttgtgtggtgtatatgtctgtntagatcgtcatcgtgtattatnttaacatctactagtatagcattcgtgtagaaggtgatacagagcgcgagtgaggtgtgantatcgatatgatactagtgtcgaagtatctgagataagggtgtctgccggtgacgcgcgantgtgagatagaagagcatagtagggtgtggcgacggcgaacaatcatcaactacgtgtgcnccacaatatataatatgatcaattnataatgtgcattactaatagtgaccgagagtcgngacgtacacacatccgtcacagagacacaacacatacactgcatcgcatatagagagtcgattgctaaagagaagatagagagagaggagagtggtagaggtgaggnagtgatgnttactgcagtggtgtgggttgtgtgggtgctgtagtgtgtggaggtgaatatatagtgtagaggaggtgaggggggtaggcggcgagagngngggggagggangggacaaagaaaaaaaaaatt

SEQ ID NO: 905 - DNA, 426 bp, Glycine max
  Probeset Number=SeqID_10684
taatctttaaaaaaacttatctattattcaataacaaacatttcaaacacaatgagcgatttcgaaaaaactcaacaagctactcccgaagacatcaaatatagtgctgaaaaagccgctcaaggtgaactcaaccaaggcttcagaggcagccaattccatcaagaaggccaacaaggctcaactagacaaggaggtcaaactcaaggaggtcgtcttccagtgaaactcagtgataataacgattatgttggtcaagctcctgaaactggtcattcaaccatgtcttaagggaacaatgtaaataaaaaagtattacagtgttgtgaaaatacatgcaaagtactttaagagtatctatatacgtatatatagtctttaaataaataatactatggtgttgtttattatgaaattttactaatc

SEQ ID NO: 906 - DNA, 1441 bp, Glycine max
  misc_feature (70)..(70): n is a, c, g, or t
  misc_feature (215)..(215): n is a, c, g, or t
  misc_feature (238)..(238): n is a, c, g, or t
  misc_feature (701)..(701): n is a, c, g, or t
  misc_feature (708)..(708): n is a, c, g, or t
  misc_feature (800)..(800): n is a, c, g, or t
  misc_feature (1261)..(1261): n is a, c, g, or t
  misc_feature (1384)..(1385): n is a, c, g, or t
  misc_feature (1411)..(1412): n is a, c, g, or t
  misc_feature (1415)..(1416): n is a, c, g, or t
  misc_feature (1420)..(1420): n is a, c, g, or t
  Peptide Sequence Number=SeqID_9132
  Probeset Number=SeqID_10685
aagtgcgagtgaatagataatatatagggtgaatgcgagaacaaggactccacccagatcatagtcgctntgcgattcctggcgtgatcgcgcggaaacgcgtgcgcagatactcctgagtgatatgacgaccacgcgcgcggtgtagtgtggctgatggcgtgaataggacagtaatatgagcgtagatgagataatgatgatatgtttaggtngaggtgtttcgagtgggctcgtngtgagatttatatactagacacagagtatgtgcagtgtcatcgacgcaacatacctcgacggtatagacgacagacctatctgacccccctcgaattcagtcgagcggccgcctacgtagtaaacgagggacagacgtacgagaccgaggctgcacaagcgcacgcgagcgcaacgcgagaggctcgcgcaagcgatcagtatacagagtactacagacgaagcgtggtgagacgtgttcagtgagtgtagtgtaggggtggtagggctgtagcgtctggtttgatacacttagcagaacgatctcgtgtgggtgggcggttcgcacgctccacacctctcccaagtttgcgatcagcgtttgtagagggacgcagaaattcaaccactatcgacacacgggcgagccggagggtgtcagggctcggcctatccgacaaagattggcagtttagttgtgtttnccgtgtnatctgactgcttctctcatcttcttttttctttaatccgtacttttcctacgcactacatacaaacacatactaagacactagatcacattnttatttcgctgttcgtttctccgcagtttgtttttctatcttttcattggtagtcgaggtagaagaggcatacacgcgcgacgaggtcgttccgctcgaggaagccgaggcgcgagctgacgagataagactttcatgtgtcgcccgcgcggctgtatcatatttattattctgagaccaccccccatctcctgggtctaatctcctggccttagtctccctctttctcaacctcccattatttgagggtcggcccggtgtggtttcgagggcacggagatagatatactattcacctaaatatatgtattatcttactatcatgtagacgtcgaaggcgtgaaccccgcagtattgcgactccgcgatgcgagaagagcgtggatgagagggtgagaaatattagaaacgtcaatatcccatataaaataataataatgagggggaaaagagatggtagngctggcgtgttgctggacgtggggtggggttctacagttgtgatagagtgtgtggttacccacaactctccctctggactgcttcccttacgagtggttgtcatgtgtgggtgttgcgcgcgnncggtgaaggcgtagactgattatggnnaannaagnaaataccaccacacacccacc

SEQ ID NO: 907 - DNA, 2791 bp, Glycine max
  misc_feature (1)..(1): n is a, c, g, or t
  misc_feature (52)..(52): n is a, c, g, or t
  misc_feature (96)..(96): n is a, c, g, or t
  misc_feature (105)..(105): n is a, c, g, or t
  misc_feature (157)..(157): n is a, c, g, or t
  misc_feature (175)..(175): n is a, c, g, or t
  misc_feature (188)..(188): n is a, c, g, or t
  misc_feature (210)..(210): n is a, c, g, or t
  misc_feature (217)..(218): n is a, c, g, or t
  misc_feature (259)..(259): n is a, c, g, or t
  misc_feature (265)..(265): n is a, c, g, or t
  misc_feature (268)..(268): n is a, c, g, or t
  misc_feature (295)..(295): n is a, c, g, or t
  misc_feature (302)..(302): n is a, c, g, or t
  misc_feature (304)..(304): n is a, c, g, or t
  misc_feature (320)..(320): n is a, c, g, or t
  misc_feature (323)..(323): n is a, c, g, or t
  misc_feature (352)..(352): n is a, c, g, or t
  misc_feature (366)..(366): n is a, c, g, or t
  misc_feature (384)..(384): n is a, c, g, or t
  misc_feature (411)..(412): n is a, c, g, or t
  misc_feature (415)..(415): n is a, c, g, or t
  misc_feature (427)..(427): n is a, c, g, or t
  misc_feature (431)..(431): n is a, c, g, or t
  misc_feature (450)..(450): n is a, c, g, or t
  misc_feature (457)..(457): n is a, c, g, or t
  misc_feature (460)..(460): n is a, c, g, or t
  misc_feature (496)..(496): n is a, c, g, or t
  misc_feature (499)..(499): n is a, c, g, or t
  misc_feature (525)..(525): n is a, c, g, or t
  misc_feature (529)..(529): n is a, c, g, or t
  misc_feature (542)..(542): n is a, c, g, or t
  misc_feature (545)..(545): n is a, c, g, or t
  misc_feature (579)..(579): n is a, c, g, or t
  misc_feature (583)..(583): n is a, c, g, or t
  misc_feature (586)..(586): n is a, c, g, or t
  misc_feature (588)..(588): n is a, c, g, or t
  misc_feature (599)..(599): n is a, c, g, or t
  misc_feature (602)..(602): n is a, c, g, or t
  misc_feature (606)..(606): n is a, c, g, or t
  misc_feature (628)..(628): n is a, c, g, or t
  misc_feature (636)..(636): n is a, c, g, or t
  misc_feature (639)..(639): n is a, c, g, or t
  misc_feature (642)..(642): n is a, c, g, or t
  misc_feature (690)..(690): n is a, c, g, or t
  misc_feature (699)..(699): n is a, c, g, or t
  misc_feature (701)..(702): n is a, c, g, or t
  misc_feature (704)..(704): n is a, c, g, or t
  misc_feature (713)..(713): n is a, c, g, or t
  misc_feature (728)..(728): n is a, c, g, or t
  misc_feature (735)..(735): n is a, c, g, or t
  misc_feature (748)..(748): n is a, c, g, or t
  misc_feature (759)..(759): n is a, c, g, or t
  misc_feature (762)..(762): n is a, c, g, or t
  misc_feature (797)..(797): n is a, c, g, or t
  misc_feature (801)..(801): n is a, c, g, or t
  misc_feature (850)..(850): n is a, c, g, or t
  misc_feature (853)..(853): n is a, c, g, or t
  misc_feature (857)..(857): n is a, c, g, or t
  misc_feature (865)..(865): n is a, c, g, or t
  misc_feature (887)..(887): n is a, c, g, or t
  misc_feature (896)..(896): n is a, c, g, or t
  misc_feature (900)..(900): n is a, c, g, or t
  misc_feature (927)..(928): n is a, c, g, or t
  misc_feature (930)..(930): n is a, c, g, or t
  misc_feature (934)..(934): n is a, c, g, or t
  misc_feature (948)..(948): n is a, c, g, or t
  misc_feature (956)..(956): n is a, c, g, or t
  misc_feature (962)..(963): n is a, c, g, or t
  misc_feature (980)..(980): n is a, c, g, or t
  misc_feature (986)..(986): n is a, c, g, or t
  misc_feature (989)..(989): n is a, c, g, or t
  misc_feature (1000)..(1000): n is a, c, g, or t
  misc_feature (1034)..(1034): n is a, c, g, or t
  misc_feature (1040)..(1040): n is a, c, g, or t
  misc_feature (1045)..(1045): n is a, c, g, or t
  misc_feature (1066)..(1066): n is a, c, g, or t
  misc_feature (1073)..(1073): n is a, c, g, or t
  misc_feature (1079)..(1079): n is a, c, g, or t
  misc_feature (1087)..(1087): n is a, c, g, or t
  misc_feature (1109)..(1109): n is a, c, g, or t
  misc_feature (1118)..(1118): n is a, c, g, or t
  misc_feature (1127)..(1127): n is a, c, g, or t
  misc_feature (1132)..(1132): n is a, c, g, or t
  misc_feature (1139)..(1139): n is a, c, g, or t
  misc_feature (1163)..(1163): n is a, c, g, or t
  misc_feature (1166)..(1166): n is a, c, g, or t
  misc_feature (1175)..(1175): n is a, c, g, or t
  misc_feature (1189)..(1189): n is a, c, g, or t
  misc_feature (1192)..(1192): n is a, c, g, or t
  misc_feature (1218)..(1218): n is a, c, g, or t
  misc_feature (1225)..(1225): n is a, c, g, or t
  misc_feature (1237)..(1237): n is a, c, g, or t
  misc_feature (1293)..(1293): n is a, c, g, or t
  misc_feature (1341)..(1341): n is a, c, g, or t
  misc_feature (1345)..(1345): n is a, c, g, or t
  misc_feature (1375)..(1375): n is a, c, g, or t
  misc_feature (1396)..(1396): n is a, c, g, or t
  misc_feature (1479)..(1479): n is a, c, g, or t
  misc_feature (1515)..(1515): n is a, c, g, or t
  misc_feature (1550)..(1550): n is a, c, g, or t
  misc_feature (1558)..(1558): n is a, c, g, or t
  misc_feature (1576)..(1576): n is a, c, g, or t
  misc_feature (1590)..(1590): n is a, c, g, or t
  misc_feature (1598)..(1598): n is a, c, g, or t
  misc_feature (1600)..(1600): n is a, c, g, or t
  misc_feature (1641)..(1641): n is a, c, g, or t
  misc_feature (1665)..(1665): n is a, c, g, or t
  misc_feature (1679)..(1679): n is a, c, g, or t
  misc_feature (1691)..(1691): n is a, c, g, or t
  misc_feature (1710)..(1710): n is a, c, g, or t
  misc_feature (1713)..(1713): n is a, c, g, or t
  misc_feature (1723)..(1723): n is a, c, g, or t
  misc_feature (1755)..(1755): n is a, c, g, or t
  misc_feature (1779)..(1779): n is a, c, g, or t
  misc_feature (1787)..(1787): n is a, c, g, or t
  misc_feature (1804)..(1804): n is a, c, g, or t
  misc_feature (1939)..(1939): n is a, c, g, or t
  misc_feature (1955)..(1955): n is a, c, g, or t
  misc_feature (2009)..(2009): n is a, c, g, or t
  misc_feature (2020)..(2020): n is a, c, g, or t
  misc_feature (2022)..(2022): n is a, c, g, or t
  misc_feature (2052)..(2052): n is a, c, g, or t
  misc_feature (2128)..(2128): n is a, c, g, or t
  misc_feature (2131)..(2131): n is a, c, g, or t
  misc_feature (2133)..(2133): n is a, c, g, or t
  misc_feature (2153)..(2153): n is a, c, g, or t
  misc_feature (2186)..(2186): n is a, c, g, or t
  misc_feature (2196)..(2196): n is a, c, g, or t
  misc_feature (2218)..(2218): n is a, c, g, or t
  misc_feature (2226)..(2226): n is a, c, g, or t
  misc_feature (2301)..(2301): n is a, c, g, or t
  misc_feature (2308)..(2308): n is a, c, g, or t
  misc_feature (2310)..(2310): n is a, c, g, or t
  misc_feature (2350)..(2350): n is a, c, g, or t
  misc_feature (2391)..(2391): n is a, c, g, or t
  misc_feature (2425)..(2425): n is a, c, g, or t
  misc_feature (2441)..(2441): n is a, c, g, or t
  misc_feature (2472)..(2472): n is a, c, g, or t
  misc_feature (2554)..(2554): n is a, c, g, or t
  misc_feature (2556)..(2556): n is a, c, g, or t
  misc_feature (2603)..(2603): n is a, c, g, or t
  misc_feature (2611)..(2611): n is a, c, g, or t
  misc_feature (2637)..(2637): n is a, c, g, or t
  misc_feature (2685)..(2685): n is a, c, g, or t
  misc_feature (2714)..(2714): n is a, c, g, or t
  Probeset Number=SeqID_10686
ntgtatgacgcatgcgtccgggtacacgactcggattcgattccgggaagancaaatacacaggtacgctgatgtcctctatggcgcacgcatcgntcgtctatntcacgtcagtcgcaggtcgcctatcgtgtctgactatacgtcatcagtacgncgccatccttactcgtancctacgtcgatgntacatcagacgtcgacgcagcntaggtanntgcacgtgcgcagtcagctgtagccgtcagctacagggganaaagantantatagtcatcgaaatatcaatcaggtnactacancnggcgacctcgcgtcgncgnctgccagctgtcgtccgtcatgccgtatngtacgattgctcgnacgtgtctagcacactgnatactgcgtgtcatgactcgtacctanncangagcgtcgtaantagnagtagacgatcagtgtcgnatatagnagntggacgctggtggcagtacgtacatcagacagcatngtncaaaccatcgcgtagcagtcgaccgnagtnatagagcctgtanganccatgaaacagcacgcgactgctgaccgtcgacncagntgncnattcatcatanctncaangaagtaatatgtagctgcgcangccatcgnagngtngcgatcgctcatctacatcatacgtagcatcagatcgcagcgtcacgnaaatgcacngnntntcgacgcgnacgatctcccaggtntgtcgtnctatctcagcagntcgtatgctcnagngatgcgctactacaccatgctcacatacgagtatngctnagcatacgatgcgcgtgtcatcgcgagacgcgtcagcagcgcgcagtgntantagngtcgtccncacatcctgacgtctgattcgncgttacacnactnatccttaccatagatgacgatcgatannanctantcactagtacacangatgagtnacgcgnngacggtatgatcgagtngtatantgntgcgctgctcnactatcagcactcgacagtaataacagcaatgangaaagntagangaacacgtcgctcatcgtcantgccgcncctgcnactagtcngccgacgcagagtcgaccgtangtacgcgancagtaccgngagtnactatcntgcatgtgctgactaagtcatagncancgacgcgcncacctacgcgacantantacaataactgcgcgtcgtccatcgngctactnagctgcgggagncgagagttcgcgcacgacggagatacaacgaggtatagctatatactagccgcagnaacggtcgtaccagggtcgacgaagtattgaataagtagatctagtanctcntcgcgcatagttctcatgtctagtactgtntgctgcacgtgcctcgctctnactccgacactgtcactctcgcgtcgtcagtagtcagatttcatcactatctctgacagcgagcgcacgcgtgcggtcgtgcnagatgcagatacgtcaccatctgatcgtatcgacgntgcggctacagtacgcacgcatgtacgcctgtgcncatgtcangatttgtgtcaacgacantacgcaatgagtangtcgcgcncnagtacaatcgcaatcagcatgacctacaggcacctgagatntagcagagagagacgtatacttancagcgtagcgcgtngatgtcatccgnacgcgcatgcgcgatatangcncgctaacagnatcgatctagcgatatgactgcaacgtagtangcctgtgcgacgaggcacgcgcgncgatgtanttcagttgcactcgcgnacattcatgcgtcgatcatcgcgcgcttgacgttgacgcgacggtatcgagcgatagtgctctcatgatgatgtgtctagtcgctcgtcgaatgctagtagatagatgtggctgctagtgaacgatcgtgatcgngtgcgagcacatgatnatctcgtcaccctacgcatccactcattactcatgtcatatcgagtctatacancgtcactttgncntgcgtcgattcgcgtgcacacgtgctagantaattcgatccagtgcgacatagcagcagcagcagactgcgcgcggatcgcgctctcagcgatacatacgtcgagntantnaaagcctgagcatcacatanacgacatcaactagtcatacagcgatcgtcatnggatgagacncatcgtatacggacgatcacgnacgctatnatgataatattcctcgctagactgagcgcaaggtgctcaatgtctgcgtgcagagtctagccacagcgtagctgngacgcgnangacacagacaagtaacagcgtacacatgcactgtatgctncgtctacgctatgcgcacacgagcgcgcgtgagagatatcntatctatatattacacttctcactgctcccgacncactctcgaccgagcnatcactcgctacatctatgacgtcgctgcantcgcgctggtatactgctcgcttatcataagcatgcatcgatcgcagcatctgtctagctgtcctctacactgctgcgatgnantgtcagctcactgtcgtcgtctgtccatcaatctatcgctgctgtgnctgcgcgncctcgactcaccgtgcactcagctgntgatacgtatctgccactcgtcgtcctttattcttcatagtattgagnagcaggggagcgagagtcgtagtgtgatngagctctacactgcgtgtgttaagtagagtagtctgttagacgagagtactagcttctcaccacatcatactatcac

SEQ ID NO: 908 - DNA, 1601 bp, Glycine max
  misc_feature (7)..(9): n is a, c, g, or t
  misc_feature (16)..(16): n is a, c, g, or t
  misc_feature (24)..(24): n is a, c, g, or t
  misc_feature (26)..(28): n is a, c, g, or t
  misc_feature (33)..(34): n is a, c, g, or t
  misc_feature (40)..(41): n is a, c, g, or t
  misc_feature (48)..(49): n is a, c, g, or t
  misc_feature (57)..(58): n is a, c, g, or t
  misc_feature (61)..(61): n is a, c, g, or t
  misc_feature (63)..(69): n is a, c, g, or t
  misc_feature (71)..(71): n is a, c, g, or t
  misc_feature (75)..(76): n is a, c, g, or t
  misc_feature (78)..(78): n is a, c, g, or t
  misc_feature (80)..(80): n is a, c, g, or t
  misc_feature (84)..(86): n is a, c, g, or t
  misc_feature (90)..(94): n is a, c, g, or t
  misc_feature (100)..(100): n is a, c, g, or t
  misc_feature (105)..(105): n is a, c, g, or t
  misc_feature (189)..(189): n is a, c, g, or t
  misc_feature (274)..(274): n is a, c, g, or t
  misc_feature (443)..(443): n is a, c, g, or t
  misc_feature (507)..(507): n is a, c, g, or t
  misc_feature (510)..(510): n is a, c, g, or t
  misc_feature (709)..(709): n is a, c, g, or t
  misc_feature (719)..(719): n is a, c, g, or t
  misc_feature (742)..(742): n is a, c, g, or t
  misc_feature (770)..(770): n is a, c, g, or t
  misc_feature (830)..(830): n is a, c, g, or t
  misc_feature (883)..(883): n is a, c, g, or t
  misc_feature (945)..(945): n is a, c, g, or t
  misc_feature (961)..(961): n is a, c, g, or t
  misc_feature (1050)..(1050): n is a, c, g, or t
  misc_feature (1071)..(1071): n is a, c, g, or t
  misc_feature (1156)..(1156): n is a, c, g, or t
  misc_feature (1169)..(1169): n is a, c, g, or t
  misc_feature (1190)..(1190): n is a, c, g, or t
  misc_feature (1249)..(1249): n is a, c, g, or t
  misc_feature (1254)..(1254): n is a, c, g, or t
  misc_feature (1292)..(1292): n is a, c, g, or t
  misc_feature (1297)..(1297): n is a, c, g, or t
  misc_feature (1348)..(1348): n is a, c, g, or t
  misc_feature (1350)..(1353): n is a, c, g, or t
  misc_feature (1365)..(1369): n is a, c, g, or t
  misc_feature (1373)..(1373): n is a, c, g, or t
  misc_feature (1375)..(1375): n is a, c, g, or t
  misc_feature (1378)..(1378): n is a, c, g, or t
  misc_feature (1389)..(1398): n is a, c, g, or t
  misc_feature (1408)..(1410): n is a, c, g, or t
  misc_feature (1428)..(1428): n is a, c, g, or t
  misc_feature (1434)..(1434): n is a, c, g, or t
  misc_feature (1440)..(1440): n is a, c, g, or t
  misc_feature (1442)..(1442): n is a, c, g, or t
  misc_feature (1453)..(1453): n is a, c, g, or t
  misc_feature (1455)..(1457): n is a, c, g, or t
  misc_feature (1468)..(1470): n is a, c, g, or t
  misc_feature (1492)..(1492): n is a, c, g, or t
  misc_feature (1496)..(1498): n is a, c, g, or t
  misc_feature (1500)..(1501): n is a, c, g, or t
  misc_feature (1555)..(1555): n is a, c, g, or t
  misc_feature (1558)..(1559): n is a, c, g, or t
  misc_feature (1569)..(1570): n is a, c, g, or t
  Peptide Sequence Number=SeqID_9133
  Probeset Number=SeqID_10687
aaaaaannnggaaaangggggggngnnnaaaannggcggnngagaaannggggggannaancnnnnnnnanaggnntntncgannngggnnnnnaggcgntgtangctgggataaatacaccaccacacagaaatgggtgcgtgggcagatccttcatatgtaagtgtcacagatcagcagtcgcttcncacacacagagtatattagtgggggttcttacatactaacaaatgttactcacactgcactactctcttacatcagtctgcttcngcgggcgggagggggcagcaacaagacactctaacaatcactggcgcggggtggtaagatcgatgtcgagagtactcgatctgtaacacgtgtaacactggtgatgtcatactacacatatacaatctgtagtcgtaatataaagtagtgtaaacaatatataatatanatgaagcaataaatacgagatcgatagacacacgctggcgtctataacatagtaggtgtcgctncgnttactattctgcatctgtgagtcttgctgtccttctctcctcgcttctcgtctcgccgttagcggtgtacgagagtgtgtgctggtggtgctcttctccaccttcgggcctcttagtcactctccctggtgatatcgtggcatcctcccaactcgcacgccctctctcgccgcgcgcctgcgtgcccgtctccttctcnagcggaaacnacctcgtctagacacatcgcacnatcgaatagcgtcgcgcgcgtgtgggcngcggagagaaacacgaccattagcgcggcgcgcgggtgcgagcagcgcgcgcaacaaatnaatcttgtatgattgtaagacacgaatcgctatgactgtatcacaatcacgcnttccgcgcgcctcctctctgtggtgcatgcttaacacataactaacctcgtcgcttaatgantatatatattgatatncgtatgttattattctatgctgttccaaacatatatatagtgggcgtcgcgcgaatcggcgcttgtgcgcgcaacgaacaacgcacganctcacgaccatatatatacangacttcactcgatcaccactatatagctatgaactagactcgctgtacacacatatatctgtggcgatttgtgatgataattgtncatactctatagncatatctggcgatccgatgtntatactacatatatcacgtgacatcgagatgagctgagtgtcgtttgcaagtcgagagnagtgnatagagatagtgggcgctgtacgcctcgctgatgacantgatnataataattcgtgtgtggctgcgtttctctcggcgtcggcggggcggcagntnnnntgtgcgtctctnnnnntttntntcntctctccttcnnnnnnnnnncaatcccccnnnttaggggccctctctagngttgcncccccncnctatagatctntnnntattatataannnataatcagagcgggtgtcgagngagnnnanncagacatgacgctcgaggcgcggaggagagagtctaagctagctgattgttgtntgnncgtcactccnntctacatatacatcacacgaacagataggcg

SEQ ID NO: 909 - DNA, 1469 bp, Glycine max
  misc_feature (1)..(1): n is a, c, g, or t
  misc_feature (24)..(24): n is a, c, g, or t
  misc_feature (90)..(90): n is a, c, g, or t
  misc_feature (193)..(193): n is a, c, g, or t
  misc_feature (235)..(235): n is a, c, g, or t
  misc_feature (251)..(251): n is a, c, g, or t
  misc_feature (306)..(306): n is a, c, g, or t
  misc_feature (373)..(373): n is a, c, g, or t
  misc_feature (421)..(421): n is a, c, g, or t
  misc_feature (561)..(561): n is a, c, g, or t
  misc_feature (1376)..(1376): n is a, c, g, or t
  Probeset Number=SeqID_10688
ntatttcctccagctactccgcgngatagacgtgaagacgagtacgaccgctctgtgtctattcatgatctaatgctcgtggctgtatancccatcaccgcgcgcacacgccaagggcgacacgaatcagtatatatatcgtccgcgcatcgcacttcatggcgcgccgtgcgtagtgagtctcgcatgcatntcgctcattctgttatgtatcgtgtgcgcggactcgcgcgcnccgtgtatgcatattnaaatatatcacgcggcgcggcagccgcgttgaggcacgcgcgtgtcgtctgctantacgggtcgactcgattatctcacacatactgcgcgcctgcgatcgcgcgcgcgcgtcacgatctancgtgtacacgatccgcacacgactgtcgaattctacgccatagtcgcngtggggtgggtagccgacgcggagaatacttgcgcatcctatgtcagcgtgggcgcgcggtgaatatatagtctctgtgtccagtgctctatccacgcacatatatattgagaatacgggtcggggtcggcgtcgcgggngtgtttcacgcgccgtacggtacgcatatcagtatcgcggtagatatcgatgttgtcgcgcgcggtccgcggtcggtgtgtttacgttgcccgctacccgtacaatattacacgcctctactcgttatatatgtagcagagcgcgatcgccgctaacgcgccatatccgtacgctatcgcgcacaccgatgctacttcgggacgcgagattagcgtgcgagagacgtgtctgcacggtttacgttttagatgggcgttcactaacggacactcacatccgtagaatacgtggggagatggtggtatttaaggaataactcgtttctgcgcgggccggccaggcgatatgcgaccctccgcccccgccaccatcatgatacgctggggtcgcgcgcggcgttgctctccgtacctatatccgctcaattatagcgtctcgtgctccagagaccggtcgctcttcttggtcctcacgtctctgtagcgcaacatacgtcatacgttggggtcggtggtgcgtgatatgaccggtccgggtggagcaggcgcacgatccacgccgctttgtattcgctcgcgccccccgtgtcgaccaccggtcgctgcgaaaggcgcggttgagtaatccagtcccaccgtctagtaataattaaaataatatatcgcgggagccggcgagcatcgcgtgcgccggagggctcattctggccatacccgcggcgcgcacaggcgtgcgtaatcggttagtgatttacgtatgggtcgtgcggatatttagtaatatatagtttatctggcgcgtctgtgtgcgggtngagggtaatatggtgtggtcgcggcgagcggatatgagcgttttatacgccctctattcttgattaatcaatgtggaatgggtgggcgcacac

SEQ ID NO: 910 - DNA, 428 bp, Glycine max
  Peptide Sequence Number=SeqID_9134
  Probeset Number=SeqID_10689
tggcggctttggcggagctgctggatgtggcgcacggaatggtggtggtctaagaggtggaagatagctttcgcagtagtgagtggatagcgagtgctcgacttcgtgtcactctacgcctgctggcaacttggcttgatatcaagtgggctaaaatggtttttcttgagacaatacttgctagttctgcaatgtctttcattaaagagcaagaggcaagtaaagaagaaactcattcaaaataagacaagcgggctaaatggaagaggggtggtatcattggtgctgctgccttaactgggggaactttgatggctgttactggtggaataacttccccagcaattgcttgcaggcttgttgcttttgcttccaccctgggtactctgatccccgctattggagccagtggatttgctgcacctgct

SEQ ID NO: 911 - DNA, 1586 bp, Glycine max
  misc_feature (138)..(138): n is a, c, g, or t
  misc_feature (362)..(362): n is a, c, g, or t
  misc_feature (429)..(429): n is a, c, g, or t
  misc_feature (528)..(528): n is a, c, g, or t
  misc_feature (1484)..(1484): n is a, c, g, or t
  misc_feature (1529)..(1529): n is a, c, g, or t
  misc_feature (1553)..(1553): n is a, c, g, or t
  misc_feature (1558)..(1562): n is a, c, g, or t
  misc_feature (1564)..(1568): n is a, c, g, or t
  misc_feature (1574)..(1574): n is a, c, g, or t
  misc_feature (1586)..(1586): n is a, c, g, or t
  Peptide Sequence Number=SeqID_9135
  Probeset Number=SeqID_10690
ttattattctctgtcttttctctcgtatgttctttataactattctatttcctcttctctattcattgtatttgtgcgtcctattttatattatttgtttttgtgagtgagagaccgagtgtgtgtgaagtggtatgntgggtagatgtgatatatagcaatcttcacaatgtatctgtttctttctctcctctatttattctcgtggtgatatagagtggtgcgtgtttgtttgtgagacgtgtaggatcagtgatgtcctgcgtgaggagcagtgtagtgcatttggaggcgattatgatggcccgctctcagcgtcggcgttgtctctatctgatactgagcactgctaaatcacatanagatgcaagtcatgagagtaacacgagagttttaggtggtgcgcggtgcgtgtgcgtgtcagagcgngctcgcaggtgtatacgaacgagcgtcgcgtggtagatggtttgacttgacagaaatatcatatctcccatatttagaacattttactatactcatagncagcgatgtgtttgatgttttgacatgtgtatcattgatgcgctgatctcacactcatacactctagtctcccgtgatgattccctaatatatatagttcgagagatattcggtagacatcacgatattacacaaacacactcactcatgcaccattgactgttatatacctattcatctctttctgcttggacttgtccttaatttttgtggtgtggtgatatatcgagtgcgacgtgcgcttacttaattataacgtgtattgtatgctttctagtttgatattagaataagagaggtgtacagtatttcatcggtgtcaccctattacttgttattatctctatatggcacttgtattttaatcttttcgcgctcgtgatatcctagttattaatacaagtgtttgcttggattatataaagaacaaaaatagatctcgtattttgtggttctcacaccgattctgaagcacagctatttgtctcattctcacctactcttttctaatgaccgcgttaatctcgatatatatgttttgacgcttcgtttttctgaaatattacaattgttcttttttttaattaatattctctaactatatatctttcattgtcttataacgtgtttcaaaacagatattatccataaatataatttatatatacattgtcttataccatgcatttcctctttctgattaagatatatttttctctcttttctttctattttaatactctatgccattccatttctatttcgcatgttttttttctctttctctacccccgcctctctttcaggtgggctaaaaaaatcttcattaatttcttctccactcttttactcactctctgcctcgtctatcgctgcatcaccttatgtctttctcgggatattgttatttttgtgacagcgcccgcgcttttattttcgagaaatacctccccgcngctgcacaaacatcccgaataaatagtaagaaattatattaattnaaaagaaaaaagaaaataaatttnaaaannnnnannnnnaaaaanaaaaaaaaaaan

SEQ ID NO: 912 - DNA, 461 bp, Glycine max
  misc_feature (18)..(18): n is a, c, g, or t
  misc_feature (21)..(21): n is a, c, g, or t
  misc_feature (29)..(29): n is a, c, g, or t
  misc_feature (31)..(31): n is a, c, g, or t
  misc_feature (75)..(75): n is a, c, g, or t
  misc_feature (108)..(108): n is a, c, g, or t
  misc_feature (133)..(133): n is a, c, g, or t
  misc_feature (207)..(207): n is a, c, g, or t
  misc_feature (219)..(219): n is a, c, g, or t
  misc_feature (249)..(249): n is a, c, g, or t
  misc_feature (252)..(252): n is a, c, g, or t
  misc_feature (278)..(278): n is a, c, g, or t
  misc_feature (287)..(288): n is a, c, g, or t
  misc_feature (291)..(291): n is a, c, g, or t
  misc_feature (294)..(295): n is a, c, g, or t
  misc_feature (319)..(319): n is a, c, g, or t
  misc_feature (330)..(330): n is a, c, g, or t
  misc_feature (336)..(336): n is a, c, g, or t
  misc_feature (341)..(341): n is a, c, g, or t
  misc_feature (346)..(346): n is a, c, g, or t
  misc_feature (351)..(351): n is a, c, g, or t
  misc_feature (354)..(355): n is a, c, g, or t
  misc_feature (368)..(372): n is a, c, g, or t
  misc_feature (376)..(376): n is a, c, g, or t
  misc_feature (384)..(385): n is a, c, g, or t
  misc_feature (387)..(387): n is a, c, g, or t
  misc_feature (395)..(396): n is a, c, g, or t
  misc_feature (400)..(400): n is a, c, g, or t
  misc_feature (402)..(403): n is a, c, g, or t
  misc_feature (409)..(410): n is a, c, g, or t
  misc_feature (412)..(412): n is a, c, g, or t
  misc_feature (414)..(414): n is a, c, g, or t
  misc_feature (419)..(419): n is a, c, g, or t
  misc_feature (421)..(421): n is a, c, g, or t
  misc_feature (427)..(428): n is a, c, g, or t
  misc_feature (432)..(432): n is a, c, g, or t
  misc_feature (436)..(436): n is a, c, g, or t
  misc_feature (439)..(439): n is a, c, g, or t
  misc_feature (444)..(446): n is a, c, g, or t
  Probeset Number=SeqID_10691
gtagttgttgtaagcaanttngaccccananagagaaatggctagcttcaccgcctccgcttccaccctctcggncgctcgtcctgctctccttctcaagcccaccgncgccgtctctgctcctgttcttggnttgcctccaatgagtaagaggaagggaggagtgaagtgctcgatggagaccaagcaaggaaacgtctcagccgngggagctggagnatctgcggagtttacagcagctttgacagntgngatgagcagcccggctatggttttgncgcacgacnnganggnnactgagggaaccgggcttgccccnttggagttagnaacaanctctngaganggatnctnntgggagggcgagnnnnngaanctgcactnnanaagataannagangnngtggcnngncnaggangnagaatnngggncttnggngtcgnnngaggggggtaaagat

SEQ ID NO: 913 - DNA, 1462 bp, Glycine max
  misc_feature (1)..(1): n is a, c, g, or t
  misc_feature (4)..(4): n is a, c, g, or t
  misc_feature (21)..(21): n is a, c, g, or t
  misc_feature (26)..(26): n is a, c, g, or t
  misc_feature (68)..(68): n is a, c, g, or t
  misc_feature (72)..(72): n is a, c, g, or t
  misc_feature (136)..(136): n is a, c, g, or t
  misc_feature (180)..(180): n is a, c, g, or t
  misc_feature (188)..(188): n is a, c, g, or t
  misc_feature (244)..(244): n is a, c, g, or t
  misc_feature (278)..(278): n is a, c, g, or t
  misc_feature (332)..(332): n is a, c, g, or t
  misc_feature (612)..(612): n is a, c, g, or t
  misc_feature (640)..(640): n is a, c, g, or t
  misc_feature (928)..(928): n is a, c, g, or t
  misc_feature (1405)..(1405): n is a, c, g, or t
  misc_feature (1442)..(1442): n is a, c, g, or t
  Peptide Sequence Number=SeqID_9136
  Probeset Number=SeqID_10692
nggntgcgttggcgtcatgantaganacagcgctcgcgcatgatagatcgcgcatttcacctcagatntagngtgcgagacacgcaatcgcgctgctatcacgatccgtacagcgcgacctcactcaagaactgtnataaccaacatgttgagataagtcgattacggtagtcatcttgnggtcgtgngtgcgacgacaaggtagtacagtgactatcgcactcgccgagctcgtggcgagatngcttacgacgcaggtacgatgcagctcgtagctngatagcgacaccatcctcactcatctagcaggcaactggtagacgacagggtantcagtctgcactatcggtaagtcgtctctaactgcatcacacacgagcaccagtgagcgtatgatcgcgtcgaagcacgcagcagagtcgatctcatcatcatgacgagagcgtcacgacggcgagtgcacgacgtggcactcgttgtcatgagcggagagacagctatataagatttgcgatgatcactctacacatgcgtatagcgaatacacatgtatctctgcttcgagtcccagtacgcgcgtgaggcgtacaatcctcgagcagctactcggtntcagacatgcatctagtcgtagagtcancacgtgtgtgtcgtgcacacaactacgtggcgacatgatgagaagtacgagactacacgacaacagtgtcacagcagacccagctagtctcgcaccatcgctccacacttcatagtctcgtgagagccgacaatacgctttctttcggatctaacctgcatctacactaccacactaccatgcgcgggacgtcgagcgtcacaccgatccatggatgagtgaagagatatacagtggtggcacgcgtaaagtgtgtatctcgcatcttcctcttcgaacgactaagangactaatgtagacagaggattagtcgccgattgtggcgccttagagtgattcttacacgtcctattaatcacactattctgatcgtcatctatatatataggacagataacatagcgacactacgactcaagacctctcagatttatacgcgtatccgaggtcgccctattgattcaacataagggtcgcgaggtctaggcgcacgtctccgcaaggatgcacacatcgagtagagcggaaaccacgtggtgagtgtaaagtacgtgatcttgctggtagttacttgccgcgttcgaccctacggcatcgctattcttgtatcttacgtcgattgtctcggacttcatggctagtggaggtggaggcagctgctggggactgtagatgagcatttcgcactagtacaattcctctctagagcaataaactaaagatattgtactagtgagaaaagacagagacgaagccgagccaanaacaggtattggtgtaaggcggcggcgggtgtgtggngggagtgcagcgctcaccca

SEQ ID NO: 914 - DNA, 501 bp, Glycine max
  misc_feature (82)..(82): n is a, c, g, or t
  misc_feature (157)..(157): n is a, c, g, or t
  misc_feature (201)..(201): n is a, c, g, or t
  misc_feature (492)..(492): n is a, c, g, or t
  Probeset Number=SeqID_10693
atcaacaacctccccgctttctccttcccgtctctctcctctcctctggtcccgattcccttctccgagcttcctccctatnaataaggcggccgcggcgggcatcattttccgtcaccgccaccgaaggcgcgaattattcctccgcccccgccgncgcgaaaaccctaagcgcgccgatcccatgggcacggctccagncaggggagactcctcctccagaaagaggtccagatctcgcggagaccccggccgatggtttttcagccgggttcgcgagaaaagaacatctttctagagggaggtaacactctttgggccggcgagacctatatgatggggggggattttaaagtgaaatagtggagttcccacaaatttatccgaacagccttcaacagtcagattcctttccgggatgtggcattctaatgttataccggaggggggggggaatggatttccattcttcatcaccccgtggggatgatnccaacggta

SEQ ID NO: 915 - DNA, 649 bp, Glycine max
  misc_feature (1)..(6): n is a, c, g, or t
  misc_feature (496)..(496): n is a, c, g, or t
  misc_feature (607)..(649): n is a, c, g, or t
  Peptide Sequence Number=SeqID_9137
  Probeset Number=SeqID_10694
nnnnnntaataaaaatgtaagacataaaaagtaaactctaacctaaccatcaaatgtttgtattgtggagttattctaggtccaatcaggctccaacatgagtgcctctaatagaggatacctatggcctagacaaataaataaataaataaataaaactctagcattagttacttatctatatccatgatgagtgtctctgacagaggatacctatggccaagacaaataaataaataaattaaactctagcattagttacttatctatatcttatactttttttttttcagttcatagatggagggaccatggtgtcacctacagtgtatgcaagacgctgcttatcttatttaatgaatgacatggcacaagaagcccttggggatgcaatgcaagcccaagtggtatctccagagtggcctacttctttgtatcttcaagcagcttgtcttttcagcctcggaatggaaaatgatgcacaagagactctcanagacgggactaacatggaagccagaaaaaaccaaaactgaaaaagttgtatagattgttgctttttcttgtgtggtcttaaagattatttcatttcatgcccttttaaagnnnnnnnnnnnnnnnnnnnnnnnnnnnnnnnnnnnnnnnnnnn

SEQ ID NO: 916 - DNA, 1740 bp, Glycine max
  misc_feature (1)..(1): n is a, c, g, or t
  misc_feature (30)..(30): n is a, c, g, or t
  misc_feature (55)..(55): n is a, c, g, or t
  misc_feature (87)..(87): n is a, c, g, or t
  misc_feature (91)..(91): n is a, c, g, or t
  misc_feature (94)..(94): n is a, c, g, or t
  misc_feature (103)..(103): n is a, c, g, or t
  misc_feature (117)..(118): n is a, c, g, or t
  misc_feature (148)..(148): n is a, c, g, or t
  misc_feature (182)..(182): n is a, c, g, or t
  misc_feature (202)..(202): n is a, c, g, or t
  misc_feature (274)..(274): n is a, c, g, or t
  misc_feature (307)..(307): n is a, c, g, or t
  misc_feature (334)..(334): n is a, c, g, or t
  misc_feature (350)..(350): n is a, c, g, or t
  misc_feature (381)..(381): n is a, c, g, or t
  misc_feature (394)..(394): n is a, c, g, or t
  misc_feature (408)..(408): n is a, c, g, or t
  misc_feature (439)..(439): n is a, c, g, or t
  misc_feature (445)..(445): n is a, c, g, or t
  misc_feature (494)..(494): n is a, c, g, or t
  misc_feature (499)..(499): n is a, c, g, or t
  misc_feature (534)..(534): n is a, c, g, or t
  misc_feature (551)..(551): n is a, c, g, or t
  misc_feature (555)..(555): n is a, c, g, or t
  misc_feature (565)..(565): n is a, c, g, or t
  misc_feature (581)..(581): n is a, c, g, or t
  misc_feature (591)..(591): n is a, c, g, or t
  misc_feature (597)..(597): n is a, c, g, or t
  misc_feature (601)..(601): n is a, c, g, or t
  misc_feature (652)..(652): n is a, c, g, or t
  misc_feature (662)..(662): n is a, c, g, or t
  misc_feature (718)..(718): n is a, c, g, or t
  misc_feature (720)..(720): n is a, c, g, or t
  misc_feature (723)..(723): n is a, c, g, or t
  misc_feature (747)..(747): n is a, c, g, or t
  misc_feature (753)..(753): n is a, c, g, or t
  misc_feature (769)..(769): n is a, c, g, or t
  misc_feature (771)..(771): n is a, c, g, or t
  misc_feature (785)..(785): n is a, c, g, or t
  misc_feature (793)..(793): n is a, c, g, or t
  misc_feature (811)..(811): n is a, c, g, or t
  misc_feature (819)..(819): n is a, c, g, or t
  misc_feature (843)..(843): n is a, c, g, or t
  misc_feature (869)..(869): n is a, c, g, or t
  misc_feature (886)..(886): n is a, c, g, or t
  misc_feature (897)..(897): n is a, c, g, or t
  misc_feature (901)..(901): n is a, c, g, or t
  misc_feature (914)..(914): n is a, c, g, or t
  misc_feature (919)..(919): n is a, c, g, or t
  misc_feature (921)..(921): n is a, c, g, or t
  misc_feature (931)..(931): n is a, c, g, or t
  misc_feature (991)..(991): n is a, c, g, or t
  misc_feature (994)..(994): n is a, c, g, or t
  misc_feature (1144)..(1144): n is a, c, g, or t
  misc_feature (1245)..(1245): n is a, c, g, or t
  misc_feature (1253)..(1253): n is a, c, g, or t
  misc_feature (1292)..(1292): n is a, c, g, or t
  misc_feature (1514)..(1514): n is a, c, g, or t
  misc_feature (1560)..(1560): n is a, c, g, or t
  misc_feature (1728)..(1728): n is a, c, g, or t
  Peptide Sequence Number=SeqID_9138
  Probeset Number=SeqID_10695
ntagatatgatagtcgtatgatcagtctgntatatacatcgcagtcaagtcggcngacaccacgcgcagacgtacgaagacatgaanacancanaaactcgtnacagtactacggtnnacttgtacgctcacgtcgcgctgtcgaccnacgtcatatgtgtgattagcgatgacgggtgatnatagatagtatctctcggtntggcctgcagttcgatgcgtcatgacatcgtacagcattcagactacgaagcgtgggcgattcgatgatgantagtgagtgtgcgcgtcagccgcgggcagcatngtatgagcatacaatcatatatatacngcagtacaccgtgcgngcgcgttgagcgtgtctacggccagcagcgnacgatactaagcntaagtgagcgtganataagagcatgtactagacgtcgagctgcgnagtcangcgcgtcgcggtagactgacaaaagcaaatagtaacagcgatgataagntgacnctgcgagcgtcgagtatagaaatcagacaatgagngcgtgcaaggtggagancgangatacagtanctatatcactacgagncactagctgnctatanatgntgcgtgctgaagacgtactatatatagagagatcgcgacgctatcctacgngagagtacgncgtgacgataatttattgagactagatacgcgccgcggcagtagcgagagctcggngngantatagagtcggcacaggatagcantagacnaatcccacgaatgtcngnactctattatcgantaatgtgncgcgcggcagttgttcgngcgtgtangagttaagaggtgcagcggcgcancagacacatcgattatcgacacggancgatgcttcgaatcacncatgtaggcgngcanatcgcgcagcgcngacgnanacggcgacanaaacagctagtaggctatccgtcgcagacacacgctaccgtcacaacagccgcgcgcagncgntattcagcgcagcgatcgcgaacgcgaatagattgcgtacaaacgttattgaatagggcgggtcatagtataccacgagtatatcggatagcgtagtacggacgcgacccgtacagtgtgtgtcatattgcggcgccgtccactcgcgcncgcgcgccggcggcgtcgcaccggatgtacgcagcaaacgcagtccgtgcgacagcacgcaatataggaatattggatgtgcagacgtgtgcgcgtatttntcgcatcnagtaacctcatatccactcgaatatatttaatacatgcnatagtaagacaccgacgtaggtcatatcacgaacggagtctcgcgtgtcaccatcgcgcttataataatacatacatacggcggtcggtaacatgtacatacatgcgcgctatgtagtcacgatagagagcgagtaacgccagataatctttgcgtggtgcaacttgatatggtgtatagttcatgttatttggtgcgttctagtcaacgtcggttgcttgntaaagaaaatatataactcgcagagaatcgatagatgcgtgatggnagtgatcatgttgatataaacacgcccgccgccgcacgcgagcgagcgtcggacacgcatcctacccgccatatatagtaaaatacatccgttcctcacgcgcgccgacgcgcaacgcggtgctggcgcgctcactacgcatacatcacttgtattgataacacacgnatgggtgctaat

SEQ ID NO: 917 - DNA, 781 bp, Glycine max
  misc_feature (1)..(180): n is a, c, g, or t
  misc_feature (624)..(624): n is a, c, g, or t
  misc_feature (781)..(781): n is a, c, g, or t
  Probeset Number=SeqID_10696
nnnnnnnnnnnnnnnnnnnnnnnnnnnnnnnnnnnnnnnnnnnnnnnnnnnnnnnnnnnnnnnnnnnnnnnnnnnnnnnnnnnnnnnnnnnnnnnnnnnnnnnnnnnnnnnnnnnnnnnnnnnnnnnnnnnnnnnnnnnnnnnnnnnnnnnnnnnnnnnnnnnnnnnnnnnnnnnnnnnngggtccaaaacggcgtccgtcgtggcggcggatttattacccaaggtgggaagaaagggcaggatgccgtgccagatggggttcctcttcggtgcccggcccggaatccccctcgtcaaggacctcaccgggagcaagaaccttcgcaccctcacgagcctcatgctggcgccccgggaaccccggaggatcctacttttttgattaagaaggctgtggccaattgggaagaatcggaagaggaacgggaggaacaggaatttcagttcagggtcatccttgtggagagcaggagccaccgcctcgctcgctactacaagcgcaccaagaagctcccgcccccctggaagtacgagtctaccgacgccagcactgtggtggctttggtggggtaagggagatccagatttggtgtgcttttagctgattaaagcttgattgttntggaaaccttttttatgtaatgctttatgagagtttggagccaagcagatgctgcaaattttctatgtttgcctggaggatgctgtaaaacctttatggtttctctgttctgtctgttaaacgactgttataatgtaccccgattttgtcaaaaaan

SEQ ID NO: 918 - DNA, 1528 bp, Glycine max
  misc_feature (626)..(626): n is a, c, g, or t
  misc_feature (1016)..(1016): n is a, c, g, or t
  misc_feature (1032)..(1032): n is a, c, g, or t
  misc_feature (1037)..(1037): n is a, c, g, or t
  Peptide Sequence Number=SeqID_9139
  Probeset Number=SeqID_10697
gcgggggtgcgtcgtgtgctcgcgccctccgctgctcgccgcaccctaagagtatgggattgtgtacggcggcgaagcgtgaagggatgagcaggtgatcaccacgccaattgcgaggggcgggaaccgtggtggaggacggccgcggctggctcagacactctatccggacatgcacgactcatcagccttatttagttgttgctacaggatgaaacaacgaataacgatatagatagccgctgataagtagcgcactctgcgacggctaagctccgccgtctggcgtccctccgcgcgccgtcgcgtccctcgtgtgtctcgggctcgcagggcggctgcgggttgataggcagcacataaatagcgggctgagtggagcgagcgcaccctggcgtaagtgagcggccgcagcgtcggttctcagtccgtggatgccgcagcgcgcgccggcgcgcggccctcgcacccaccccaccgactactacacacgcgtcagacgcgtcgcgacggcctactcacgacggttatgcaatagcttgatcaggatacagattatctacaccaccaaccagtatacaactcgacaacagacggggtacaggagaataatcggactatcgcangtgaccgggcggtgcaggtacgcgtgggtaagtgtaaggttgtagagtatcggagacatcacacttcgcgatggatgcgcactatacttaagccggacaatatcgctttcttaagtcgctccatcgatcgacgcacgcagaccatctatatgacaacggccgcgtgccagcgccaccccgatgcgcgcgatgagagctaccgaccttaagcgcgcacggcgcgcgtgagtataatgtcgctcacctgaacgcgcatgttcgatatcgtctgagcgccgcctacgacgcatgcgacgctgtgcgacgcgacgtgcgtaccgctgcttatgatagtcgacgcgaggatctggagtacgtctatacagctatgctagtctcgacttctggagngctccgcgccatactnttgcngcgccttgcccgtcgcgcagagctctacggaccaccgtctaatcgatgtgccgcagcgtcagacgacgacacacgctcctactcagctacttctagcccacgcgcacgccccctctgtaatgatgtgtatcacactcgactccctagccggagtgtaagtgtcggcgctgtatctatggcctcgacgcaatccgcacacgtcctgtgcacctgtactccgttttgaacgaggatacaagatgcagtatcatcacttcttactatgcatgcataactctcatcttctttctcggcgcgatgctcatgtgctgcgcgacggtcgttcgcggagacgaacgtcctgtgtttctgcgcgtgatcgaccctatgacattgccatacccgcctacagaacgcgtggacgattagactcgtcacgacatatgtgggtctcgacgggtcgcggccgcgcggagagcgcgagtcgtgtctgctgctagccgcggtagtcg

SEQ ID NO: 919 - DNA, 309 bp, Glycine max
  misc_feature (199)..(199): n is a, c, g, or t
  misc_feature (283)..(283): n is a, c, g, or t
  Probeset Number=SeqID_10698
acaggaaccttataccctgtgcatatatggccaaaggcagcatccagggcagtatggagtaccataagaattaggatgacccagaattcactttccgtcaagaacacctcttatgtgaagatgaggcttgcctggccaagaaatttgttgtttttcaatctgaagcagagatgaagaggcataatgctattgaacatgngagggcggatgtcacggtctaagcgtaatgctgctcttcaagcaagtataatgacattcttttttttaacccacttttcatgtncattgatactgctagttttcatggac

SEQ ID NO: 920 - DNA, 1605 bp, Glycine max
  misc_feature (1)..(3): n is a, c, g, or t
  misc_feature (15)..(15): n is a, c, g, or t
  misc_feature (25)..(27): n is a, c, g, or t
  misc_feature (33)..(40): n is a, c, g, or t
  misc_feature (42)..(44): n is a, c, g, or t
  misc_feature (107)..(107): n is a, c, g, or t
  misc_feature (114)..(114): n is a, c, g, or t
  misc_feature (217)..(217): n is a, c, g, or t
  misc_feature (241)..(241): n is a, c, g, or t
  misc_feature (245)..(245): n is a, c, g, or t
  misc_feature (268)..(268): n is a, c, g, or t
  misc_feature (272)..(272): n is a, c, g, or t
  misc_feature (382)..(382): n is a, c, g, or t
  misc_feature (520)..(520): n is a, c, g, or t
  misc_feature (582)..(582): n is a, c, g, or t
  misc_feature (776)..(776): n is a, c, g, or t
  misc_feature (840)..(840): n is a, c, g, or t
  misc_feature (882)..(882): n is a, c, g, or t
  misc_feature (884)..(884): n is a, c, g, or t
  misc_feature (897)..(897): n is a, c, g, or t
  misc_feature (916)..(916): n is a, c, g, or t
  misc_feature (949)..(949): n is a, c, g, or t
  misc_feature (1024)..(1024): n is a, c, g, or t
  misc_feature (1154)..(1154): n is a, c, g, or t
  misc_feature (1156)..(1156): n is a, c, g, or t
  misc_feature (1158)..(1158): n is a, c, g, or t
  misc_feature (1182)..(1182): n is a, c, g, or t
  misc_feature (1260)..(1260): n is a, c, g, or t
  misc_feature (1325)..(1325): n is a, c, g, or t
  misc_feature (1327)..(1327): n is a, c, g, or t
  misc_feature (1330)..(1330): n is a, c, g, or t
  misc_feature (1392)..(1392): n is a, c, g, or t
  misc_feature (1396)..(1396): n is a, c, g, or t
  misc_feature (1399)..(1399): n is a, c, g, or t
  misc_feature (1495)..(1495): n is a, c, g, or t
  misc_feature (1546)..(1546): n is a, c, g, or t
  misc_feature (1550)..(1550): n is a, c, g, or t
  misc_feature (1555)..(1555): n is a, c, g, or t
  misc_feature (1557)..(1557): n is a, c, g, or t
  misc_feature (1559)..(1559): n is a, c, g, or t
  misc_feature (1565)..(1565): n is a, c, g, or t
  misc_feature (1605)..(1605): n is a, c, g, or t
  Peptide Sequence Number=SeqID_9140
  Probeset Number=SeqID_10699
nnncccccccgtttnaatggcaagnnntgtggnnnnnnnngnnnatggacacgagcgtacggggtgcgtgggttgtacatcaccacatacaccctcctctcgctctntcctagnccttctgttgttgtgtgtgttacgtatatactggtatagactttggtgctcattctctgtccccctataccatgattcggccactacaacgagacaggctaanaaaattgaatatgtcttcgctcgncacncatacacaatcatctggtatacnagtngtagtcgattcgctgaattaccattcctcacgacacctcacaaccaacacagcgcctcataatcgacacttctcttttgtcttcgccacgccgcgctacgcgcggcattncacatctatgcgaccttctctacacgtccagtgacatgatctattcatcgcgactcacatcttgctttgatactattctcataattacgaacattaatcatagacgactcgttctagcctgactgtcggtgatgatgngtagcgctgacagccctactctccacgtaccactcactagatcaagatgctgcgacgcgcgntccgcatctctcgcgtgcaccacagacagaagtaccatcctaatacattatcactgcaatgacgaccaccacgagagcggagtaacccgctcgcctgatacaaaccttaactgtcaccaccacttatcgcgacatactcatactatatacatacgactgatgtcgagcgccatcgcgctgtctcatccttgaangagggcgagagaaggataataaacatgtcggagtagctgtgatatcagctatctgaccacacanacagtcaatcactcacacctcatagatagatgctattgtacnantctatgtcatgtntgctcgcgcatggccttgntgctcataaaataatgacaactcagcggccatncgatagtctatgcagggacgtaaacagtcgctcacccatacatacaccatagctgcacacgcacaccccgaggtntgactcaccacatcttatcgacgacgcacgtgcgatagccttgggatacacgcgtctcgctgacggagaaatacgttcgagccttatcttacctccgatagggcagatgtgagacaccctctcaatacantnanagctattgcttgtagacgttaganactagtgtgatagtgttcttagctctctcacagtgcactctgctcactagaacctgactcagctcacccgatcaagangatgcacgcaggtacgagacaatatacatgctgtgtaacgctatggctgcgcaatatacacgatngnagntactgtagtgaagatgctaaacatgcatacactcgagctgctgattgtgaaccgcacacagncagntcnacgctgacatatacgtcgatcagcatagccactgacacacacggcgctaactacttagaatacattctactatagcgatcgactacccactactanacgtactcatacgctagcactgcgtatgacatatcatgcgcacgtgctgtntcgntatgngngntccacntgactagtcttactgctaaagcttcgtacgtgcgatgaan

SEQ ID NO: 921 - DNA, 1499 bp, Glycine max
  misc_feature (97)..(97): n is a, c, g, or t
  misc_feature (126)..(126): n is a, c, g, or t
  misc_feature (131)..(131): n is a, c, g, or t
  misc_feature (222)..(222): n is a, c, g, or t
  misc_feature (224)..(224): n is a, c, g, or t
  misc_feature (293)..(293): n is a, c, g, or t
  misc_feature (508)..(508): n is a, c, g, or t
  misc_feature (588)..(588): n is a, c, g, or t
  misc_feature (601)..(601): n is a, c, g, or t
  misc_feature (620)..(620): n is a, c, g, or t
  misc_feature (714)..(714): n is a, c, g, or t
  misc_feature (729)..(730): n is a, c, g, or t
  misc_feature (732)..(732): n is a, c, g, or t
  misc_feature (759)..(759): n is a, c, g, or t
  misc_feature (773)..(773): n is a, c, g, or t
  misc_feature (894)..(894): n is a, c, g, or t
  misc_feature (957)..(957): n is a, c, g, or t
  misc_feature (1369)..(1369): n is a, c, g, or t
  misc_feature (1458)..(1458): n is a, c, g, or t
  misc_feature (1474)..(1474): n is a, c, g, or t
  misc_feature (1481)..(1481): n is a, c, g, or t
  Probeset Number=SeqID_10700
catcaagtctaggacgaggagcagacgacgtgtagcgcatgagagcgacgcaggctggcgagtagagagctagcgcagcgagctgtacaggacgacncatacttttcttttctctaccaaccacancatcnacatagaacacgtccaatgatggatgataagatagacacagcacagcggtataacagagcaaacagagcaagagagagataggacgcacanancgtgtatggctcgcagcacggagatcgaaagcagaggaagctatcatctccacagacagcgttgatgtntgtggtagagtccgagagacacacagagaggaatatgatagcacagagagagtatagcactatgaccgcgcgcgacaggcacgcgcagtagtagaacacatatacgcccagagaggcggagaattgaggcggaagaggaggagtagtatcaggttagagtggacgcgatgtgtgaggaatcaagacgagggcagagaagaggagacttcatggtnagagcggaagggcaatgtagatgatgaatacgcgcagcacgcggatcgtagtgtgaaggcaggatttatatatcgacacnttggtcaagagtntgggagccgcacgccagtnatatacactatcaatcacaacacatataacaaacaacacctatgcatatatacagggaggagatgtggtggtgtggtgcgtcagagggagtttntcgccatgtttattnntntatcaatcacacacaaaacagttatantgtcgagtgttttnagaaacacacagttatgcgatatacccaacgaagaggacacggagcagaagccagaatgcagtataagatgccagaagcgcttatcgtatgaaccactatctccacagatatgtgcaccanataccaacgaaatgaccaccctccgacagtgcgcgccctcaccctgttgtgtggcgccaccgnatgtgctccgcgctctgcgttgcagacctccaatgtgtatcaccatccaccttttgttagtccccgcttcgttttgtcacaccatgtatgtgtagccacatgttagtaaccaccgtgtattgtttgtgtaccccaccagaattgtcgagccgccaaagtgtgtttacccagtgctagttgacacacacgttgtatcagtcccccagaggatgagacaggagtgagaaacacgatgtgttgccccatgtagcgtgagcgctatatgtaacctgtggaaatgtgtttgtgtgaggtatagaacgatcgatgatagaataggagagactatttttgtgtacgtattgatatttcatcccctaaccgcccctgcctccggaggtggggcggcggtggagagcggggaggtgaaagncagaactccgaaggattaataaagcgcggacagaccacaaaactgagacaacacaacacggagtaagagaaggtgcgcacccgcgcgcnatcataggcgcgccgnggtggcncccccccttctcaattat

SEQ ID NO: 922 - DNA, 752 bp, Glycine max
  Peptide Sequence Number=SeqID_9141
  Probeset Number=SeqID_10701
aattaaactgatgttttgttagtgagaaacaacttactatttgtaatgttgttatgatttttcttttagtaaaacactgcaaggagattcgtattcagtctagctgcttgcccccctgcttgaagtgcatacagatgaccacgagcacattaaagaaagagagttacctagcccaccaccagaggcacaggagcatccaaaggtccgctccatcagaaagcagtggcaggcaggaaagccgacgccgacgaggagcccacccagcctgcctgcgtgaggaagaaaccaagcgcatgcatgagagggaaggtaagtgagagggggaagagcaaactgaagcaaatatgggtaccaaccttgaccttgaggaggaacatcgctggcagttggagcggatcagagcagcggcctccatagcaagcagaagcatgcgtcactcgatttggaagcagtcgagcaggagcagatgtggattcgtctcccggcgcgcgagcatctcttgacggatgcacgacgacgacgaagccgaggatggatcgacctcctcactcctcctaccaagtccggaggagcaacgaccatgccgcagacagctcggcatcctcaccatctccgcggcccgcgctcagtcaagagcatgttccttttcttgtcccagcccagacaatttgatctaggaaccctgtttaaaaaataaaaataggaattgtactgccttgacagttgatgaatagatcagaaattttctcgct

SEQ ID NO: 923 - DNA, 1640 bp, Glycine max
  misc_feature (30)..(30): n is a, c, g, or t
  misc_feature (119)..(119): n is a, c, g, or t
  misc_feature (229)..(229): n is a, c, g, or t
  misc_feature (237)..(237): n is a, c, g, or t
  misc_feature (254)..(254): n is a, c, g, or t
  misc_feature (277)..(277): n is a, c, g, or t
  misc_feature (376)..(376): n is a, c, g, or t
  misc_feature (541)..(541): n is a, c, g, or t
  misc_feature (548)..(548): n is a, c, g, or t
  misc_feature (719)..(719): n is a, c, g, or t
  misc_feature (817)..(817): n is a, c, g, or t
  misc_feature (1421)..(1421): n is a, c, g, or t
  misc_feature (1473)..(1473): n is a, c, g, or t
  misc_feature (1636)..(1636): n is a, c, g, or t
  Probeset Number=SeqID_10702
tgttgtgttgttgtgttttgtttttgtttntatgctctatatgcgaacacaaccaagacatataagaataacagctaagaaggacgtaacaataaaggaaagggaaaggaagaacacanataatatgataagaataaagagtgtaacgagagaggagaggataaatcaacaaacactatgtgatgtacacagtgtgcacacggaaacaatattctgctgggatttaatngcacacgnagagaagaatagaagcnatgaatgaagatatgcagcgganacagaagagaataggatacgtagggattgatgagctacaagcgatgacgcagatggctgagataataattgacgtgatgctatagactgaatgataggngactatctaaaatcggattagggaatatagacacacacagcaaagagcacaagacttaccgaattacgacacacatcacatgtatacataacaagtaacagcaacaacatacactcgacaagtcgtctgtcatacacactcgtgcgctatgacatcgcgtgcatntattatnttgaataaatcgagttaatttttgtagaacgaagagtatatgaactcatatatttgaatatagttaatatattttggtttatgtttcattttattcatatctactacagtcgatcatttctattcctcttgttcaccactctcgcctcctccttcggtctccttgtgtgangatatatgtgatatgaatcactttatttgtgtgttgggtacgagagatatttgattcgttgctggtgagatacaatataacatcgcgcacactacgtntagaccgtcgatcacaactcgatctatcgaatatattgattgctatttactaatctaatatgattgtgtagagaaagagacaaataataacataatacacacgcgagacaccatcgcgaataatgatattatcatatatatataatccatatccactatatatagcattatacctctgcgcgttccgtactatactgatagatacaagacaatacaagtacgtcgcacacttataagaaagcttagcacgacagcgtacacatacaacacatcacatgacacgatgtaaattgtagcacacacgatcactattcttatatatataatttatattatacctactactcaacaacgtctctagtctcactacgaacaaacctctgataactttcattactaactatgatatctatgaattacacatgctattactcttcgtctatctaatatctatatattatctatctagtacacagagacacctgcacatcaactacgcactattcgctgagaaagagcgacagcataataatatacatgagtatatatatcacaacgttaattatctaatatcactattctacaaatgtaatcaatataacanatatatctacgtctatataaatattaataaatctatatatatttattatatnttgaagattattatacatagagcatatcatatataatttatataatatacatatatatttactaagctcccgcaccatacacgtccattagctctcgaatatattttcttcaatgatatacactgtctataaaaaagagttgctagccatgagaccgcgatcncaac

SEQ ID NO: 924 - DNA, 3217 bp, Glycine max
  misc_feature (80)..(80): n is a, c, g, or t
  misc_feature (3217)..(3217): n is a, c, g, or t
  Peptide Sequence Number=SeqID_9142
  Probeset Number=SeqID_10703
gaggttgtggtggtttttggagtttgggtgtgtatttatagtagttcttctgtttggccttgtaaaatttgggagggccnaggtttacatagtcacggttgagggagagcctatcataagctacaagggaggaatcgatggctttgaagccaccgcggtggaatctgatgatgatgatgatgagaagcttgattccacaagtgaggtggtggtttcttatgctcggcaccttgaaaagagacatgacatgcttctggggatgctgtttgagcgtgggacatacaacaagctctatagctatagacaccttataaatgggttcacgacatctcggaattcggcttgcggttcatatttcaccagaacaggcagaaactctaagacatgctcctggggtgaaatctgttgagagggactggaaagtgaagaggctcacaacacataccccacaatttttagggcttccaactggggtttggccaacaggaggtggctttgatcgggctggagaagacattgtgattggacttgtggactcagggatctatcctcagcacccaagttttgcaactcataattctgagccatatgggccagttccaaggtacagaggaaaatgtgaagctgatccagaaactaaaagaagttactgtaatgggaagattgttggagcacaacactttgctcatgctgcaatagctgctgggtcatttaacccttcaattgactttgcttctcctcttgatggagatggacatggaagtcatacagcctctattgcggccggaaataatggaattcctgtgaggatgaatggccatgaatttgggagagcgagtgggatggctcctcgtgctaggattgctgtctacaaggcaatttatagactgtttggagggtttattgcagatgtagttgctgcaattgatcaggctgtacatgatggagtggatatactcaacctttcagttggacccaatagtcctccagcaaacaccaaaactacatttttgaacccttttgatgccacacttcttggagccgtgaaagctggtgtatttgttgcacaggctgctggaaatggtggtccttttcctaagacattggtttcatatagtccatggatagcatctgtagcagctgcaattgatgatcgtagatataaaaatcatttgatccttggaaatggaaaaatcttagccggaattgggttatcaccttccacacatttaaacgaaacatacacattggttgccgcaaatgatgtgttgctagattcttcacttatgaagtatagccccacggattgccagagaccagaacttttaaataagaatttaataaagggaaatattcttctctgtggatattccttcaactttgttgttggcactgcatcgatcaagaaagtctcagaaacagcaaaggcccttggtgcagttggatttgttctttgtgttgaaaacatttccctaggaacaaaatttaatccagttcctgttggccttcctgggattctcatcatagatgtcagcaattcaaaggaactgatagattattataatatcactacaccaagagactggactgggcgtgtaaagagtttcgaaggtaaaggtaaaatcggtgatggtttgatgcctattctgcataaatctgcaccacaggtagcattattctctgctcgagggccaaatataaaggacttcagcttccaagaggcagatcttctcaaaccagatatattagctcctggttcattgatttgggctgcttggtgtccaaatggaactgatgagccaaattatgttggtgaagcgtttgccatgatatctggaaccagcatggctgcaccacatatagctggaattgctgctcttataaagcagaagcatcctcattggagccctgcagccattaaatcagctttgatgactacatcaacgactctagacagagcaggggatcctcttctagcccagcaaacttctgaatcagaagctatgaggctggtcaaagctactccttttgattatgggagtggtcatgttgatccaactgctgcattggaccctgggctcatctttgatgcagggtacgaggattatataggcttcttgtgcacaacacctagcattgatgttcatgagataaggaactacactcacaccccatgtaacaccaccatgggcaaaccatcaaatttaaacaccccatcaataacaatttcccatcttgtgagaactcaagttgtcacgcgcactgtcacaaatgttgccgaggaagaaacctatgtgatcacagccagaatggaaccggctgttgccattgaagtcaaccctccagcaatgactatcaaagcaggcgcatcgcgtcagttttcggtgtcacttacagtgcgctcagtgacaggaaggtatagttttggagaggttttgatgaaagggagcagagggcacaaggtgaggattcctgttctggccaacggataccgacgatagatagcatagtgaagtttggtcagcaaaggaaaggaaagcaagtgctgcttgtaatattctttgtaacctgtggggaataaggtatggcgctacatttattcgtctaaatatataaatatgtaatgttaaattatgaataggtgtaaaggtaagcaggtgtaaggggtcactcctagtttcttccacatatagttttgcttatattgtctagtaattttgttggaatgcttcatcacaagttttaacctgtatctgccccattccccaaaagttcgttgcttacagcatgtgtaatacatgaaataatttgtataacataaggtatcaatggcacagcgtaaatcctaccaaagctattggctagttaaaaaactaaaaagctggtgatagcttcgagcctcaaagcccggttgtgttccggcggtcagcggcatagctgatggtccgacatactcaagataactttagtttggtctgcaaagaaaagttacgcctgtactattctttgtaatttgcggaaataaggaaggtacggcgttagatttattcatgaaaatataatatatggtgttgaatagatgtaaaggtaagcaggcgtaaggaggagactccttgtttattttattccgcatataaagttttgctaataacatcttgttatttattgaaatgcttcttcttctaaaaaaaaaaaaaaaaaaaaaaaaaaaaaaaan

SEQ ID NO: 925 - DNA, 451 bp, Glycine max
  Peptide Sequence Number=SeqID_9143
  Probeset Number=SeqID_10704
tcgagtcagctacgtagtgccccccccccaataaatctgatgtggaagctgttttatctatcggcctcagaacatcccatgaaagagctcgcagggtgttatcaactcgacactccaagtgcccctgtttctactcctgaggttggagaagaagatgaagagatagatccacgttttcctcctcccacaaaagacagaaccggccttctcacccactatttgttagatgcagcaagtgtaattacagctcgagcattaggagctcgatcaggacataaagtgttagatttgtgtgctgctcctgggggcaaaagtttggttattgcttatgatatgttttcaaaaggacaaccaaacgctattgatgttgagaatgattctgacgaaagtgaagaagagagtgattctgaaaatgaaagtgaaggagaagagagtgacgaagaagcagtga

SEQ ID NO: 926 - DNA, 756 bp, Glycine max
  misc_feature (1)..(155): n is a, c, g, or t
  misc_feature (379)..(380): n is a, c, g, or t
  misc_feature (386)..(386): n is a, c, g, or t
  misc_feature (389)..(389): n is a, c, g, or t
  misc_feature (395)..(395): n is a, c, g, or t
  misc_feature (401)..(402): n is a, c, g, or t
  misc_feature (435)..(436): n is a, c, g, or t
  misc_feature (449)..(449): n is a, c, g, or t
  misc_feature (458)..(458): n is a, c, g, or t
  misc_feature (460)..(461): n is a, c, g, or t
  misc_feature (500)..(501): n is a, c, g, or t
  misc_feature (508)..(508): n is a, c, g, or t
  misc_feature (511)..(511): n is a, c, g, or t
  misc_feature (517)..(517): n is a, c, g, or t
  misc_feature (548)..(549): n is a, c, g, or t
  misc_feature (756)..(756): n is a, c, g, or t
  Peptide Sequence Number=SeqID_9144
  Probeset Number=SeqID_10705
nnnnnnnnnnnnnnnnnnnnnnnnnnnnnnnnnnnnnnnnnnnnnnnnnnnnnnnnnnnnnnnnnnnnnnnnnnnnnnnnnnnnnnnnnnnnnnnnnnnnnnnnnnnnnnnnnnnnnnnnnnnnnnnnnnnnnnnnnnnnnnnnnnnnnnnnnnnacccttgccaattctcttttctcgacgggaacacgccctacaattacacccctctcttctccccttcgcaacttccctcaccgccactcctcagcgaagatgcggcgattttccaaagtggcagtaaaccgctaccacacctttggttttcagcttttgcgactggaatgcttttcaatcatgaaccctccaaaatgtgcctgacttggcttggggaattggtnnggaggngcncaaaanaccgtnntgtgggaattggaatgtgccaaatggcttcttnntgtggcaaaacanacccgttgngnngggttaattcaatttgtattgccaccaatgcccattagnngaaccgntgngcccanaaaaaaattaagaatttgttgaccatttatnntgactaagaaaaaaatccccacacttggtgtcattgttaaaatgtcgaacagtggcccttaataccaactgttctctagctgtgtctgttctttgcattaaatggagtgcaaggaccgcgaactctggagaagattaggggcctgtgattatgttacagagctaaagcacccattctggctgtgccatcattgtaaatgttcatggn

SEQ ID NO: 927 - DNA, 1287 bp, Glycine max
  Probeset Number=SeqID_10706
atcatccacatccaaaccccatcacataacccattacccaaacaaattagttgccaaagatgagtgcaatcgttgaggaacctgatagcctcaacttcgagcctattaaggtcctcatcgccttacaagataaattcgacctctgcgacatggctggcccgttggaagtcttcaactgggcccagcacgacagacgtgatccggagaccaaagccttccgcaccatcctcgccggcgacgacgagtacgtgaccagcgcccaaggcgccaccgtcaaaacccacatcagctacaaagacgccatgtcgcgcctgaacgagatcgacatcctcgtcatcgtcggcggcgagtcggagaaagtcatcaagaccaaggcccagccgctcaccctcatcaaagccttcaccgagcagcagaagaagaacccggcccgcgagcgcaccctcatgagcgtctgcaccggctcgctcttcctgggtgagacgggcatcctgtccggcctctccgccaccacccacccggacttcatgaccaagttcgaaatcatctgcagcaacgccgctcagcgcgacatggccgaccgcgccgacgtcatggacgcccgctacgtygtcaacaacctgcgcttcgacctcggcgagaacgaggacgagaacccgtacttgttgaccaagaagcagtaccgcgagaagcgccgcatgtcgcagggcgggtccgctccttccagccccatcgaagagcgtgccaacggtgggcgccgcccgagcgctgctcgcaagggctccatcagcctcaagatcagcaacacccgccgcgagagcatcatcaagcgcgccaatytccgcctcggcggcctgsgcgtcttgacctcctccggcgtgctgtccggcattgacggcgccttgtacctcgtcggcgctctcgtcagcgaggagagtgccgaggaagtctccaggatcatgtgccacaaatggagcaagggtgtcgtcgtcgacggcactgacgtytagattgcttgcatatatatcatgcacaacaagacmcgaggaagagagaagaagaagcagttacatgtcagaatgcatgctgtctttcttttgaatgtgtaagctaagccggatcagcgaacaaggaacgctgtttttaaggcgagaaatgggatatgactacgagatgccmcctcgaagaaaagcgtacgaaaggaatgcgaatgccaaatgctgggaagggacaattcagctcttccaataaacccaaatcaaatcaaatcgaatgttcaatcaactt

SEQ ID NO: 928 - DNA, 1783 bp, Glycine max
  misc_feature (38)..(38): n is a, c, g, or t
  misc_feature (166)..(166): n is a, c, g, or t
  misc_feature (185)..(185): n is a, c, g, or t
  misc_feature (244)..(244): n is a, c, g, or t
  misc_feature (273)..(273): n is a, c, g, or t
  misc_feature (495)..(495): n is a, c, g, or t
  misc_feature (499)..(499): n is a, c, g, or t
  misc_feature (596)..(596): n is a, c, g, or t
  misc_feature (652)..(652): n is a, c, g, or t
  misc_feature (882)..(882): n is a, c, g, or t
  misc_feature (957)..(957): n is a, c, g, or t
  misc_feature (1116)..(1116): n is a, c, g, or t
  misc_feature (1125)..(1125): n is a, c, g, or t
  misc_feature (1149)..(1149): n is a, c, g, or t
  misc_feature (1185)..(1185): n is a, c, g, or t
  misc_feature (1351)..(1351): n is a, c, g, or t
  misc_feature (1362)..(1362): n is a, c, g, or t
  misc_feature (1384)..(1384): n is a, c, g, or t
  misc_feature (1435)..(1435): n is a, c, g, or t
  misc_feature (1451)..(1451): n is a, c, g, or t
  misc_feature (1554)..(1554): n is a, c, g, or t
  misc_feature (1575)..(1575): n is a, c, g, or t
  misc_feature (1600)..(1600): n is a, c, g, or t
  misc_feature (1609)..(1609): n is a, c, g, or t
  misc_feature (1611)..(1611): n is a, c, g, or t
  misc_feature (1626)..(1626): n is a, c, g, or t
  misc_feature (1670)..(1670): n is a, c, g, or t
  misc_feature (1686)..(1686): n is a, c, g, or t
  misc_feature (1693)..(1693): n is a, c, g, or t
  misc_feature (1731)..(1731): n is a, c, g, or t
  misc_feature (1739)..(1739): n is a, c, g, or t
  misc_feature (1742)..(1742): n is a, c, g, or t
  misc_feature (1746)..(1746): n is a, c, g, or t
  misc_feature (1748)..(1748): n is a, c, g, or t
  misc_feature (1769)..(1769): n is a, c, g, or t
  misc_feature (1773)..(1773): n is a, c, g, or t
  Peptide Sequence Number=SeqID_9145
  Probeset Number=SeqID_10707
cttgatgcgcgtcgcgctgactctcgtgagcgcaacgnacacgacggcgtcgtcgcgggctgctctgtgacctcgctcgtgttgttgtgcgtgctgtcgttctgtgtacgttggtctgtatgctcttgagtggcacatcctcatgtcgatggcgtgttacctgtcntctcgctgtcagggtgctntgcgttcacttgtcactcagtcctgtcactacacactcgtcttctctctgctcttcacnatttatctcgttgtagcggtcacctcgtntctattgtgccgtacactacatcaccttgcgcgtcggcgcggagtcggggctcgctgtgccgtcgtgctctgtggttgcatacctcgtcgtccggcggcggcgcaacacgtgggttgtggggccgtgctcaccgaggcgtgcagttgcactgtgtcgggcgtcctccatctctcacgcgtcggccgtggtgcgtgtgtgtcgtcgttgcatgtctcttcgtnatgntcgtgcgtagtgctctcgcctctctctttcacgtctggtcactctatcctcgatgcggatgcgtatgttctctcgtctctctgtgcgtcactcctcngtatgtgtacgactcacttgcgcgtgctctctgtggtgtcgtgcgagtggcgatgngcccttgtcgtgcgctgtcactgcgcctcctcacgcggcgacgcgtcaccccacatcttctctctgttgcggttgttggtcatacgatggtggcgactgcgtctccgcttcgcagtcgcccgcaccctctgcagctcacctctgtctcttctatatttatggtgttgtcatgtcgatctacatccctcttctacatcccactctacgctgcagtgtgttcgctctgtctntctgtgtgcgcctgcgcgtgagtatctaggtcgctggactatgtctcggcgcaggtgtctgttgattgtttcgcngttgctcgctcgtctcttcatgcgctatgtgcgagttgtcggtgcctactgcacactcatacgctcggacgactctcgtcgcgtgtgacgaggtggtggccagcgtccttgtcgtcgcttggcgctgtgctcctcccacggcggtgctgccatgcgtcncgcgcgcgngcacgcacatgcactgcacgcgcnggtgagcgctggctatgcaccgctggcatgctgcancgcccgcgccgcccgcgagctcactgttcactctcgtggtggggtctcgcttgtcttcacgcagcacgacatccgtgttctcctgttggtggggcgggctgatttaccgtccatcgtcatgcgcgcctatagttgtggtcgtctctctatctctcgctcgcacgcntctcctctcgncacaggtgggcgagtgtgggtnctctcttactcctgctgagagacggggagaagatacatactggcgttcgancccttcgcatcatccngaccagctactctgtaggtttgtcttttgcgctctcgtcggcacttatcatcttctaccctctctgcggtgctgccgtggcttgctactcatctatcctgctnttgtgcgtggtgtagagtctngtgcggtcggcggggatgcgagtantatgagggnanattgtgttcttcttnttcttctctcttttctctatgtcgctctagtgttcttccctcangatattcctgcgtgtngtctatntcgtgtagtctccgtcgcgcatctgcgttcgttggttnttcttgtnatnaaanantcgaaccccacgtcttaaccntaantttaaaataa

SEQ ID NO: 929 - DNA, 1398 bp, Glycine max
  misc_feature (26)..(26): n is a, c, g, or t
  misc_feature (100)..(100): n is a, c, g, or t
  misc_feature (593)..(593): n is a, c, g, or t
  misc_feature (832)..(832): n is a, c, g, or t
  misc_feature (1069)..(1069): n is a, c, g, or t
  misc_feature (1289)..(1289): n is a, c, g, or t
  Probeset Number=SeqID_10708
aatatatcattataactgatcttttntttacaataataagagagaacaacaaacaacaacgatgacgtgacctaagaggaggagggggtgtggagacctngtccctccaaccaaatccctccaacccccagaacaaccagatgccaaaaaaaaaatgtaattgaggtctctacacacaaccaaacaagtccgctcctaggtttttcatatatgatttctcatatccatacttatacactttagtagataatcacaccacagtaatatagatgaacgaggtcaggtacccaccttagcttataacacacatatttttatcccacactacacgcccagtatggagcacggggggcgcagcccagcgatcgtgatcatcctcacgtatgttggctcatgtgcccacatacgcctccaccccctccaccaccacatccctcacaccttcaggagcgccattgttatctaatataggtcttcaatcattaccctcctccgctctgttcgaccagggccgccctctccctcctttatagcgtacgcaacgcccccacacaagcgctacgtgcgccgccctctctgtcgcgcggtggacngaataacgctctctacgatgtgctatacaccctacagactaaacaccagactactaaaacacaaaataaatacatacacaactccacatataacgtgaacaacaaaatatatatatataatacggcacccaactactaccgacaggtagaactgtactaccgatgacaccatagattacaaatatattaatatacacggcccatcgtctaatacaaatgctattctctctctgcaatancattcatctacgctactatctcctcctcattctatgccacgggtaccgccatgaaacgaactagcctatgtcgtgagtaatgtacaccacacacgtacacgcagcaccatacacaattaagccacaacatctatccgcacgagcagacgagggcgaggatagaatgaagcacaccaccgaaccgcacctccaatgaaccatctcaacaacgcgaccttcacatatatctaaatctanccatatctcctccctcccacaacagaaatggtcacagtctacctctctcggcgtgcccatcagcactccaatgccataatcaccacgacagcccactacattatctggatcacaatcacaactacctccgacgtaccgcgagagctctgtcatcatctcttccttgttctcccgcccctgcacattctgatctatgcactacacgtaagagtacgcgtgngccatcactcacactcgacacgacgacatggaaccgcaccacctctgcaaatgagcatccacccatccaattctgtctgtatacactctaacgtaccgcacatctaacg

SEQ ID NO: 930 - DNA, 1428 bp, Glycine max
  misc_feature (78)..(78): n is a, c, g, or t
  misc_feature (203)..(203): n is a, c, g, or t
  misc_feature (599)..(599): n is a, c, g, or t
  misc_feature (605)..(605): n is a, c, g, or t
  misc_feature (990)..(990): n is a, c, g, or t
  misc_feature (1100)..(1100): n is a, c, g, or t
  misc_feature (1125)..(1125): n is a, c, g, or t
  misc_feature (1143)..(1143): n is a, c, g, or t
  misc_feature (1176)..(1176): n is a, c, g, or t
  misc_feature (1290)..(1290): n is a, c, g, or t
  misc_feature (1372)..(1372): n is a, c, g, or t
  Peptide Sequence Number=SeqID_9146
  Probeset Number=SeqID_10709
gtagtttgttgttattctatttgtctcctttgcgtgctctcgctccactgcatagattacttatcggtgtaactaacnccctcatatagagatggtggagcagacctctcgccgggcggggtggagcggcggcgcgcttatttacgtaaaataagataggcactccccgcgcggcgggactgagaaggtcaatctactctttntagtcttcttgttctgtctgttgggaaaagaaatatatctgtatacctcgcaacattgatagatagaggaactagatcatcactacgcacttataataggaggtagtagtattcagatgtctcccattatcgtcgtatctacataagtcagacctaagctataattgtacatattgctatttacgtagggaggagcaccccatctgacaatatcaaatagacggctccgtgtaaatctatagagataattattaaagtgtagtagaaatggtactagaaagactcattacacgagctcttaacagaaggcattggacggtgcgctttatcgaacttctatcatggtgagtgtatttatatctttgggatgtcgaacatgaagcatagagagtcaantcatgncgtacatacaagcacagagactataggacatttaatacctatgcagatggttagacattcgcatcacatacattgcgtatatatggtcgctcgtcacaatggaacatgtgtatcaataaagaggcagtatcacatgagaatcatataaaaaactagtctactcatgtaagtaacctaccaccccctttgtgtggaaagcgctataatatttagtcggtacgtgaacatagtagggatactaacattggtacttgtgtgtgtatagtgaatataatttgttggaacgagctaatgaacattattaacacttctgtagatctagaagagtatttgctgtcgatcgctgtgtgagggagacatccctccctcttacactatgtgcgcnaagtcgtataaagaacaaatcaaccactagagatagagataggaagagatgcatgatatcagatcattatcgtaggtgcacgcgagtatatatctatgtcatagactttntatgtgttaccagccggctgaccgnacaggaataactctcctnctgagtgagcactgtggagtatacatgagtaanccagtactatctccgaattatcctgtcagcagacagcgtcgctaagtattcttgtgtaagtcgcgcgcgacggtagtttcatgatcagttagtagctgatgtccacactctcantatacatgctaatctgcgcatatagagcatgccgctcatcttatattctacagatctgaatcatcgagtctgacagacgggntgacctacctgtaactttttctgtgtagacacatatagctcacagcgtctcgcgcg

SEQ ID NO: 931 - DNA, 743 bp, Glycine max
  misc_feature (551)..(551): n is a, c, g, or t
  Probeset Number=SeqID_10710
tcgactcgcacttccaacatgtggcgcccgacagtgttccaacagtgtcatccagcgcatatagcctccttaagctcctccgtctctctgcaagtgctgcacggttacattcttggcgatgctcgcagctctatgctagcctatcccacgacttctcaacatgggtgtcttcaggatgtgcaaaaccgcttcttcaaacctacgaccatacaacacgcaatcacagcttaacatcttacctttatcagccttgttcctccaccaatcatcagccctatcacactacttaacctttggctcatttattgtcccaacacataacggcacaacaactacaacaaccttgcgctacaaaaccttgctacctactctcaccatcaccactttcttccattcaaccaaaactggggagttgaactctgcttcttatttgcaacaacaacaactaccattcagccagctacctgctgcctacccccagcaatttcttccattcaaccaactggcagcattgaactctcctgcttatttacagcagcaacaactactanccattcagccagctagctggtgtgagccctgctaccttcttgatacaaccacagttgttgccgttctaccagcacgctgcgcctaacgctggcaccctcttacaactgcaacaattgctgccattcaaccaacttgctttgacaacccagcagcgttctaccaacaacccatcattggtggtgccctctttt

SEQ ID NO: 932 - DNA, 700 bp, Glycine max
  Peptide Sequence Number=SeqID_9147
  Probeset Number=SeqID_10711
gtaaaacaatgtgcttgtaattctttcttcatgccatctccttttttgttttttcgtcaaataccttgcttatttacctgtaatttctctgatattgtacaatgatctaggtatatgtggcttttcgtctttctcgcatatatcttggaatatctttaaattactttacttcactttgaaacttcttccttgtcttcctttcccggaatcactcaaaatcttgaattctttatattctttcggtcagactcacatactgtatatcttctcatttgaggcggatagggggtcagcgcggcaggggagttggcgtaatgttggtcttttcagcgtttcggtacgcttttttcgccttttgaaactctctgatttttctcgggacacttttctttcgtatatttatttggtttaggttttgtttagcttttttttggtcaaagatgccactttttaggacactctctccaagcacaattgttaagccacagttcattctcttcttctgtcttcttacggtctttcttggggggctatctcacgattctcccgtcttgaggggtcttcttcatattcctgtatagcatagggctcggctatctgatctccaggatggatcttagtgtgcgctacatgatggtattcacatcattgattggttctttcctgcacacgatgctagacacaggaatttttattcatt

SEQ ID NO: 933 - DNA, 1672 bp, Glycine max
  misc_feature (74)..(74): n is a, c, g, or t
  misc_feature (100)..(100): n is a, c, g, or t
  misc_feature (107)..(107): n is a, c, g, or t
  misc_feature (120)..(120): n is a, c, g, or t
  misc_feature (137)..(137): n is a, c, g, or t
  misc_feature (234)..(234): n is a, c, g, or t
  misc_feature (241)..(241): n is a, c, g, or t
  misc_feature (280)..(280): n is a, c, g, or t
  misc_feature (352)..(352): n is a, c, g, or t
  misc_feature (356)..(356): n is a, c, g, or t
  misc_feature (363)..(363): n is a, c, g, or t
  misc_feature (467)..(467): n is a, c, g, or t
  misc_feature (481)..(481): n is a, c, g, or t
  misc_feature (483)..(483): n is a, c, g, or t
  misc_feature (490)..(490): n is a, c, g, or t
  misc_feature (531)..(531): n is a, c, g, or t
  misc_feature (704)..(704): n is a, c, g, or t
  misc_feature (881)..(881): n is a, c, g, or t
  misc_feature (906)..(906): n is a, c, g, or t
  misc_feature (1006)..(1006): n is a, c, g, or t
  misc_feature (1205)..(1205): n is a, c, g, or t
  misc_feature (1245)..(1245): n is a, c, g, or t
  misc_feature (1341)..(1341): n is a, c, g, or t
  misc_feature (1356)..(1356): n is a, c, g, or t
  misc_feature (1359)..(1359): n is a, c, g, or t
  misc_feature (1364)..(1364): n is a, c, g, or t
  misc_feature (1377)..(1377): n is a, c, g, or t
  misc_feature (1380)..(1380): n is a, c, g, or t
  misc_feature (1386)..(1386): n is a, c, g, or t
  misc_feature (1404)..(1404): n is a, c, g, or t
  misc_feature (1412)..(1412): n is a, c, g, or t
  misc_feature (1430)..(1430): n is a, c, g, or t
  misc_feature (1432)..(1432): n is a, c, g, or t
  misc_feature (1543)..(1543): n is a, c, g, or t
  misc_feature (1548)..(1548): n is a, c, g, or t
  misc_feature (1561)..(1561): n is a, c, g, or t
  misc_feature (1568)..(1568): n is a, c, g, or t
  misc_feature (1595)..(1595): n is a, c, g, or t
  misc_feature (1625)..(1625): n is a, c, g, or t
  misc_feature (1629)..(1629): n is a, c, g, or t
  misc_feature (1647)..(1647): n is a, c, g, or t
  Probeset Number=SeqID_10712
tgtggtgtggtggtgttggaggttcgtgcttctctggcggcgctcgcgaaagttaatatgttttagaataacanacgtatatgggatcgcgcgagtacgnactagtngaataaaacgctngacctcttctactcaancacgcacctcctacgcagtatatagaatacatcaacggccgcatagatagagtatatacacagagaaagacacaaacctcatgtattagtagtgagntagacgncggagtgacagaggaactttatctgagatatacagtatnctagcacacgcccactacacaaaccacacgcgtcctccgcgtatatagtgtaatatatatatattcccactngtancttgcgntgtgtgtacatatgcatctatatgtcatgtctacagctgaatgtttccgtattctcgcaactacgcgtactaatatcacccagaagaaactatgcaactatctnctttcattcgcctngnggtgcgncgtcgcgcacggacgccgaatctgcatcgcgctctgggcanaggccacacgcagatcacctaaatgatgtaagtatatacgcagcttgcatcttcctctaagcagatctgttatagctcaatacaccatgacaacgtagactcgccaacgacacagcagcaccgcactctagacatagacgaaatgcatgcacgctatattagatatgactgangctgcacatgatagactactatgcacatgtgatgatatatatatctactcgatgtatcttgttgtctctacttcagtgtgagagtcatcgatatatatctccgtctgtcacttgttatatatgtgtgtgtgtgtatatactaatagatactatgatatacatatctcgatacatctnacatactccgtgctacttatatagnctcatagacgcactcacgacaataggacagagaagtgtatacattatatatcgcctgcgcgcatagtcatcgtggtagtgatattatctatgtcgactancgcatcgttacgataatatctatagatagagtgcacaatatatatatgattacgtagtcttacatcatctgcatcgatcaatgttgtctcgatgaatactgtaatcaactatcacatatagcgacactgcacatagttgcacaagctcgattagttgtcgaggtgctagtgtgaatgagacgtctgcgcactgctacgnagtgtgtagtcactgacgtagctactatcacgagctccanctgatcgatatgtgcatgatgtgcacgtgtgtcgtgcattggatgagtagtattatctgcacctaatatatacacgactaacgccagtgcgcttcncgctatgatgatccngantatancagagtgatgganacntgtacntgtgtgtagtgatcgtgncagacgcnactcgctctccaccgtantngagatgctatcgtgagtcgttgactagagcagcgagtttcgcactctctctatcttgctcgacgctacgcgttcacagtcatactcacgatgaatgtatgatcgtagacanctcanagcactatacgcntctacanacacgctacgacgccgcacgatcacgntctactgtcagcagaatgtgatatcgacgntcgnatatagatcacattcatnacacttacatgacgaggtactagag

SEQ ID NO: 934 - DNA, 1798 bp, Glycine max
  misc_feature (232)..(232): n is a, c, g, or t
  misc_feature (514)..(514): n is a, c, g, or t
  misc_feature (524)..(525): n is a, c, g, or t
  misc_feature (943)..(943): n is a, c, g, or t
  misc_feature (1151)..(1151): n is a, c, g, or t
  misc_feature (1209)..(1209): n is a, c, g, or t
  misc_feature (1261)..(1261): n is a, c, g, or t
  misc_feature (1324)..(1324): n is a, c, g, or t
  misc_feature (1332)..(1332): n is a, c, g, or t
  misc_feature (1363)..(1363): n is a, c, g, or t
  misc_feature (1372)..(1372): n is a, c, g, or t
  misc_feature (1420)..(1420): n is a, c, g, or t
  misc_feature (1665)..(1665): n is a, c, g, or t
  misc_feature (1669)..(1669): n is a, c, g, or t
  misc_feature (1682)..(1682): n is a, c, g, or t
  misc_feature (1714)..(1716): n is a, c, g, or t
  misc_feature (1721)..(1721): n is a, c, g, or t
  misc_feature (1724)..(1724): n is a, c, g, or t
  Peptide Sequence Number=SeqID_9148
  Probeset Number=SeqID_10713
gttggtgccacctaccacgggacgcacatatatcgtgccggtagcgattgtcgcccgccgagatgccgcgcgcgcgcgatgttgctctgttgtgtttcgcatcacacgttacccccgtacattataatacattgtagaatatgcccatctactcacgtagcgtcgcaaaatatatgaatggtaaactatatttatgtagacgaggcggcagccaccacacaagcatagtgtngagtcttatcgaacaccacaccaatcttatcataacacactatattcgcgccactcaatagtttattactacacggctcttattatctgtaatttgttagtgcgccgcatcgcatccgcggatatataatcggcctgactaatagatgacagataatccgtctactcccgacgccgcctactatttctataattccgccatcgccgtggtgatgagatcgtcttgtgtcactatcgcgcgcccgcgttatagaagaaacggtgccgggtgctagcgcacacngccgccggcnnccccaaaaacaacaaacaaagaaaatatgttatattcgaagtggaacgtaggggagagaatcatttgcaatcgcatagaacatagcgcggcgcgcgcgcgcgataatattaaatatattagcgaccactcgcgtaaaagagtaaaccgcgtgtgcacgcccgcgtgaatgaagatctcatgtcaatctgttgtcgttcccggccgctcttatatatatattgggcgcatgaataggatatatgatatggtgggcgcgggcgcgggataataaataaggcgggtgcgttgcgagcgagaagtagacatacacgctggagctgtaaatatgaccagtgtcacgtgttgttgtcacttgtacaagcgtcgtggtggtgagatcataaatcttgcgcgaaggttgtggcaggtgttataatnattatcgcatatcgactaataactagatattgttatgcagtcgcaccccagacacttatttatgtaccgatccaaacacggccgtcttgtcatctctacttacgcttcacatgtgtatatgttatcgcgaacagagaatactgtttccggccagatcagagatgtctggtgttatgcttcgtgtacgcgtaacatagagagcgtgcgntggcgttaatcatatcgtcaacatatatatacagcgagcgtccacagtacgtgagagnaccatacatcctagcatcgattattactctatcacgcacgccacagtatacntgatgctcgcgtcctgtatattatctgataatataatatataaagcgggcggagcgaggtganacaataancgcggcccgagctccgacggcgtgatacacncgtcgtgtngtgagaatcgagccgctcgctgcgtccgcggcaccgcgctggaggatnatgatgtgacatatgaataggagctggcgtggtgaatcactcatgccgtcgtgcgcggcagtgtatgcgatagcgtcatgagacagatataacagagctgtcgacggacgcagcgcggcgggataaatgggtaacaacagcacactgataattgacgcatcgccgtgtggagttatgtgcgcacgcgtggcatcatcacacgtgacgcgctgtattgtcacgggcgcgggcgcgggcgcaggganaatngtatatataatancgagcgtacggagcggacgcgcggagaacacnnngaatntantatacgatacctatcttctagtgattcacacgaatcatataacgcgacagcactcggcgctactcgtcacccgg

SEQ ID NO: 935 - DNA, 620 bp, Glycine max
  misc_feature (601)..(620): n is a, c, g, or t
  Probeset Number=SeqID_10714
ttttttttttttttttttgcattgaggcaaacatctaccatgttttcttcttattactgacttaggctatttctccaaagctcaataacaccctgcagatctttcagccgtgcaggcctgacaaggtaattatcaacaccggactcgtatgctgcattacgatctttcccactcacaagcccagtcagtgcgcatatgtacgtcctatcacgcttcaatcgtgcttccatctcacgaatctccctcgctacatcgaagcccgagacctctggcatcgagagatcgaggaagataagatcaaaaggttgcgcagcttcaccgttattcggttccatggtgcttttgaatgcatcaatggcttcctgaccaccacctacagacgttgcaggcgttttgctacatttgcgtgcatacatggtaagcaccttaagattgacagcgttgtcgtcgacaagcaatagtttcggctccgctgcgagtgctttcaatggcgtagtcagattcggctgttctacttgcactatctgtattggtatgttctgttctggtggccgtgcttcgatgggctctctcgatgcttgtacttctgaagttctggacnnnnnnnnnnnnnnnnnnnn

SEQ ID NO: 936 - DNA, 474 bp, Glycine max
  misc_feature (322)..(322): n is a, c, g, or t
  misc_feature (441)..(441): n is a, c, g, or t
  Peptide Sequence Number=SeqID_9149
  Probeset Number=SeqID_10715
acatattgttcttctcggttagtgataaacaacaaaatggcaatgtgcaaatcaattaaaccaatggctcagatgttgctattactactagcgattcattggcatatcttaactgttggttcaacaaccgagacctctgcctcattcgccaaacatagttccgtcaccgtaaataaaccgtcttctgagatcgattttatagtttggcggcgagagctaagaggtggtggaggaggaggtcgtggtggtggaggcggtggaaggagtggtagcggcggtacaagcagcggtaactgcctcaagcactatggtctgtccaaangcctattattcatcggtatattaagctatttgcttggtgtatggtagaaagttttaaaaggtcatttaactttttaagaaaaactaaataatgtatcaagatgttgattatgtggtttngtgcactgatgcttgatttgtaatactcttttc

SEQ ID NO: 937 - DNA, 499 bp, Glycine max
  Peptide Sequence Number=SeqID_9150
  Probeset Number=SeqID_10716
gcagataggtcagcaccggcgcgcgctccaccgcacctcgaagaatgcctcccgtgtcgctcgtttccacttcaccggagacatggatgcgtaacgcgtccagcggaccttccacttccagccagtgggtgaggttgccgtaggcgtcgtcgcaactcctcagtcggacctcgccgtccgcctcaactcgccaccgtacaatgtgttgggaagcattgggccggggcgtcaggcgcagaacctgcaccgcagaccgaatgggagcgtcgtagtgatactcggtggtgtgttcgatttggatgcgcatgagatcagttcagatattgctcagtgatagccgtcgtcagcatcccgtgctctttcaggaatacttcaatgaattcgtgcagaccttggtcgaacacggtggctatatcgagtccgcttaacttggccgatgttgcgcgagctcgcttttgactttcacctcgacgtccataggtgtcgctgaggagatcga

SEQ ID NO: 938 - DNA, 2084 bp, Glycine max
  misc_feature (1)..(1): n is a, c, g, or t
  misc_feature (62)..(62): n is a, c, g, or t
  misc_feature (124)..(124): n is a, c, g, or t
  misc_feature (127)..(127): n is a, c, g, or t
  misc_feature (135)..(135): n is a, c, g, or t
  misc_feature (174)..(174): n is a, c, g, or t
  misc_feature (229)..(229): n is a, c, g, or t
  misc_feature (259)..(259): n is a, c, g, or t
  misc_feature (263)..(263): n is a, c, g, or t
  misc_feature (275)..(275): n is a, c, g, or t
  misc_feature (283)..(283): n is a, c, g, or t
  misc_feature (296)..(296): n is a, c, g, or t
  misc_feature (305)..(305): n is a, c, g, or t
  misc_feature (309)..(309): n is a, c, g, or t
  misc_feature (353)..(353): n is a, c, g, or t
  misc_feature (361)..(361): n is a, c, g, or t
  misc_feature (377)..(377): n is a, c, g, or t
  misc_feature (379)..(379): n is a, c, g, or t
  misc_feature (384)..(384): n is a, c, g, or t
  misc_feature (389)..(389): n is a, c, g, or t
  misc_feature (391)..(391): n is a, c, g, or t
  misc_feature (393)..(393): n is a, c, g, or t
  misc_feature (418)..(418): n is a, c, g, or t
  misc_feature (427)..(427): n is a, c, g, or t
  misc_feature (468)..(468): n is a, c, g, or t
  misc_feature (484)..(484): n is a, c, g, or t
  misc_feature (487)..(487): n is a, c, g, or t
  misc_feature (489)..(489): n is a, c, g, or t
  misc_feature (505)..(505): n is a, c, g, or t
  misc_feature (512)..(512): n is a, c, g, or t
  misc_feature (522)..(522): n is a, c, g, or t
  misc_feature (571)..(571): n is a, c, g, or t
  misc_feature (593)..(593): n is a, c, g, or t
  misc_feature (670)..(670): n is a, c, g, or t
  misc_feature (690)..(690): n is a, c, g, or t
  misc_feature (785)..(785): n is a, c, g, or t
  misc_feature (820)..(820): n is a, c, g, or t
  misc_feature (827)..(827): n is a, c, g, or t
  misc_feature (872)..(872): n is a, c, g, or t
  misc_feature (945)..(945): n is a, c, g, or t
  misc_feature (1036)..(1036): n is a, c, g, or t
  misc_feature (1103)..(1103): n is a, c, g, or t
  misc_feature (1112)..(1112): n is a, c, g, or t
  misc_feature (1146)..(1146): n is a, c, g, or t
  misc_feature (1188)..(1188): n is a, c, g, or t
  misc_feature (1201)..(1201): n is a, c, g, or t
  misc_feature (1245)..(1245): n is a, c, g, or t
  misc_feature (1304)..(1304): n is a, c, g, or t
  misc_feature (1309)..(1309): n is a, c, g, or t
  misc_feature (1442)..(1442): n is a, c, g, or t
  misc_feature (1507)..(1507): n is a, c, g, or t
  misc_feature (1519)..(1519): n is a, c, g, or t
  misc_feature (1530)..(1530): n is a, c, g, or t
  misc_feature (1546)..(1546): n is a, c, g, or t
  misc_feature (1616)..(1616): n is a, c, g, or t
  misc_feature (1636)..(1636): n is a, c, g, or t
  misc_feature (1749)..(1749): n is a, c, g, or t
  misc_feature (1754)..(1754): n is a, c, g, or t
  misc_feature (1757)..(1757): n is a, c, g, or t
  misc_feature (1766)..(1766): n is a, c, g, or t
  misc_feature (1788)..(1788): n is a, c, g, or t
  misc_feature (1827)..(1827): n is a, c, g, or t
  misc_feature (1830)..(1830): n is a, c, g, or t
  misc_feature (1832)..(1832): n is a, c, g, or t
  misc_feature (1922)..(1922): n is a, c, g, or t
  Peptide Sequence Number=SeqID_9151
  Probeset Number=SeqID_10717
ntacgatgaacaaacaatggtcgatatagatgccgacactagcatcgacggtcagctcacantacgctcagtgacaactatgtacgactctacaacagcatcgtcgtcatctgctgtgtgtagncgncgatgctnctcatacggcagcgtcaggtgtagtcagattcgacgttnggagtcgagacgctgcagcatgtagctgtactacgagtcccttacacagatgagngcccatacgacgatcgtcgtagatggtagntctncaggttggtagngtagagtngtttcgcgtgagnagaagtagngtgnagacagtctactattgttctgtatcgctgcatacgcacatcgcnacgaccgntgtatcattgccggtnangtatnagtcnangnaagtgagatgatgctatgcagagangctgctatntcttgctcagtgcgatgtcgactctgagcgtcataccatcntcagcgtcgtctgcantgncngatgacgatcgacgtntattcancactgaccgnacacgcatcgttcagctcagcgctctcgaatgtgcgtacgtcgtcacantcgttcgtctacgtatctcgtnatatcgcaactagtcatcaccgtatatgtatctgagagcgtagtacgtcgattcgtatatacacatcgtacgtctgngcatcatctatctcgtacgntagtagtagtgcgatctgtctgactgctcaatcgatcgctcatacgtccgctgttgtgaggcgatgccactctagtgctcacatcacatcgcganagcacatagacgatgtgatcggatgagtgacttgnatcgaantagcgtgcagtagatagtatatggagagttcgcgatagtagtatncagcaatgacactacatatcacatgtgcatcgtgacgctatgatctctagtggcgcactgcgtgtcggcacanatcagatctcgctgctccgcgagatgcatatcacgatatcacacactgcaactacgaatgagatcgagcgaacatctgatatctgcattgntgatacatccgactagggcactaatcagagtacatcagtcgatacgtggagagatgtcagttcctcnatgtagcgnggcacatggaccactcacacaatcacacatagcncagtcacgctcagagacatccacatgggacacactcaatatntcaccacaacacncgcgtggcttctgttgcacagtaactgttactcgcatagcgtcnggagcctcacgtacgcagtgtctcaagagtacgtcaggcggatcacatgtcgacacgcngatcntctcgtacgcggttcattgctcggtcgtctcatccaccgcttctatgctatacgcgctcgcgtcgtcgcgtgctagttggcggagtcatcacagcatagagacaggaagaaagagtataagtgaatagagtanactctagagagtggtcatatagttgtgatgatgagagatggacaggatacatctttaatgatgtntcgttagagcantgtgtttatangttcgctgtactgtgntcatgcttacacgcacatcatcgtcgattgctctatgatcaatgctaataatatacgtcatgtggaaagnaggtcgataccgtcgtaatnaataattacacatcgtacagagacatacgaccatgagagctacaagtcattcaatctgagacacgtcgctgctgcgtatgttcttggcacacttccgtcgtgaagcgacaacnagtanaanttcctattnctgctattttgatggtgcggcngttcaatacatcatctcatagtgataacgcactactcanaantnacctctctcgcagtcacagtcggcagatgtcgcggggagatgcgatagtttagttatggaaggcacattagagaggcaccgggcgcgcgngccgcgcttcgctcgtgttcgcgcggacagacgtcactgccagcttcgtcgacgcgccaccatgccgtcgccgctagtcgagtctttcaaagcagatacgcgctctctcatactctctacgtcacgcgggtgcgagtaaactaggcgctcactgatgaaaag

SEQ ID NO: 939 - DNA, 616 bp, Glycine max
  Probeset Number=SeqID_10718
taaaagggcatcctcctcaagagcaagtaaagggaaccttgcgcccgcccgtgttaaaccaggtaaagttgagatggaaaaggctttaaaccgccaatcccatgaaaccaccaccccccatggttgagccccggagatccaatcgcgggatccagcccccatcaagccttttagaaggattgcagagctctttgttcatctcaaagattccttcggtttcccataatcgtaatcccaagagttaaatggaagggggcttccaatgattatgatgcggccccttaaaagcccggcctgttatttaaatgccccccacccctagcataaatgggtatatttataaaaaagaccccccctaggaagggaaattcttgcttcctatgtttcagtagccggccggtcaaatttgattttaggatttatttaaatttgaatgtgattccccccaaaggctgggcggtaatatggatattctcccatgttcccttgtttgtaaaggtttgttcttccaatgataacatgaacccgatgttttactttcctctaaaaaaaaaaaaaaaaaaaaaaaaaaaaaaaaaaaaaaaaaaaaaaaaaaaaaaaaaaaaaaaaaacaaag

SEQ ID NO: 940 - DNA, 430 bp, Glycine max
  Peptide Sequence Number=SeqID_9152
  Probeset Number=SeqID_10719
acatcaagcatatagatgtagtattcctgatatgctactcgcccctacaaagggaggttctatggattgcggacggacttgatatatgatttactgcgggttttaagctagaaatctgcaccaccgcccgagttggacttctatctgatgacacacgtatcttcatagagaatagcctcacagttacaagggcataattggccacacaacgaagcaaagctgtgaacactttctatgttcgcggcgcttcatgtttccctgttgattgcaataccatataatccatatggcaaacaattggcatcgcaattcttaaagtctacggtatcccctgccagatgaaatctgatactcaggattctcccaccacatcactctttattggtcttttcaagaccacatcttttgtgaactttgggttggtgaattc

SEQ ID NO: 941 - DNA, 1950 bp, Glycine max
  misc_feature (1)..(1): n is a, c, g, or t
  misc_feature (88)..(88): n is a, c, g, or t
  misc_feature (95)..(95): n is a, c, g, or t
  misc_feature (140)..(140): n is a, c, g, or t
  misc_feature (142)..(142): n is a, c, g, or t
  misc_feature (205)..(205): n is a, c, g, or t
  misc_feature (220)..(220): n is a, c, g, or t
  misc_feature (244)..(244): n is a, c, g, or t
  misc_feature (261)..(261): n is a, c, g, or t
  misc_feature (336)..(336): n is a, c, g, or t
  misc_feature (341)..(341): n is a, c, g, or t
  misc_feature (365)..(365): n is a, c, g, or t
  misc_feature (402)..(402): n is a, c, g, or t
  misc_feature (415)..(415): n is a, c, g, or t
  misc_feature (505)..(505): n is a, c, g, or t
  misc_feature (547)..(547): n is a, c, g, or t
  misc_feature (586)..(586): n is a, c, g, or t
  misc_feature (590)..(590): n is a, c, g, or t
  misc_feature (624)..(624): n is a, c, g, or t
  misc_feature (631)..(631): n is a, c, g, or t
  misc_feature (673)..(673): n is a, c, g, or t
  misc_feature (711)..(711): n is a, c, g, or t
  misc_feature (834)..(834): n is a, c, g, or t
  misc_feature (911)..(911): n is a, c, g, or t
  misc_feature (927)..(927): n is a, c, g, or t
  misc_feature (943)..(943): n is a, c, g, or t
  misc_feature (953)..(953): n is a, c, g, or t
  misc_feature (1131)..(1131): n is a, c, g, or t
  misc_feature (1141)..(1141): n is a, c, g, or t
  misc_feature (1154)..(1154): n is a, c, g, or t
  misc_feature (1162)..(1162): n is a, c, g, or t
  misc_feature (1358)..(1358): n is a, c, g, or t
  misc_feature (1560)..(1560): n is a, c, g, or t
  misc_feature (1662)..(1662): n is a, c, g, or t
  misc_feature (1665)..(1665): n is a, c, g, or t
  misc_feature (1667)..(1668): n is a, c, g, or t
  misc_feature (1671)..(1671): n is a, c, g, or t
  misc_feature (1682)..(1682): n is a, c, g, or t
  misc_feature (1693)..(1693): n is a, c, g, or t
  misc_feature (1758)..(1758): n is a, c, g, or t
  misc_feature (1819)..(1819): n is a, c, g, or t
  misc_feature (1917)..(1920): n is a, c, g, or t
  misc_feature (1922)..(1925): n is a, c, g, or t
  misc_feature (1927)..(1930): n is a, c, g, or t
  misc_feature (1934)..(1934): n is a, c, g, or t
  misc_feature (1941)..(1941): n is a, c, g, or t
  Peptide Sequence Number=SeqID_9153
  Probeset Number=SeqID_10720
ncacatcatcactatatcgatcgtactacgtcatcatcatctggtattcgtagatctatatgcagacggagttcgtctgtgtgtacgntctgtgnctgtgtaaacgtcatatcgacatgatatgtcatgagatacatagntnatgtgtagtagtgataatgatgtgttgatgcagtgtagtcgcgcgtactgagatagtcatcanatcagttcgctcagntatagctgagctgcactgtcacangtcggttcagcgcatgncatatatacatatgtaacatgagcatcctcaagtgatatcgtgtctgacgtgacactgagacagcacgtgtagtncgtantgtatgcgctcatgttaacttcgngttgctaattagttatgtgtgtaaatgtcagtctctntatgtgtatgatntctatgctgatattcatatagtgataagagtgacgcacatgcatcatgacggttatatagtgtgacgtggctatgacgctactcactagncgtctatgcgccggagtcgagaacacgtattgaggtagtganatgttgcagcgcgacatgagagtcgacgtcgagagacantganagagagtagtacgtgtgtgccatagtcggtctanagagacnatgcaatatccggggagagttacttgtcacacgatatatcanactgcacagattacacatgtcaacacacgtgtgcacgnaacgatagagaacgacatcgtgcatcacacccgcagcccgtgcacaccgagatcgatcatggtagtagcagacgcgagtgtcgcagactctcaagcgaagagagcgcagagcgaggtgctagncgcagtcgactcatctcacgtgtgtgatctcatatctatgtcacagcagcgtcgagaggcacatatatcttggcagncgatagaataattacnaagcgatcgcggagtnacgtctactngtcgtacgaagagagtatgcgtcgcgacacgagcgttgatagaggtgacgaaaaatatctatcatgcgctactctatcatttatgttagtagtcactggatcatatgcatacacgtgtctgagtgtcgtacgagagtcagtggcctatgcgtgtcatgtaagatacgtacgttactgncgacgactcngcacgaagatagncgaagcanaagcgatgctcatgtttagctgctccttgtctcgtacgctagacgctgtatattgtatgtccgccgcgatctcatacgtctcgcgtgctgcacagccgattgcgcgcacgtgatagctatatgccggcatgtcgctgtattccgccttagctataacagtacttcaactgatatatctatataatattctactcangattgtttcgatatggtttgtggttcatgagatataagataacaggtcggagtgtggtgagataagcgtgtgagtcgaatgtagagagtgatacgcacgcaatggtaaagcagagcaaactggcgagttatagagacgagggagggaggacaaggtagatacacaacaccgatatgccacgctcacttcacacagcacgcgncgcgtctgcgctacagcgattcttcttcttgtcgtgtcaatcagattatctagcgtcgataacgacactacacgtgctagtcgttcgtgtcgtgccgcctantcncnntcntccttgcgttnataatgtctanaatcacatcacctactctacagccatataccatcacgacgagttaagcacgcctcgtgtcgcgcnatgcgcagagtagtgctgcgtctgattcgcgtccgcgcgagtaggcaagtcctgggcggcntattaagtagggttttgcgttgcgtctttgtattcttcatctgtatctgtcgtatcctgtcagatgttcgccgtcgtgtatgtagatatataggaaannnnannnnannnnaaanaaaaaanaaaaaaggg

SEQ ID NO: 942 - DNA, 2237 bp, Glycine max
  misc_feature (1)..(1): n is a, c, g, or t
  misc_feature (86)..(86): n is a, c, g, or t
  misc_feature (94)..(94): n is a, c, g, or t
  misc_feature (172)..(172): n is a, c, g, or t
  misc_feature (226)..(226): n is a, c, g, or t
  misc_feature (301)..(301): n is a, c, g, or t
  misc_feature (446)..(446): n is a, c, g, or t
  misc_feature (455)..(455): n is a, c, g, or t
  misc_feature (461)..(461): n is a, c, g, or t
  misc_feature (477)..(477): n is a, c, g, or t
  misc_feature (514)..(514): n is a, c, g, or t
  misc_feature (688)..(688): n is a, c, g, or t
  misc_feature (699)..(699): n is a, c, g, or t
  misc_feature (720)..(720): n is a, c, g, or t
  misc_feature (928)..(928): n is a, c, g, or t
  misc_feature (950)..(950): n is a, c, g, or t
  misc_feature (985)..(985): n is a, c, g, or t
  misc_feature (1078)..(1078): n is a, c, g, or t
  misc_feature (1180)..(1180): n is a, c, g, or t
  misc_feature (1353)..(1353): n is a, c, g, or t
  misc_feature (1530)..(1530): n is a, c, g, or t
  misc_feature (1732)..(1732): n is a, c, g, or t
  misc_feature (1764)..(1764): n is a, c, g, or t
  misc_feature (1853)..(1853): n is a, c, g, or t
  misc_feature (1913)..(1913): n is a, c, g, or t
  misc_feature (2007)..(2007): n is a, c, g, or t
  misc_feature (2097)..(2097): n is a, c, g, or t
  misc_feature (2112)..(2112): n is a, c, g, or t
  misc_feature (2167)..(2167): n is a, c, g, or t
  misc_feature (2202)..(2203): n is a, c, g, or t
  misc_feature (2212)..(2212): n is a, c, g, or t
  misc_feature (2219)..(2219): n is a, c, g, or t
  Probeset Number=SeqID_10721
ntcttgtgatgtctgtatatcacatgtgctcgcgactctctatgcataagtcatattcaacatgtctcagttacgacgagcgatangagatctntcgggcatctatcctgctacgctctctcacaatagacagtcgaagcatgaccctgcctcgagtctgcgcacatcacgntacgcctagcagcgtcgctcgcagacatgaatgtgcactcttacacagtcttcntcgcgctcctcgtcaactcgagcgtatcctctcatcatacatctgctaacagttgcgtcgtagtgcgtacattcngtgtacgctatgtagcgtgcggtaagtgaggcgattgtcagtacgtctagtacagtgcagtgcagtgcgtcaccttcgttcagtactcgcaccccgtacacccatggcgcacgagtctaagcatcattcatagtgtcggaatatnaactacggnaagcancgtatgcgtagtacgntacactcacatacagatatgtagctgcgcgacgaacnatcgaccagatgatcgtacatggccgatgatagtatattaaggtcacgtacgagtcaatcatgaatagttcgcgagatagattgtcgctgtactgcgagtcgtcgatgagcactcgtacagacagatgtatacaagacacgtactgcatacgagtgcttacttttcgctctgtnatcacctgatntcacgtcactgatttcatcantatactctctcttatgtattgtgttcagctatgtgtgtagtcgtagctgtgtgcgataattcagtgcaggagacgagtgtccaacatcactctcgtctgtattgttgtacagatctccagtcggtgcacggacagtgacagacgtctcagtgtctcaccagtatagtagatgatcagcgacgcactccgtgcatatctatttgtcatncgagctcacagcttatgatcantatacacacgtgcctctctatgtcatgaggagagnctacagtcagtcgactagactcatcgagatacacgtgtactgagatatcctgatgcaatctgcgtatgatagatcatcatatggtacctcgtngattcacacgttgactgtagtgcgcactgttgatgaatcagcgtataactcagacagtggtcgaccatacctcacgacatacatcacacacactcagacagncgatctccgccgagacggcatatcgcgagcgcgtacgataccacctcactctggtcactgcatgtgatggagtccatatgtagctcagctgcacgtcatatacatctgtaccggctggtcgtctccaggagatgcatggaatacagtgaccataggatcatcgcaggttgacnaagtgagatgagtagtatgatcaggggtcgttgagtacgtcgagtcgcgctcgtcgcgacgtggggtgcgaatagcggaatcacaggagtatgacatccttctgtggagtcggctctagtaggctctcgcttcctgctgcgaggcacctgagcttcatagatagtatatggctcgtnctatgtacgcacgatgcgagctgcgggagtagacggctcatattggcgtcagggaaggcgtgatacacactctatgcagtgtaacgatgtcgatagagagtacagacgcacatcggagtgtcgaagaatcgcatgacctgatacatgtcgttgccttcatatctcagactagctattaggttcatctcacgacaccttactncgtctctcactctcgacagtagagagcacagnctactcccgtacgactctctacctagtcttttcgtatatcatggagctgtcgctaatggacattacgatccatgcgatgaagagagagntgccacgatatatagataggacagagtaatatggcaggtgaggtacgtaccttcgtaagnacaggagcgcgcagcgtgtgtggatgtaattcatgtctctgtgatccgctctctctccttctttactgaatgacgtctcgtacttgtctaatanatcaatatctagtgccacgagtcgtgctgtgtaggatagggggtagtgaggtagagagccatgtatcatcattagaagacgtagagctgnagtagacgtgagtanaaacaccccaccagccatcgccaatcaacatggcagctcacggtctgtgctgcgnctctagcggcgcgcgagatgagatgagaagagagnngggagaagngtgagangagttgacaaggagagag

SEQ ID NO: 943 - DNA, 423 bp, Glycine max
  Peptide Sequence Number=SeqID_9154
  Probeset Number=SeqID_10722
gaaaagccgatcgggagaaaaaaacaactcaacggccggccggttactctctctacctccgtcctgaagattcatctccccggagcagatccgtgattcgtttctagacgctattacttgatattgtgatccacgcaatggctgctcctcctgctagagctcgcgctgattacgattacctcattaaactactcttgatcggagacagcggtgtgggtaagagttgcctcctcttgcgtttttcagatggctcctttaccaccagtttcattacaaccattggaattgatttcaagatacggactattgagctggatgggaagagaattaagctgcaaatctgggatactgcaggacaggagcggttccggactatcacaactgcgtactaccgtggagccatgggcattttgcttgtgtatg

SEQ ID NO: 944 - DNA, 540 bp, Glycine max
  misc_feature (53)..(53): n is a, c, g, or t
  misc_feature (147)..(147): n is a, c, g, or t
  misc_feature (185)..(186): n is a, c, g, or t
  misc_feature (216)..(216): n is a, c, g, or t
  Peptide Sequence Number=SeqID_9155
  Probeset Number=SeqID_10723
atttttttattatttctttgtatcggtctaatatccacacatttccacattanataaatacacacacattttagttttttcatgtacccattcgcgtgcgatagaattttctagagcgagagttttcggcgtaatgggtcccaacgncggcggcgcggaaacagcggagaaactccgaattgacnngcacacttacttcaaaaagaaccgttccgntggccgcatcgacgcttacaccgaggggaatacgctgtgcccaaaaggtctcccggtaattggaacgaactcggggctttggccatctcaagagcatggttgggagagagtataagaagattctcggaagggaaatttggtgggcagcaaatttcgttaggccaccatattgtttggggcttttgatttctactaaaaaaacaaaactcgccagggaatctaaaaattgagaaaggttttgatctttggagaaaggggccatccccaggggttatttgggaaaaaaataattgggaaaagatttggcaaggcaataaccttgtg

SEQ ID NO: 945 - DNA, 1599 bp, Glycine max
  misc_feature (23)..(23): n is a, c, g, or t
  misc_feature (25)..(25): n is a, c, g, or t
  misc_feature (49)..(49): n is a, c, g, or t
  misc_feature (85)..(85): n is a, c, g, or t
  misc_feature (110)..(110): n is a, c, g, or t
  misc_feature (137)..(137): n is a, c, g, or t
  misc_feature (140)..(140): n is a, c, g, or t
  misc_feature (157)..(157): n is a, c, g, or t
  misc_feature (161)..(161): n is a, c, g, or t
  misc_feature (195)..(195): n is a, c, g, or t
  misc_feature (218)..(218): n is a, c, g, or t
  misc_feature (259)..(259): n is a, c, g, or t
  misc_feature (261)..(261): n is a, c, g, or t
  misc_feature (265)..(265): n is a, c, g, or t
  misc_feature (312)..(312): n is a, c, g, or t
  misc_feature (315)..(315): n is a, c, g, or t
  misc_feature (355)..(355): n is a, c, g, or t
  misc_feature (364)..(364): n is a, c, g, or t
  misc_feature (405)..(405): n is a, c, g, or t
  misc_feature (422)..(422): n is a, c, g, or t
  misc_feature (458)..(458): n is a, c, g, or t
  misc_feature (515)..(515): n is a, c, g, or t
  misc_feature (517)..(517): n is a, c, g, or t
  misc_feature (538)..(538): n is a, c, g, or t
  misc_feature (622)..(622): n is a, c, g, or t
  misc_feature (643)..(643): n is a, c, g, or t
  misc_feature (671)..(671): n is a, c, g, or t
  misc_feature (676)..(676): n is a, c, g, or t
  misc_feature (678)..(678): n is a, c, g, or t
  misc_feature (852)..(852): n is a, c, g, or t
  misc_feature (895)..(895): n is a, c, g, or t
  misc_feature (973)..(973): n is a, c, g, or t
  misc_feature (1187)..(1187): n is a, c, g, or t
  misc_feature (1247)..(1247): n is a, c, g, or t
  misc_feature (1450)..(1450): n is a, c, g, or t
  misc_feature (1461)..(1461): n is a, c, g, or t
  misc_feature (1548)..(1548): n is a, c, g, or t
  misc_feature (1552)..(1552): n is a, c, g, or t
  misc_feature (1578)..(1578): n is a, c, g, or t
  misc_feature (1599)..(1599): n is a, c, g, or t
  Probeset Number=SeqID_10724
cgtatgtatctcacgtagaactngnactactgtggagtatgagcgacgncgcgacgacagatatcacagtgtgcagctagcatancgtctggctagattgagagtcaacncgcgagacgtagtggtgtgcgaaaggncgngcacagtgagtgtatgntgangcagtctatgatagtatagtgagtacgtcgagtngacgtcgtacgtaacgacagtgngtactgatgtgtgtgagagccaatatacatgaaatgtagtnancatnatcaagtatagatgtgtccgcgagcacggtctggctgatgttgcatntgngtcacagtctcgaggatgataaggagcgtcgtgacgcatnagatccatnttggtgacttacatagagtccatatcataatcgaagatcancgcatagaatgaaaganatcacatgtataaactatatgtagatattgcggcanagctagtagataatgagatcaaagactccacacggaccgacgacacagggataatgntnacaggagctctaatataaatntgtatctcgcgtagatacgagttactgtttcatgtatatcatgtaatgtatatatactatcgcgagtgtgagcactcgcgagangacactgatgttagtgagtgncgaatgatgatgaagtgtgtgtgcagantcgangngagagaggagggtgtgaacaataagatggtgcgagtacgtacagacatacaacacgacaatacaacacaattcagggtagtccatctcatacatcctactccaacactatctgtatatattgtctgatgtgtgatatagtatttctttgagtgtgggtgggtatggtagtaatnattatcatgtatatacaatctcgtattcacaatatcttaatanaataactatatacatggcgatcatcacctgctatctttatatttagatatcgaggtagaggacttggcgagcggtgtntctgatgtgatatgaggtggtgagtagagaatgatggaagaatgtgaatttgagtagacattgcacgtcgcgtccacatataacgtgcacagagaaggaatcgtcatagtgcgataggcagagataattgtgtgcgcgtggtgccgccgcgcggtacgcatgtggtgggttgattgtaatgatatctggttttattatcgtggttataaatttnatgcgattcatgaagagtactacagtaaagtaaaatgacagacaagagtaaacacagcanagtgaattcgaacaccgatgtcagtgcccaacctaccactcgcgtgcccacgagaccgagactatcatcatcacccagacgctagagtacgaccatgatgaagactcattatgtgagatgtcacccacatttcgctactctacacatagtcagtgcgcacccacaaagcaccggtgccgcattatacactcatattagatggnatagggagtgngtccctactacccctacgcctcaccctcgtgggggcgcggcccctccgcaccacaaaaggaggatgagtcggtgagcttggtggtgntagngctctagtacagcacaaaaaacaaanaaagcacaaaacaaaaaaaan

SEQ ID NO: 946 - DNA, 598 bp, Glycine max
  Peptide Sequence Number=SeqID_9156
  Probeset Number=SeqID_10725
cgcacgcatggctttcgctctctattagcaccattcgatctcatcatcgccattcatcctcctcaaactgattgcggtggatatattgttgagagcttatgggaaattaacgggcgactatgctttgcaagagagagtggatgcccacacaggcataagacttatccttaagtgggatctgggtgggggatttgacctgtttccttctcttttacccactgacggttcctgcatgattgatagaaggatgggcattcacggcctccctgttgagatccaggccttattttactcgggttcacgctgctctcatgagatgctaatagtcaacgacgcccccatgagtctggtggctgccgttggtagtcgctctgagtgcactctgctttcgcatgatagagtttattgggttgctgtgaagaaggttaatgaggtttaccgcgtctcgacagaagattgttctactgttgctgctagcacgtttaacatctatccagagcatccttccttcatggctagtggactggatttgcgagtaaggtggctacttcattggcacttctgaacctgctcatgtggacttcaagtttctctcact

SEQ ID NO: 947 - DNA, 1394 bp, Glycine max
  misc_feature (501)..(501): n is a, c, g, or t
  misc_feature (1394)..(1394): n is a, c, g, or t
  Peptide Sequence Number=SeqID_9157
  Probeset Number=SeqID_10726
aagtgccccccaccacctccacaacatatcctgcaccgctaacctccccgccgatatccccccccccgtatttcccttttttttccatcacactttcgccgttccgttagcgctagtttttcgtgtttcatggcgcgcgcagcatgtttatgtggagttactcggtaggtcgccgcgcctcaacgccaccgacatttttctccccacccattatacacaccgactcctcccgccacctactatacttgccctttatatttttatgtgtagacacgcgctatcgctttaatatcccccactttttaactatatccccttcccgcccccttttctttatttccgcaccgctcacgcatctcgtttttcttctcccccgctatagaatcgcgcggcgttggcgggacccgcgaaaacaaaaaaaaaaaataaatgtaatacgacttcccggttgtatacattcacccccaccaatccggcgccgctccacattaaattattagnaatttggaaatgaataccatgtaaccgcaaatccatgctaatcttatttattccacgcgcctataattattggcccgtccacatgtataaacacctcaccccccgcttgtaaaaatttagtggtggtacacaaaagagaaataagcgtcgtttaatgtcccaccaccatatgttgtaagtgataacagatgttgtccccatataacacccaacgagttgggagtgtaacagaagataccctatcccagaacgtacttgttgtgtaatcctcccacaatctatgtatataccacacaaccggccgggtcgtgggtttatcagaccgactttgttttacagcaccgcaaggtgattgtcaggctccccacgctcgtgctactactcgataattgaacacatagtggctgtgttcttatatcctcctctatatttcattagcgccactatcgttttaagttctccttaccccacataactaaacgcggcgagcttagggtgtggcgcgcgattacatctgaaaaataatatccggcgcgcgcataacaaaaggtccgcgtcactcgtcataacacatacaactacatacagcgtcgctactcgccgcccgccgccaatatgatatacatacaagaaggtcgtgtatagaactattaaggcggctagttctccattccgcgatactataacgcggcgcggatggcggcggcgaaagtgaaaacgacaactatatgaacgcccgcgccgatacggcggccgtatattatcacccgacaattgctacgcgcgcggcgacgaaaaattgctgattagtgccgccggcccgcgccgcacacgatttatttcacttgtctttgctcgcgcacaaataaacccacaattgcgccacgtacgcn

SEQ ID NO: 948 - DNA, 1805 bp, Glycine max
  misc_feature (1)..(1): n is a, c, g, or t
  misc_feature (27)..(27): n is a, c, g, or t
  misc_feature (41)..(41): n is a, c, g, or t
  misc_feature (79)..(79): n is a, c, g, or t
  misc_feature (84)..(84): n is a, c, g, or t
  misc_feature (87)..(87): n is a, c, g, or t
  misc_feature (89)..(89): n is a, c, g, or t
  misc_feature (161)..(161): n is a, c, g, or t
  misc_feature (164)..(164): n is a, c, g, or t
  misc_feature (171)..(171): n is a, c, g, or t
  misc_feature (183)..(183): n is a, c, g, or t
  misc_feature (237)..(237): n is a, c, g, or t
  misc_feature (249)..(249): n is a, c, g, or t
  misc_feature (255)..(255): n is a, c, g, or t
  misc_feature (321)..(321): n is a, c, g, or t
  misc_feature (326)..(326): n is a, c, g, or t
  misc_feature (389)..(389): n is a, c, g, or t
  misc_feature (416)..(416): n is a, c, g, or t
  misc_feature (474)..(474): n is a, c, g, or t
  misc_feature (480)..(480): n is a, c, g, or t
  misc_feature (483)..(483): n is a, c, g, or t
  misc_feature (485)..(485): n is a, c, g, or t
  misc_feature (516)..(516): n is a, c, g, or t
  misc_feature (559)..(559): n is a, c, g, or t
  misc_feature (598)..(598): n is a, c, g, or t
  misc_feature (618)..(618): n is a, c, g, or t
  misc_feature (674)..(674): n is a, c, g, or t
  misc_feature (715)..(715): n is a, c, g, or t
  misc_feature (787)..(787): n is a, c, g, or t
  misc_feature (974)..(974): n is a, c, g, or t
  misc_feature (1058)..(1058): n is a, c, g, or t
  misc_feature (1277)..(1277): n is a, c, g, or t
  misc_feature (1396)..(1397): n is a, c, g, or t
  misc_feature (1418)..(1418): n is a, c, g, or t
  misc_feature (1450)..(1450): n is a, c, g, or t
  misc_feature (1463)..(1463): n is a, c, g, or t
  misc_feature (1469)..(1469): n is a, c, g, or t
  misc_feature (1482)..(1482): n is a, c, g, or t
  misc_feature (1553)..(1553): n is a, c, g, or t
  misc_feature (1567)..(1567): n is a, c, g, or t
  misc_feature (1624)..(1624): n is a, c, g, or t
  misc_feature (1630)..(1630): n is a, c, g, or t
  misc_feature (1685)..(1685): n is a, c, g, or t
  misc_feature (1719)..(1720): n is a, c, g, or t
  misc_feature (1736)..(1736): n is a, c, g, or t
  misc_feature (1738)..(1738): n is a, c, g, or t
  misc_feature (1740)..(1740): n is a, c, g, or t
  misc_feature (1743)..(1743): n is a, c, g, or t
  misc_feature (1778)..(1778): n is a, c, g, or t
  misc_feature (1780)..(1780): n is a, c, g, or t
  misc_feature (1784)..(1784): n is a, c, g, or t
  Probeset Number=SeqID_10727
naacgttcagaggacgacagctgtaangatagaggatgcgntggatgaggcagcgagaggattggcgcgatgagagcantactntanangcgttcgatatattgttcgtatatagtattagtagatgagctcattcgtcgcgctgccgatatgtcgatcanctngcagtgngtgctatgacgntagtcccgtctgacgttctatatgcgtatctgtatcgtgaaccagtactgtctntcgccagctttncgtctncgatatcagcgacatcagaacccgtcatacagtgcctaggtcagactcgcgcgcgactcggcgcgncacancgtcgcagtatcgtgagtcgctgtatataataggtcttgcgatagtcgatagttcatgatgantgatagatctcacattcatcctatctnacgtagcatgtcatgatgattcgtactatagccatgcttatatacgtagagtcgctgnatatgnacnangagagcagatcgagagatattgcgcacagtnttacgtgttatagctgcgtactatctatacgcgtcgagcatantcagacagacgtaatgtagtatagtgatactgtactatncggtagcacacatagatatngagatgacacagagacatacatagatgtgcgtagcgagcgtacatatatatgaggntgagagctcgaggagaagaatgcgcaaggcagatatgttantagaaagagagagttatgttggtgtgttgtagcgtcgatctattatgacatgtcgttgctcgcgcgcgcacntccgcacatctggcagagcagcacaggtactagccacgcgcgccgggcgagcgctgtgatgtgtcatcgtgtcgtcggtgcagctagatctcgctcatgtacgtgttatgtgtcttaggggtgaatcgagtgtaattacctctaacatcgcctctactgtggcggttccctcctctctgttatatanttcctcatcgcgctgctgcgtcttgagctgtgtgcagtagggtgagatagagaattatggagcagagaggatgagatagtgtgntgttagttagtgagtttagtatatagtgtagagagaagccatgagactgcgactcctcgactcgctttcgtcttactcttgtctactatgtcgtgcgtatagtacatatataatctcagcgcttcttctcttcatcaatatacagttggcctccattcatactacatcacgcgaagctacactctacctattgtgaggagagaagcggagagatgttgnctcaatgtatcgagtcgagcgtgggagcgagcatctacacctcgactgactcacaggctccgcctcgatccccgtgtgtctcgccacacgcacgatgtcccgcactccgcgcacgcacnnacccctcatctcccgatcgcngccgcgactggcgccgaaggcaaccaacacangacgtgcacaccnacatcncggtcgcacgcgntaccacgcgcgtgtgtccacatcccgacgacacataacataaataaatcctcattaagtgtgagtaagagnggagaaacagaggngcggcacgtagcgacgaagactatcaattatataaactcctaccctgccgatgtctnatatgnattagttcgtcactaaaaacatttacaatataaagaacgagaacccgcagcgcanacaccttatctctatccacttaccattctttttnntaataatgatgggtancncntangctccacccctcccctagcgccctcgccccccccncncccncccaacaaaaaccccccaaaa

SEQ ID NO: 949 - DNA, 2022 bp, Glycine max
  misc_feature (100)..(100): n is a, c, g, or t
  misc_feature (105)..(105): n is a, c, g, or t
  misc_feature (156)..(156): n is a, c, g, or t
  misc_feature (158)..(158): n is a, c, g, or t
  misc_feature (207)..(207): n is a, c, g, or t
  misc_feature (248)..(248): n is a, c, g, or t
  misc_feature (387)..(387): n is a, c, g, or t
  misc_feature (438)..(438): n is a, c, g, or t
  misc_feature (449)..(449): n is a, c, g, or t
  misc_feature (596)..(596): n is a, c, g, or t
  misc_feature (685)..(685): n is a, c, g, or t
  misc_feature (710)..(712): n is a, c, g, or t
  misc_feature (758)..(758): n is a, c, g, or t
  misc_feature (761)..(761): n is a, c, g, or t
  misc_feature (859)..(859): n is a, c, g, or t
  misc_feature (1270)..(1270): n is a, c, g, or t
  misc_feature (1277)..(1277): n is a, c, g, or t
  misc_feature (1305)..(1305): n is a, c, g, or t
  misc_feature (1430)..(1430): n is a, c, g, or t
  misc_feature (1505)..(1505): n is a, c, g, or t
  misc_feature (1568)..(1568): n is a, c, g, or t
  misc_feature (1681)..(1682): n is a, c, g, or t
  misc_feature (1742)..(1742): n is a, c, g, or t
  misc_feature (1751)..(1751): n is a, c, g, or t
  misc_feature (1795)..(1795): n is a, c, g, or t
  misc_feature (1823)..(1823): n is a, c, g, or t
  misc_feature (1835)..(1835): n is a, c, g, or t
  misc_feature (1879)..(1879): n is a, c, g, or t
  misc_feature (1896)..(1896): n is a, c, g, or t
  misc_feature (1904)..(1904): n is a, c, g, or t
  misc_feature (1924)..(1924): n is a, c, g, or t
  misc_feature (1938)..(1938): n is a, c, g, or t
  misc_feature (2018)..(2018): n is a, c, g, or t
  Peptide Sequence Number=SeqID_9166
  Probeset Number=SeqID_10728
tggagatgagcgacatcattatacgggcgcgctcacgcctacgatatattatccgtgtcgcgcgcgacgcgaatatgtgtacgagcggaccgactacaanaccgnagcgttctgtgcgtgttatattgtgcgtcgtatcgtttgtatatcgcattnanacagtgttactccgtcgcggagtctgtcttgtagctccatgagtgtatntgcttaacaccacattatgcgtcggcgttgcggcgagctanagaaagtgagtgtagtgtgtagagagcagaagtgtgctgtgtgagggtgatgtgcggctgcgcttccataaacagagacagatgatgttaacactgatttgtgacaacaccactaccaatcggtggttgattatacaancgatatagtcttctcgcgcgtgctcacgaagatgtagtgactagcgctacncgctgaataanatcctgacatatatatagtcacaccgtctacgtatatccgtcatatcatacgactacgccgctctggtgaatatatatacaagatatctcggcatcgaccagcgcgcgcgtgcttattatcattatataatatcgcgtgagcgtcgncggaattaggtgtatggtgatgtctgcgagtatactgggcgcgagggttaatattatatatagggcgtgagtggttgtgcgcgctgccncccccccccgtcctctccgacagannnaacagcaagagcagagtgtttatatataccacgttctcgtcgatgntantatgtatattctccactatgcgcgaaataagaggagagccggcggcgcggtgtagagaataatattgaaataattgtacactcgcgaaatagaatatncgctgtgtcatcgcgcgcgagatacgtgataacaatattgttatgtctctctctcccccagctcgagttgatattatgttgtgggcgggatgtatatagtataaataaatgtgtggcgcgcgcacgcgcgaataatatataatatagatgttggtggtgcggtgaacgacagtaaagatacgcgggagctgttaataattaacgctcgcacccaagcgtgtgcacagatatagaaaacatgtggtgtgtggcgcgagaaatatcgacgcgaaaacgtggtggtgtcgtgagctataattattcctcttccgcgtacataaatgaatgttgtgttgttagtccgctgcgtcgcggtatatgtttcagccactataaaggggcgtgtggtgcagttgtttgacacatcgcgcntttgttngtgttagacacagagcgcgagtgtattntagatatggatagtcagcttgtgtacaactgctgctcagactgcgacacaagactggtggtatttgtgtgtatatatatgaccaatataatgaatgtgtatgtgcgtcatgtgtggtggctgcanctatctcgacccactattctaaatacgccgcgtaacacgaactgtactctctctctaacatttgtgtgaataaantatatatatcgcgcgagacgatatatatatatacagcaccgcgatgggtgctgagaacataangtgaatagactaataatgctgctgcatgtgccgcgcgccgcgcgggataatataatagaacatacatagaatggtgtgcacgaaaaatacatcgagtctacgcgcgcgcgatnntcctagtgcttgtcacatatatatatatcgcgggtcgtcggttgagcgcgcgtgtgaatnattgtgaancatcgagactagcatgtacgtgataaacgacgggtgtggatacntgcgcgcgcgcgactgataattcgttangtcggttgaganattatgcatccacgggacgcggacgtgcgcgagagatatgtatngtcgatatacggctggncggacgantgacgccgtcatggagacanccgaattttatgantcgtatcattgaccgactaacttgatccgacgaccgcatcaaaatcacacgacgcattctctgatgtagtatatgtaacncacg

SEQ ID NO: 950 - DNA, 1599 bp, Glycine max
  misc_feature (38)..(38): n is a, c, g, or t
  misc_feature (97)..(97): n is a, c, g, or t
  misc_feature (437)..(437): n is a, c, g, or t
  misc_feature (704)..(704): n is a, c, g, or t
  misc_feature (815)..(815): n is a, c, g, or t
  misc_feature (817)..(817): n is a, c, g, or t
  misc_feature (929)..(929): n is a, c, g, or t
  misc_feature (997)..(997): n is a, c, g, or t
  misc_feature (1003)..(1003): n is a, c, g, or t
  misc_feature (1020)..(1020): n is a, c, g, or t
  misc_feature (1024)..(1024): n is a, c, g, or t
  misc_feature (1049)..(1049): n is a, c, g, or t
  misc_feature (1056)..(1056): n is a, c, g, or t
  misc_feature (1059)..(1059): n is a, c, g, or t
  misc_feature (1063)..(1063): n is a, c, g, or t
  misc_feature (1080)..(1080): n is a, c, g, or t
  misc_feature (1108)..(1108): n is a, c, g, or t
  misc_feature (1136)..(1136): n is a, c, g, or t
  misc_feature (1204)..(1204): n is a, c, g, or t
  misc_feature (1286)..(1286): n is a, c, g, or t
  misc_feature (1435)..(1435): n is a, c, g, or t
  misc_feature (1442)..(1442): n is a, c, g, or t
  misc_feature (1458)..(1458): n is a, c, g, or t
  misc_feature (1570)..(1570): n is a, c, g, or t
  Probeset Number=SeqID_10729
agtgttaagtagtaggagtataatgtgtgattgtgtgngcgggttgtcgggttgttagctgtatgtttatgtggggcgcggacagcgaggagaccgncgaggccataagcccgagagtctagacacgcgcgcatgcatgctggcggcacgtggcactgataccgcaggtcgccgcgcaagtctgcacgaggtcgcccgtaggaacagcgcgcctgtcaggccgcagccacatgcgggagagtgtatacaaggtgctgatgtgttcactagatgggctatatggatggatgcatttacttctacacctcgagcctatgcatagaacatatcaggctcgtagtatgaggctacaagtagctgagagcgagaaccggatccgtgtagccatgcctgtggtgtgctatctgctccccattccactccggctgcgtgggtgntcaacctggcgaacatatcgaaacaaagaagaaggacgagggacagtgaaagaaattaataagaaagagtagtgcaagaatagagaggatctgaaatgtgtgaatttgaagcgtctccctcccgctgtctcccctcacatgcacataccttctacatgataatcaacccccactatatgatgcctctcaatagatgcttaacgacgaacctatacagaatgactaaatcatagacaactcggtaacggtctgtctgttgtgcctccntgcctcgagtgtcgtttttgtctcttccttgctactctgcgctcgcatcgtgtcagtgacggacagtactcggtgtcattgatattcgcatgtgaattcaccctaagttanancataactcactaaggcacgatgtctctgtatatagtgacatgctagttacaatgtgatatatgtgacactatgtgtcatggttgcctgtctacgacgacttacgaatatatngaatgagcgcacactaccactgatctctatgactactatacgcacaatgtaaccaatgatgagggcgnacgtanagacgagtatgcgctcnacgngaagagatactggatggtgtcctanactatcngtnatgnggctctatcgctgatangctgagtacacatactctatcatctatncgcatgatcatgtgtgcatgtatctctngatgtcgcgctgctctcattacgacgcaaacactaatacatatctgttagaatgatcaacaacactantcacacgtaacagatcgatatgatatcactaagatctagtattatatgtagatcacatagcatctgatataggaaactctantcgccgctgcaatgcgcgtattctcactgcacatgacgtatcgtataacgctgatgtgtatgtgctgatacataccacacgacgcactatcgacgtgtgaatgcacgcgcacgcgtcgacgacatgccgcgcgcacgtcgtcacgacancagagangatgatatgacatgcnctgaatgtgcatgaacgatggacacggtcgtgatgatcagagcgctctcgcacgatcatagcggacacgcacgcgcgcatcatacgatcatacgctcgcgacactacgactncacacacagctgacatacacgcgatagaa

SEQ ID NO: 951 - DNA, 2304 bp, Glycine max
  misc_feature (1)..(40): n is a, c, g, or t
  misc_feature (1954)..(2304): n is a, c, g, or t
  Peptide Sequence Number=SeqID_9167
  Probeset Number=SeqID_10730
nnnnnnnnnnnnnnnnnnnnnnnnnnnnnnnnnnnnnnnnggggggggagtgggggccccggcgggtgggccgcgtgggccggctcggggggctctttcgcatctgggatgcgctgcgggtgaagctgtgagggggagggggggggggggggcgcccgcggggcccggacgagtcactgataaggaattgtttttcgtgtcccccctcgagtgccttacggaaagccccccccccattcttctcgaacgttattctcaaaaggaaacacactctgctttagtagaagaagaaactgcgctcagcatcattgaacactagcaaactcggtgacaacgaagtggtttctgtgaagcaagaaagaaacaattttacggatgctcctcaacgaaaggaaataaagcttttaaaacatgtgatggaaagtggtttttggagcaacgttccgcagcgattgcaaacaaagaggaagagtaaattcaatggcaagggagcactttctacatcgaaggcagtgctttctaaaacgaaggaagcactttctagatccaatgaagcactttctgcacccaaggaagctctttctaaaccgaaggaagcacattctagacccaataaagcacattctagacccaataaagcactttctacacccaagaaagcgctttctacactgaaggaagcactttctagatccaaggaaaagctaaacagtggagattttgatatttacttgaagaaaatatggaagattttctcagaagataggttgaggcattgtacatactgacagcttatggtttagtctctacaggacctcttcatctaaagacaaagtgttgacttggattaaaaaagaacctattttctcaaagtcatatgtttttgtgttcctatagtctgctggggtcattggagcctcgtgccattttggtgaaagcttggaatcaactaccagatcacggtgcatgttgttgctggattctcttgaaatggccaatccaagacggctcaaacctaagattagaagatttgttttagatatttatagaacaggggacaggcctgaggctaagcatctcatatctcgaattccttttttggtgcccaaggtaattatcaccctttctattattttcatctccagtgtaaccaaatattgaagaaaaaacaaattattgtatgtgccacaacaaagagatggtaatgaatgtggatttttcatcctctatttcattaatttgtttttggagtgtgcgcctgataactttagcatggagggataccctttgtaagttatctcatttgctgttcttgaaatttatttattaaaacatgcattttgattcagttatgtttgacattgacatgctgcagatgaaaaaagattggtttacctttgaagacctagataggttttatgagagacttggttcactgaattagatgtccccaaacttgaccagactagtgattagatctaacatactttattgttgactgattatattgtattggtaacggggggatttgttcatataggataataggaggcaagcataacttagaagtttcttctattagagagggtactctcttctatgcatgtagttcaactctattggaattatattatgttctggaattgatgtttacactactcccccaacccccgttcccttccgcgccccctcccggcgccccccttttttcccgttttttccctccgtccactttgccttgtcgggggcttccccatgctagaagcgccccaaacattctcttcagtccccccccccgcggcggcccacacacctctttgcccgccgccgaggcggcagcagtggaggtggggctcgcgcgggaaggagggggggcgccggggtggggttgccggccccccccggtccggcctgttgtgccccggtcgtgtgacggggttgttagggtggtgtnnnnnnnnnnnnnnnnnnnnnnnnnnnnnnnnnnnnnnnnnnnnnnnnnnnnnnnnnnnnnnnnnnnnnnnnnnnnnnnnnnnnnnnnnnnnnnnnnnnnnnnnnnnnnnnnnnnnnnnnnnnnnnnnnnnnnnnnnnnnnnnnnnnnnnnnnnnnnnnnnnnnnnnnnnnnnnnnnnnnnnnnnnnnnnnnnnnnnnnnnnnnnnnnnnnnnnnnnnnnnnnnnnnnnnnnnnnnnnnnnnnnnnnnnnnnnnnnnnnnnnnnnnnnnnnnnnnnnnnnnnnnnnnnnnnnnnnnnnnnnnnnnnnnnnnnnnnnnnnnnnnnnnnnnnnnnnnnnnnnnnnnnnnnnnn

SEQ ID NO: 952 - DNA, 1685 bp, Glycine max
  misc_feature (40)..(40): n is a, c, g, or t
  misc_feature (78)..(78): n is a, c, g, or t
  misc_feature (102)..(102): n is a, c, g, or t
  misc_feature (179)..(179): n is a, c, g, or t
  misc_feature (188)..(188): n is a, c, g, or t
  misc_feature (223)..(223): n is a, c, g, or t
  misc_feature (273)..(273): n is a, c, g, or t
  misc_feature (294)..(294): n is a, c, g, or t
  misc_feature (451)..(453): n is a, c, g, or t
  misc_feature (463)..(465): n is a, c, g, or t
  misc_feature (468)..(468): n is a, c, g, or t
  misc_feature (472)..(472): n is a, c, g, or t
  misc_feature (474)..(475): n is a, c, g, or t
  misc_feature (485)..(485): n is a, c, g, or t
  misc_feature (495)..(495): n is a, c, g, or t
  misc_feature (528)..(528): n is a, c, g, or t
  misc_feature (544)..(544): n is a, c, g, or t
  misc_feature (546)..(546): n is a, c, g, or t
  misc_feature (631)..(631): n is a, c, g, or t
  misc_feature (681)..(682): n is a, c, g, or t
  misc_feature (707)..(707): n is a, c, g, or t
  misc_feature (722)..(723): n is a, c, g, or t
  misc_feature (725)..(726): n is a, c, g, or t
  misc_feature (728)..(728): n is a, c, g, or t
  misc_feature (747)..(747): n is a, c, g, or t
  misc_feature (750)..(751): n is a, c, g, or t
  misc_feature (851)..(851): n is a, c, g, or t
  misc_feature (1028)..(1028): n is a, c, g, or t
  misc_feature (1046)..(1046): n is a, c, g, or t
  misc_feature (1093)..(1093): n is a, c, g, or t
  misc_feature (1096)..(1096): n is a, c, g, or t
  misc_feature (1098)..(1098): n is a, c, g, or t
  misc_feature (1139)..(1139): n is a, c, g, or t
  misc_feature (1168)..(1168): n is a, c, g, or t
  misc_feature (1234)..(1234): n is a, c, g, or t
  misc_feature (1242)..(1242): n is a, c, g, or t
  misc_feature (1274)..(1274): n is a, c, g, or t
  misc_feature (1277)..(1277): n is a, c, g, or t
  misc_feature (1339)..(1339): n is a, c, g, or t
  misc_feature (1343)..(1343): n is a, c, g, or t
  misc_feature (1406)..(1406): n is a, c, g, or t
  misc_feature (1415)..(1415): n is a, c, g, or t
  misc_feature (1418)..(1418): n is a, c, g, or t
  misc_feature (1420)..(1420): n is a, c, g, or t
  misc_feature (1427)..(1428): n is a, c, g, or t
  misc_feature (1430)..(1430): n is a, c, g, or t
  misc_feature (1444)..(1444): n is a, c, g, or t
  misc_feature (1477)..(1477): n is a, c, g, or t
  misc_feature (1484)..(1484): n is a, c, g, or t
  misc_feature (1516)..(1516): n is a, c, g, or t
  misc_feature (1526)..(1526): n is a, c, g, or t
  misc_feature (1543)..(1543): n is a, c, g, or t
  misc_feature (1585)..(1585): n is a, c, g, or t
  misc_feature (1589)..(1589): n is a, c, g, or t
  misc_feature (1598)..(1598): n is a, c, g, or t
  misc_feature (1604)..(1604): n is a, c, g, or t
  misc_feature (1606)..(1608): n is a, c, g, or t
  misc_feature (1610)..(1613): n is a, c, g, or t
  misc_feature (1616)..(1618): n is a, c, g, or t
  misc_feature (1621)..(1622): n is a, c, g, or t
  misc_feature (1625)..(1625): n is a, c, g, or t
  misc_feature (1629)..(1633): n is a, c, g, or t
  misc_feature (1635)..(1635): n is a, c, g, or t
  misc_feature (1637)..(1637): n is a, c, g, or t
  misc_feature (1643)..(1643): n is a, c, g, or t
  misc_feature (1648)..(1649): n is a, c, g, or t
  misc_feature (1659)..(1659): n is a, c, g, or t
  Peptide Sequence Number=SeqID_9168
  Probeset Number=SeqID_10731
cagtatgacgatgagagagcgggcattccgagcactccangtaacagagagacacacgagctcgtcgagggccgtgcnagactagacagccagcgcacagtnccacgacaggccgtgggtcgaatcagctcatatactcctccgtgcacgacgcgctctctgcgccgcgtgcgcgaagngatgcaggncgagtgagactatggactggtggacggatgtaccntctttatcttgtcacatatcacatcgacacgcacatcacagtcccacacnctcctgttaatataatctagngagcacagacacgagagactaacactgccggcagcaagacacatgccaaacggcacacgcatcatagcaccgctgacatctatacacggaacagagccgaggatatgactacatgtatcgcaggctcatgcccaagacacgcgccgcggacctccgnnntatgtaagtnnnatnggtngnnggcaccgtgncgggtgtggnttagtggtctatggtataggttatggtcgtgtngggtgtgtatgcagangnagtgtgataggcatatagatcggaccgcagcacacaaccatctacgatagcatgatacatcatagttagcatcacaagcaagagntatacaaccaacaccaatcaaggatggtggtggtgatgagtgctgtggtnntgggcatgtcagttcattagatatngttctttatattttnntnntnttgttggtggtattgtgtnttnntacacaaaccacaagaccatcaccaccatatgcactcactctcatcattccatccacgcacgagcaccgaagacgacagtctcgaggcaaggtaggactnttatagtgcttcgttgtgttaagcacctcactggcgtctatccgtacatacatatataatgtctctgcgattactatacactatatagcgtatgcagagagcagatgcagatcagtagtgagccatcgagacacgcaacaaagacgcaaatcatatacgaaccgatcaagcgacgancgagtcagtcacgcatcnaatctccagtcagtactttcttcactactctcctgcgtgctgttgtntgntntaacagcacgctcaatgcgcacactcctagctcagagtggnggcgacgagagaaggggcgctgaagggtngtgagaccgaatagacacaccatgtaatagtctgtatacgtatcatcatgtgaatcattgattatntgtgcctngtgctgtgatcgttacagttgtactatatatntcnttagagaagagtcggacgagaggtgtgagcggagtgttctatgatatgtgtgcgagcacagngcangcgcaggcatcgctgatgagtaatggagtgcaggcggttgtagtatgtattgtgtaaggatangtaaggatnatntntctctcnncncacacggcgcacgnccaacgacatactcatccccaatattttgttgnataaagnagagagaggtaagccactctcgcatgtaaaanttttctaccnctcacgcccgtcggtcnctcccctcctctcctcctttcctttgaggaagatatataaangcangagcgagtngttccncnnnannnnggnnncanngcntctnnnnnancnaaaaantaaannagagacgcgngcaacgcagccaccacacacccacac

SEQ ID NO: 953 - DNA, 1396 bp, Glycine max
  misc_feature (18)..(18): n is a, c, g, or t
  misc_feature (120)..(122): n is a, c, g, or t
  misc_feature (229)..(229): n is a, c, g, or t
  misc_feature (398)..(399): n is a, c, g, or t
  misc_feature (428)..(428): n is a, c, g, or t
  misc_feature (565)..(565): n is a, c, g, or t
  misc_feature (826)..(826): n is a, c, g, or t
  misc_feature (1003)..(1003): n is a, c, g, or t
  misc_feature (1098)..(1098): n is a, c, g, or t
  misc_feature (1315)..(1315): n is a, c, g, or t
  misc_feature (1319)..(1319): n is a, c, g, or t
  misc_feature (1354)..(1354): n is a, c, g, or t
  misc_feature (1396)..(1396): n is a, c, g, or t
  Probeset Number=SeqID_10732
agggaagagggagggagnaaagagaaagagatagttgtttagtgtattattatatttgtgctatactgaaccatagagaatctcacgcgaggttgaactatattatcaggaaaaaagaannnacacaaatactctagagtagtttttactccaccctcactctactcctgactcttccttaatagtttttacttaatgtctaggtacactttgttagttggtgaatgantctctgaggtagcggcctatcagctgtccttgtgaataatataagatggagaatatacaaacatacggtggtattgtaacaaggaaatggaagaactaaagacgacgggcataatataagggggtgagagagaaaaaaacaccactgtgtgggaaaatgctgggtaaannatcgtaggggcgactcgatgactgccacncaaccaccccacacaggcaccacccagcaccctgcgcacgaggcggggtccgcgctggctatcaaggggaatggtttgtggtgggtgtcgtgttctaaggtgttatgtgttgtgtgttgattattgggtggtgtcgngtgttagaaattggcgctctatgatgaaaataactggagataggcgcgctgtgtgaattactatggtgagcatactgatacgttatatatatcggtggatagtgggagacacatatgcgataaaagtgaagcaagagggcaggacctggtcaccatctctcttcttccacttgactcgctcacatatctcagctctacactcgcacccgccccacacccgcccaaacgtaagatgagacactccgacacacccacacccancacctgcgcaccaccgcccaaacaccatacaatgcttgtactcactctcagacgcacacccaccacgataatggcagcgcacgtgcaccccactccatcaaccagcagcttagcaccactgatctgaagacgaatatttactattggatgagcagaccattctccgctctactcatnacactagcgcactcacacacacacatcaccaaccgacacactcacttacctcatatgcatctatactatttcatgtcttgtatactaactctacnacgctgtcgctcaaccacagaccgactcttactgataactaaagtgtgtaagaagtcgaataactacaacatacaacaggtgataaggtatgtaatactacgctctgttttatgttatagcgtctgccttctattcatctctcactctcatgccgtgctatctcctgtggcgaggtacgtactgtatcgggcaccacacctgtacctacctaactgngacnccgttcattccgagatcgcacagcactcactctanacgcacctagcgtgaactactcctactatcaaactcacactn

SEQ ID NO: 954 - DNA, 1360 bp, Glycine max
  misc_feature (1)..(1): n is a, c, g, or t
  misc_feature (80)..(80): n is a, c, g, or t
  misc_feature (140)..(140): n is a, c, g, or t
  misc_feature (331)..(331): n is a, c, g, or t
  misc_feature (661)..(661): n is a, c, g, or t
  misc_feature (979)..(979): n is a, c, g, or t
  misc_feature (1044)..(1044): n is a, c, g, or t
  misc_feature (1114)..(1114): n is a, c, g, or t
  misc_feature (1212)..(1212): n is a, c, g, or t
  misc_feature (1218)..(1218): n is a, c, g, or t
  misc_feature (1221)..(1221): n is a, c, g, or t
  misc_feature (1241)..(1241): n is a, c, g, or t
  misc_feature (1255)..(1255): n is a, c, g, or t
  misc_feature (1262)..(1262): n is a, c, g, or t
  misc_feature (1286)..(1289): n is a, c, g, or t
  misc_feature (1294)..(1294): n is a, c, g, or t
  misc_feature (1307)..(1307): n is a, c, g, or t
  misc_feature (1310)..(1310): n is a, c, g, or t
  misc_feature (1312)..(1313): n is a, c, g, or t
  misc_feature (1323)..(1323): n is a, c, g, or t
  Peptide Sequence Number=SeqID_9169
  Probeset Number=SeqID_10733
naggcatgtagtagtagtatatatgtatagtagagatatagtacaatagaggagaatgcagcaagaacaacagacgcacngagagagagtgaggatgtgggtgatgaggcgcgaagagtcagtgcaggacgcaatagaanagcagcaggaagagacatagagagagaggataagatacataacgcataatataagggcaccggagtattcgagtgatagtagtagaaggtgtggtaatatatgagaatatatcgttcatgcgaagattatatgaggggtcgtggcatgcagagagaaggagtaagcatcgatgccggagtgcggcggtagngaggcggcgggagctcctaagacgcgagaagagctgaggactagaaggcaacgaacatgataagcaacacatggacaagagaggcgtcgctctcggagcagtgagggcaggtaagaggagaggaagaccggaagagtagagcagcgcgcggcacggcgacggtgcacggagtgggagggggatgtgcatatcaccgccgtaatgacagcgtagacagcgccaccaaagaaggcagcatattacacaaactccacacaaggtcataaagagggtggaggtgacttctccgacggccggctacacgacatgaaatattgttgtgccgcgtgngggcgtactctcacttctcacactcctcttctttctatctccctcctccactatctctctcatctaccgtcgtccccgcccaacgatgcgtgtgttgtggacgggagagcgcggaggagtgcggtggagaggagcagcgaaggagtctagagagaggggcgacgacacacaaggatgataagtaggcggcggaagctgaggtcgacgtagtacggccgcgtgacgcgagtgtcgccatggtgcgacgaagagagtaaccaaaagaaataagactaattgaataattagtatggagttatagagtgagagcaaggaaanttgtttggctgtgccagccacagtgtttatgtgtataacaccacaatcaactaccccaccgcagngaagaatttatggacgcactgttgataaacgcacacacatactcggctagcaccccgggatgacttcgtnagaatatagaggagagatgaggtggccgagcacgtgcaaaggcaattatagaacgcagcacaacgccggcggcgcctctggcgcgggagagctgggtntgtttnttnagggtcttttcttagcacangtatcacacgctgntttttgngagtatattgtggtgtgcgttcgnnnnggggncgcggcacgcagnatntnngggggggggngcggggagaggggagaggaacacagaaaagggccccc

SEQ ID NO: 955 - DNA, 483 bp, Glycine max
  misc_feature (471)..(471): n is a, c, g, or t
  Probeset Number=SeqID_10734
tccacaattcaatcttctcttcttcttcgtcatcgtcgcagagacttcaatggcggcttcgttctcactctcgagcctcatctccttcatctccccattcaaatcccagaccaaaccaaccccgcctccaaatctcactctccccgctccagcatcctcccacagacggagaaacgatctcgccgtggacgagcctcctccttcgaacgcctcgatttcctcggagctcgcgtccgtgatatgcccgtcgctggcgtacgcgaacacgctcttcttcagcagctcggggtacaacgtgcaggtgttcgtggaggacaacgagtcggaggagaggctggtgaatcggtttaggagggaggtgatgaggacgggggttatacaggagtgcaagaggaggaggtactttgagaataagcaggacgagaagaagcggaggactcgtgatgctgctaagcgtaacaagaaaaggcntccttatgcata

SEQ ID NO: 956 - DNA, 2262 bp, Glycine max
  misc_feature (1)..(51): n is a, c, g, or t
  misc_feature (2230)..(2262): n is a, c, g, or t
  Peptide Sequence Number=SeqID_9170
  Probeset Number=SeqID_10735
nnnnnnnnnnnnnnnnnnnnnnnnnnnnnnnnnnnnnnnnnnnnnnnnnnnagtttctttttcgttcaattatttctccccttttcttaaaatcgaatttaatcgaatccttcacaagtcaatatttatcacacccaaaagaatgcgtttcttctggccacactgttgatttggctgacacaaagtaaagaatcatattaatgtcatcaagaacaatgagtagaagactctatcatggggatgttgatggcaataggcattgagcctttgttgacttcgaacttggtttattcgaaattccaattttttgcagccgctttcaatattgattataataaaaaatttatcttttttaatctttgttcatcaacctccaaactttgtcttctccttactccagtttttcaaagaatccagtgagagccctcaaggctttgacttggatactgcaaagcaagaatatatccagcagtctcatcaaagtagctttgtccacgccctaatggactcaccggccaatgcacagatccactgcaaattgcatgatatctttctctgtatctcttctctgtcatcacccccaacttccattggacatttctcatcctcttaaccttattgtgcaatgggcttcactgccaattccttcttgtcatcgcatcctgcttctattgaaaacagtcaaataatttttagaagggtggggcggagaatattcgtaataataggtatgtttcctccaggtctgatgcatgtgttggaaggaaggctgagaagtttgtgtcatcttcttgttacttgcatgttatggtttctaaagcagtgctccaagacgcacttaaacaattgtggaaattggacttacccggacagggaagcttccttgcacttaaatcagacctttggaaggaaatgggatggcaaggttctgacccttcaacagattttaggggtggaggatttatttcattagagaatctcatcttctttgcgatgaagtatcctgattcattccagcgattattgcataaacaagatggaaccagagctgagtgggaatacccatttgcagtagctggaatcaatatttcttttatgttagcacagatgctggatcttcaagcagggcttccatcttctttgtccggaattcgttttctcaaattgcttgaagaagatgaaatggcatttgatatccttttttgtgttgcctttcaaatgatggatgctcagtggctagcaaagcgtgcgtcatatatggaatttaatgatgttttgagatccacaagaacgcagttagagcgtgagcttggtcttgaagacatcttcagcgtgaaagatttacctgcttacaacatgttgagatgatttgacgattgcctttcagttcaacatttctcttccttttttttttttgtttcttttggcggagaatgttacatgaaatgtatctataaagcatttgtcattttatctctataaagaaacgtgaaaatcaaatatcagatcaatctttctgctgatttccatcaaactaaaatataaaaataaaaatcccttaacatgaaataaaggaatggaaagagagacgatataggcagtgcagcacacaacaccaccatccatatgataaaaagatttgtaacgggtacaccctttccctcactcaactctttggcttgatccactttacaacctgggcagtcctcgtagtacttcctctccaacaatggttgtttaacattttcctctcccatgtttgtgagagacccccgtcacttgttttcctcaggtccctctatttttacaattatcattcaaaccaagattattgattgaaaacaaagtctccacagtatcatttagtggagacttcacgtcttcgttaatcttctctgtaagttctgcttctggctgtctctcatctcgactactctcagcaactgtttcgtttccgattgatgcttcgtcatgtgttggttgcagggatttatctttatgcacaccttcggtttgtgtctttggtatatccacatcagttgattgatttgcatctgtttctttctctgctgtaatttcgcaatcatccttgttgtctaaagtctcttctgagtgcgtgaccactattgtccgtccatcgacatcgacatcaccagttaattttgtgttgctttctgatgtgatgtgtccttccggtgttgtataatttgtactgacattcgacacactnnnnnnnnnnnnnnnnnnnnnnnnnnnnnnnnn

SEQ ID NO: 957 - DNA, 613 bp, Glycine max
  misc_feature (1)..(1): n is a, c, g, or t
  misc_feature (521)..(521): n is a, c, g, or t
  misc_feature (548)..(548): n is a, c, g, or t
  misc_feature (572)..(572): n is a, c, g, or t
  Peptide Sequence Number=SeqID_9171
  Probeset Number=SeqID_10736
ntttttttttttttttttaaatgattttataattattattctaaatttaattaccaacccataaactattgtgtaaaatagaaggctttttgaataggattaacaaatgaacttgttataaaaataataatttcagcaaaatttatttaataatcaatattaacttcaccttcaacagtctcaccgtaatcaatgtttacttgtttggccattccacgcttctttaatagatctctaacaacatcaaccacactagcatcttcaatagtaggagggattttgggttcgtttccattcgagagctctctgagaacgtttctgatgattttaccacttcttgtcttgggaagtttgtcgacgacaaggcaatatctgaagcttgcaacagggccgatttcgtatctaatcttcttgatacattcggcttcgagctccatggggtctctttgtctgccagactttaagacaacaaagccgactgggatttctcccttgagttcatctaaagctcctataactgntgcctcaacaatatcatcatgacttgncagtacttcttccatttgggaggnactgagtctatgtcctgcagtattgataacatcatcgactc

SEQ ID NO: 958 - DNA, 2071 bp, Glycine max
  misc_feature (85)..(85): n is a, c, g, or t
  misc_feature (97)..(97): n is a, c, g, or t
  misc_feature (182)..(182): n is a, c, g, or t
  misc_feature (212)..(212): n is a, c, g, or t
  misc_feature (365)..(365): n is a, c, g, or t
  misc_feature (378)..(378): n is a, c, g, or t
  misc_feature (392)..(392): n is a, c, g, or t
  misc_feature (430)..(430): n is a, c, g, or t
  misc_feature (442)..(442): n is a, c, g, or t
  misc_feature (458)..(458): n is a, c, g, or t
  misc_feature (568)..(568): n is a, c, g, or t
  misc_feature (607)..(607): n is a, c, g, or t
  misc_feature (609)..(609): n is a, c, g, or t
  misc_feature (677)..(677): n is a, c, g, or t
  misc_feature (690)..(690): n is a, c, g, or t
  misc_feature (743)..(743): n is a, c, g, or t
  misc_feature (758)..(758): n is a, c, g, or t
  misc_feature (761)..(761): n is a, c, g, or t
  misc_feature (779)..(779): n is a, c, g, or t
  misc_feature (817)..(817): n is a, c, g, or t
  misc_feature (819)..(819): n is a, c, g, or t
  misc_feature (827)..(827): n is a, c, g, or t
  misc_feature (830)..(830): n is a, c, g, or t
  misc_feature (863)..(863): n is a, c, g, or t
  misc_feature (907)..(907): n is a, c, g, or t
  misc_feature (925)..(925): n is a, c, g, or t
  misc_feature (940)..(940): n is a, c, g, or t
  misc_feature (954)..(954): n is a, c, g, or t
  misc_feature (970)..(970): n is a, c, g, or t
  misc_feature (1013)..(1013): n is a, c, g, or t
  misc_feature (1027)..(1027): n is a, c, g, or t
  misc_feature (1036)..(1036): n is a, c, g, or t
  misc_feature (1043)..(1043): n is a, c, g, or t
  misc_feature (1055)..(1055): n is a, c, g, or t
  misc_feature (1064)..(1064): n is a, c, g, or t
  misc_feature (1103)..(1103): n is a, c, g, or t
  misc_feature (1113)..(1113): n is a, c, g, or t
  misc_feature (1141)..(1141): n is a, c, g, or t
  misc_feature (1189)..(1189): n is a, c, g, or t
  misc_feature (1209)..(1209): n is a, c, g, or t
  misc_feature (1212)..(1212): n is a, c, g, or t
  misc_feature (1217)..(1217): n is a, c, g, or t
  misc_feature (1229)..(1229): n is a, c, g, or t
  misc_feature (1259)..(1259): n is a, c, g, or t
  misc_feature (1276)..(1276): n is a, c, g, or t
  misc_feature (1306)..(1306): n is a, c, g, or t
  misc_feature (1341)..(1341): n is a, c, g, or t
  misc_feature (1345)..(1345): n is a, c, g, or t
  misc_feature (1377)..(1377): n is a, c, g, or t
  misc_feature (1464)..(1464): n is a, c, g, or t
  misc_feature (1466)..(1466): n is a, c, g, or t
  misc_feature (1481)..(1481): n is a, c, g, or t
  misc_feature (1502)..(1502): n is a, c, g, or t
  misc_feature (1526)..(1526): n is a, c, g, or t
  misc_feature (1539)..(1539): n is a, c, g, or t
  misc_feature (1567)..(1567): n is a, c, g, or t
  misc_feature (1577)..(1578): n is a, c, g, or t
  misc_feature (1581)..(1581): n is a, c, g, or t
  misc_feature (1583)..(1583): n is a, c, g, or t
  misc_feature (1645)..(1645): n is a, c, g, or t
  misc_feature (1648)..(1648): n is a, c, g, or t
  misc_feature (1701)..(1701): n is a, c, g, or t
  misc_feature (1708)..(1708): n is a, c, g, or t
  misc_feature (1730)..(1731): n is a, c, g, or t
  misc_feature (1734)..(1734): n is a, c, g, or t
  misc_feature (1737)..(1737): n is a, c, g, or t
  misc_feature (1740)..(1742): n is a, c, g, or t
  misc_feature (1744)..(1745): n is a, c, g, or t
  misc_feature (1747)..(1751): n is a, c, g, or t
  misc_feature (1758)..(1758): n is a, c, g, or t
  misc_feature (1760)..(1761): n is a, c, g, or t
  misc_feature (1766)..(1767): n is a, c, g, or t
  misc_feature (1769)..(1770): n is a, c, g, or t
  misc_feature (1773)..(1773): n is a, c, g, or t
  misc_feature (1776)..(1776): n is a, c, g, or t
  misc_feature (1779)..(1780): n is a, c, g, or t
  misc_feature (1783)..(1784): n is a, c, g, or t
  misc_feature (1786)..(1786): n is a, c, g, or t
  misc_feature (1788)..(1788): n is a, c, g, or t
  misc_feature (1833)..(1833): n is a, c, g, or t
  misc_feature (1840)..(1840): n is a, c, g, or t
  misc_feature (1852)..(1852): n is a, c, g, or t
  misc_feature (1854)..(1854): n is a, c, g, or t
  misc_feature (1857)..(1857): n is a, c, g, or t
  misc_feature (1864)..(1864): n is a, c, g, or t
  misc_feature (1866)..(1866): n is a, c, g, or t
  misc_feature (1869)..(1888): n is a, c, g, or t
  misc_feature (1890)..(1894): n is a, c, g, or t
  misc_feature (1896)..(1899): n is a, c, g, or t
  misc_feature (1901)..(1923): n is a, c, g, or t
  misc_feature (1925)..(1926): n is a, c, g, or t
  misc_feature (1928)..(1935): n is a, c, g, or t
  misc_feature (1937)..(1939): n is a, c, g, or t
  misc_feature (1953)..(1953): n is a, c, g, or t
  misc_feature (1957)..(1958): n is a, c, g, or t
  misc_feature (1969)..(1969): n is a, c, g, or t
  misc_feature (1972)..(1972): n is a, c, g, or t
  misc_feature (1977)..(1977): n is a, c, g, or t
  misc_feature (1986)..(1987): n is a, c, g, or t
  misc_feature (1993)..(1993): n is a, c, g, or t
  misc_feature (2057)..(2057): n is a, c, g, or t
  misc_feature (2060)..(2060): n is a, c, g, or t
  misc_feature (2064)..(2064): n is a, c, g, or t
  misc_feature (2068)..(2068): n is a, c, g, or t
  Peptide Sequence Number=SeqID_9172
  Probeset Number=SeqID_10737
gatagagagtaagcatcaactagcacacatacactactacatacatcacacacagagtacagtctgtacgctagctacttatatnaatacgtcattntatacactactccactaggacaggggagtgagcgcagcgcgcgcacctcacactcgctacactatatataagcatcatcgcaaangatagagcaagtcgcgccgcctctctattnaccacgtcgtgtcggtattatcgtgcgcacatcataactaatgaagatacgtcgtactatgagcaagctaagtacaaggcagcagctccgtgcgagtcagcccatcgcactatgagtagtatgattatgtgatgcactctcatcggctggcgncgcgatcaggcgnaccaacgagcacgntaacgagatctagtcgactatatacatcatctacaaantacaggtcagtnagctatatcgaccatnatgtaatggctagtgtacgcagtgtctcacgcgcgcgctagcgtgtcagtatgatataatagtaagtatcatatcctgcgcgtgcgcgcacaatacttaaaggcgcagcntatattagttcttcatgctcctccagcacgagtgctcgncncgagctcatatattgttcattgtctagagtaccgcacgatagaatgcgagctgtagagcgagatagcngggtacagtatgncgcgcgccctacatctactgcgcgcgaatcgtagacgaagatattactagatnatatgtgatacgcancgnataagacgtgcaggccgncatcgcacgatactcctcgtctcgcgatagtataagcntnatatacgntanatagtgatgtactcggcgtgacgacgcgcgagncgcacgtcgaaatatcgaaattagctcgtgcgatcactggagancgtatatctatatatagnacttgttacatctcntataccgcgccgcntcgcgccgcgcgctcnagtatatatctagatacgagacgtctgcaatcgcgacagtaangttatatgatgtgngtgcgcganctcatanagtgacgagctnttagatagnagcgcagcgcgggcactatcgatacagctcgctactatnatatagtgantatattatagtggtggtatgagcgcgangacgtagcgctttctctatgttccactgcctcaccgacgtgacgcgangcgagctgctactcagtatngtntgcantgtactcatganatagtatactgatgggtagtcgcacgacgncagatgctgcgtccctnagtgagatcgcgaactctcgcacgaggtgngctacatcccagcacacatatatctactacgaggntgantgatacatatacgtcgctcgtgcgctcatgangcagactctcccgacgacacccagctgctgcattgagtagtctatctgatctatcatatcaatcatatgtacgtacgatatagtgtntngtacgcgctttgctncgttacgacgagctgctcatngcactactagatcatatagctctncatcgattacacntatcgctcacatgtgaacaaatgctttngccagacagnncgncnagtgagatgtgcgagtgatgtcgggtcgctgcgtgtgtctcgcacggagacgaccgtgctanatngagatggatgagatgcgtgacacgtctatgatcgtcaggtcgaagtagtgtangtgatcnatatatgcactacacatctganngangtntgnnncnncnnnnnccccctncnnttttnncnntcntantcnncanntntncgttctataaatactacgacgagacagcgactgtgcttagtggtngctatgnatcagcgatatngnagngggatgngncgnnnnnnnnnnnnnnnnnnnntnnnnncnnnncnnnnnnnnnnnnnnnnnnnnnnntnngnnnnnnnnannncccgctcgtcatgncgtnncgtcgactgtnaantcatncagtaaccnncgcccngcgtccgcgctcgaccagacgcttttgtcgatcatatagtcgtgcgcgcgcgatcaagcgcatntancgcntcanagg

SEQ ID NO: 959 - DNA, 1398 bp, Glycine max
  misc_feature (1)..(1): n is a, c, g, or t
  misc_feature (12)..(12): n is a, c, g, or t
  misc_feature (137)..(137): n is a, c, g, or t
  misc_feature (139)..(139): n is a, c, g, or t
  misc_feature (142)..(142): n is a, c, g, or t
  misc_feature (148)..(148): n is a, c, g, or t
  misc_feature (363)..(363): n is a, c, g, or t
  misc_feature (682)..(682): n is a, c, g, or t
  misc_feature (707)..(707): n is a, c, g, or t
  misc_feature (806)..(806): n is a, c, g, or t
  misc_feature (995)..(995): n is a, c, g, or t
  misc_feature (1000)..(1000): n is a, c, g, or t
  misc_feature (1300)..(1300): n is a, c, g, or t
  misc_feature (1319)..(1320): n is a, c, g, or t
  Probeset Number=SeqID_10738
ntatgtgctgtnctcgcgtgtctcgtcgtgacggcggatctggtcgcgtaggcacagagcgcgtgagatcgtcgttgcatcgataccagcgcgcggcgcggagcccactcgcattcataagacgcgcactccgttcnanccncgtctntgggtcgtcgagtgagtgtggtgaggctcgcagctgcagatgtggaagtagcgatcactatatctgttcgagacagtgcacgccgctccaccgtcgcgatgatcatggtacgagtcgcgcatcggtgcatgtgagctcgtagtgatagttgttgtgttcagcgtggacgcgcgctcacgtgacgccggctgcccttgtgaggatcgcggcgtggngcgcgcgcgcgcgaggcgtcgacacgtccgcttctccgcgctgcccgatcgcccctcccccgtacatctctctctcttccacactgccgcgcgatattgttgctcccatactcctcagtctcgcgtacatcgacaatcgttcgtccgcctccactcaccgtgcgccgcgtgcggcgccgcactcgcaactagatatccccctgtggtggtaactcaaactcaacacccgccacacacgcatctctacccacgcaatgtacgattgttatcgtctcttcctcacctgcgcgccatccacgaccccaatgcatgcccccgncccgccgtggctcacagatcgtaanccgctctttattgtcgcgttcccccctaccacctcccgtcgcgctgtctgccccctacacctcctctcttccttcttctctgctcctagccgcttcttntactcgctgtgtgcgcgttctggcccgctcttgcgcgttctgctcacgtcccacagtagcccacgtctcgcacagacgtactcctcgcccccacagtccgcacgcggccgcccggcacaggtcgacctacgctcgtggatgctgatgcacctacgcggcacgacgttatcaaatgtctctacacacagnaagcnctatgcgttatccagttgttttgattctttcctctgtaagtcttgactcgctcactacccatagttgctatctgattgcgtgctggcgtttgtggtaatgccgggtagcggacagcactacgcccgaccggggcggccgccggcggcgacggacccccaccagtcgcatgcgcgaggagagaggatcggtggtatgagtttaatagtttcctaagctcgcggaggtgccgccggcgcagcccccggcgcagctcccccccactactcgcgacgccggccacgcgcggcgcccgccgacantcgcaccgccccccgccgnntgagggaggagggtccacacaccccgcggagccgtggcggccgccgaggggggggggggccggcgcggccggggggcc

SEQ ID NO: 960 - DNA, 214 bp, Glycine max
  Peptide Sequence Number=SeqID_9173
  Probeset Number=SeqID_10739
atctttcagagagagagggttcgactcttcagttcgccggatgtgtttctccggcaatcgtctcccgcgtcgtcgggctttgactctggcaagcggtggctacctgagcgccgcttggccggctactgcctctagcgtttgtcatcgatcctcttagatgaaaacggctagcttttcaccggatctttccagttttcctttttttttttttggg

SEQ ID NO: 961 - DNA, 606 bp, Glycine max
  Peptide Sequence Number=SeqID_9174
  Probeset Number=SeqID_10740
aatcatctattccccatatatctttcttgtacatataacttactttcaatcaggatcaccaggattattgtgattgtcatggtttcggaccatggatggtgtggtataggattagatcaatgcatctcatctcggcctaggtatgtgtgcggcaggggggcctacgggtaaacggggcgaggcgggacgggtggaacggccgccagggcgacacggctacgggaccaagccgggaagcggccaaggggcgacggccggaaggggggcaaacgggcctaaggcgcaaagggagaaccgcaccaacccggacggggcgaaaggcaaaacagcgcaaaccgggcacggcggaacgggggccaagggcacgagcgcgccgagggggacaggggccacgccgacgagagggaaacaggcgaacagcgctcgggacggcaaagggcccaaagcgcggggaggcgcaacacggccaatgggccgaaagggggcacagcggaagggcggcgacgagccgacaggggcggaacgggcgacacggcgcaaacgcggcgaacagagggcaaaacgggagaccgagcccgcacggagggacaaggcggacgcgggcgc

SEQ ID NO: 962 - DNA, 512 bp, Glycine max
  Peptide Sequence Number=SeqID_9175
  Probeset Number=SeqID_10741
aacgaaacattcgattcattctcgcgatcctctctgattcgaagctcaagccatggctcgtacgaagcagactgctaggaaatccaccggaggaaaagctcccaggaagcaactcgccaccaaggcggcgaggaaatcagcgccgaccacgggaggagtcaagaagcctcaccgttaccgtcccggaaccgtcgctctccgtgagattcgtaagtaccagaagagcactgagttgttgatccgcaagcttccgtttcagcgtcttgttcgtgaaatcgcccaggatttcaagacggacctgaggttccagagccacgcagtgttggcgcttcaggaagctgcggaggcgtatctggttggtttgtttgaagacacgaatctctgtgccattcacgccaaagagagtcaccatcatgcctaaagatattcaactggctaggcgtattcgtggagagcgtgcttagatgccatctcatctctcttcttcggcttttgatttcttttttggttgg

SEQ ID NO: 963 - DNA, 1514 bp, Glycine max
  misc_feature (12)..(13): n is a, c, g, or t
  misc_feature (62)..(65): n is a, c, g, or t
  misc_feature (68)..(69): n is a, c, g, or t
  misc_feature (74)..(74): n is a, c, g, or t
  misc_feature (76)..(76): n is a, c, g, or t
  misc_feature (78)..(79): n is a, c, g, or t
  misc_feature (208)..(208): n is a, c, g, or t
  misc_feature (411)..(411): n is a, c, g, or t
  misc_feature (478)..(478): n is a, c, g, or t
  misc_feature (535)..(535): n is a, c, g, or t
  misc_feature (588)..(588): n is a, c, g, or t
  misc_feature (881)..(881): n is a, c, g, or t
  misc_feature (1020)..(1020): n is a, c, g, or t
  misc_feature (1101)..(1101): n is a, c, g, or t
  misc_feature (1144)..(1144): n is a, c, g, or t
  misc_feature (1278)..(1278): n is a, c, g, or t
  misc_feature (1331)..(1331): n is a, c, g, or t
  misc_feature (1385)..(1385): n is a, c, g, or t
  misc_feature (1435)..(1435): n is a, c, g, or t
  misc_feature (1463)..(1463): n is a, c, g, or t
  misc_feature (1514)..(1514): n is a, c, g, or t
  Peptide Sequence Number=SeqID_9176
  Probeset Number=SeqID_10742
gggggtgttttnnggtggggtggtggaggggttggtagttagttggagtgttggatgtgtgnnnnaannaaaananannggaaagcatacatagtgcttctcacatcgaatcctgtgcgtcctgactgaatcagaacttaaagcacacaggccttctgtccgcactccacacccgtgaccgtccgccggtgggtcgtgtgtcaatggntactgcacacctctctctcgccctacagctgtctatgccgactcgcattgctactggtcatctcatgtactactggtaattctcatccggggatatggtcgtaaacatctgtcgaactaaataacatacgggataaatccacctgccgctgtctctctatttactcatctacgataatctactatctatatatcttattttcncgtagaggcctctcacacataagacgaatgcccatatcgctcacgcgcggtcggccagcgcgccttnaccctctcacctgcatataccatcgctacgtcgccatccacaccttcaccgtgctgnatcacacagggagtgaggacagacgaagcagcggcagagacgcggaaacacgngagccaaaaaatccggtgacctcttactatttgtttgttcacttataatatattgggattatgttctcaacgatagggatgtataatcaatgggacggacgcagaaacctctcatatccaacctacatatcttcagtatggcagagtatgagactgagtgacaaccgcgagaacacacacaacactccacaacattgctctctgtggaccacacacccactcatacactgaagagctcctgcgactattctcgtcctcggagactatcgacctgtctcctatctctcacacgngcgatctcagtgtgtctctcagcaccctacccacctgacgcctactcatcattcacatcacaccacatgcggtcgcaccactcacgtatgatcccgcatgcgtgtctcatagaccgactgcggtcaattcactcgtgcnattcatactctcgctcaccactctcaatactcaccaaccgcacagcctgcactgtactcagacagctcgcactctactggncttcttccctctaccacgcaggacggtggtgagtgcgtcgggntggcgcgcgggagtcgagtgattataatgtctcggccgcgcgcgctgctcgcgcgcccgacaccatgcgtgctcgccttcttgcacgcgcgacctcctcgacacagcgtcgtgtgcagcgtcgcatgaccacangacaggcgtcacgagtgtgtgctggagttctcgcgacctccgctacacacgtnaagtctaacagccggtcacaaacaacacgatcgacgcgccgacttccatctccnctatcatctccgctaccgtcatctgcttctagcacacacgcgctcctatnctatctgagagcagtgcgtggcagtatncgctcatgatcagtcgcactgtgtatcaggacgacacgtgacggcgcgctn

SEQ ID NO: 964 - DNA, 439 bp, Glycine max
  Probeset Number=SeqID_10743
catccaacagcgaaacaaaatcttagtaaacacaactcaacaaaatcgccttatcacaaaaaaaaaagagaaaatcaaaacacatgactatgggtctgaagttctttacatgccttgttttgacggtctgcattgccgcatcagtagatgcagcactcacatgtggtacagtgacaagtagcttggctccatgtgccacctacctatcgaaaggtggggcggtggtgccgggtccatgttgtgcgggagtaaaaaaattgaatgatatggctcaaaccacaccggaccgccaacaagcatgcaaatgcctaaaggccgctgcaaaaagcatcaatccaagtctagcctccggccttcctggaaagtgcagtgttagcattccctatcctatctccatgagcaccaactgcgacaatgtcaaatgaagtgggacgcatat

SEQ ID NO: 965 - DNA, 487 bp, Glycine max
  misc_feature (2)..(11): n is a, c, g, or t
  misc_feature (13)..(15): n is a, c, g, or t
  misc_feature (17)..(17): n is a, c, g, or t
  misc_feature (19)..(20): n is a, c, g, or t
  misc_feature (24)..(25): n is a, c, g, or t
  misc_feature (27)..(30): n is a, c, g, or t
  misc_feature (32)..(37): n is a, c, g, or t
  misc_feature (39)..(39): n is a, c, g, or t
  misc_feature (41)..(42): n is a, c, g, or t
  misc_feature (44)..(44): n is a, c, g, or t
  misc_feature (48)..(52): n is a, c, g, or t
  misc_feature (54)..(54): n is a, c, g, or t
  misc_feature (61)..(61): n is a, c, g, or t
  misc_feature (63)..(72): n is a, c, g, or t
  misc_feature (76)..(79): n is a, c, g, or t
  misc_feature (81)..(82): n is a, c, g, or t
  misc_feature (84)..(87): n is a, c, g, or t
  misc_feature (90)..(92): n is a, c, g, or t
  misc_feature (95)..(95): n is a, c, g, or t
  misc_feature (99)..(101): n is a, c, g, or t
  misc_feature (103)..(103): n is a, c, g, or t
  misc_feature (105)..(109): n is a, c, g, or t
  misc_feature (112)..(113): n is a, c, g, or t
  misc_feature (118)..(118): n is a, c, g, or t
  misc_feature (122)..(124): n is a, c, g, or t
  misc_feature (127)..(128): n is a, c, g, or t
  misc_feature (133)..(133): n is a, c, g, or t
  misc_feature (139)..(139): n is a, c, g, or t
  misc_feature (143)..(144): n is a, c, g, or t
  misc_feature (147)..(148): n is a, c, g, or t
  misc_feature (153)..(153): n is a, c, g, or t
  misc_feature (155)..(155): n is a, c, g, or t
  misc_feature (157)..(158): n is a, c, g, or t
  misc_feature (160)..(160): n is a, c, g, or t
  misc_feature (162)..(163): n is a, c, g, or t
  misc_feature (165)..(165): n is a, c, g, or t
  misc_feature (167)..(167): n is a, c, g, or t
  misc_feature (170)..(170): n is a, c, g, or t
  misc_feature (172)..(172): n is a, c, g, or t
  misc_feature (174)..(176): n is a, c, g, or t
  misc_feature (179)..(181): n is a, c, g, or t
  misc_feature (185)..(185): n is a, c, g, or t
  misc_feature (189)..(189): n is a, c, g, or t
  misc_feature (191)..(191): n is a, c, g, or t
  misc_feature (198)..(198): n is a, c, g, or t
  misc_feature (200)..(200): n is a, c, g, or t
  misc_feature (205)..(205): n is a, c, g, or t
  misc_feature (208)..(208): n is a, c, g, or t
  misc_feature (221)..(223): n is a, c, g, or t
  misc_feature (225)..(225): n is a, c, g, or t
  misc_feature (233)..(233): n is a, c, g, or t
  misc_feature (238)..(239): n is a, c, g, or t
  misc_feature (246)..(249): n is a, c, g, or t
  misc_feature (252)..(254): n is a, c, g, or t
  misc_feature (261)..(261): n is a, c, g, or t
  misc_feature (264)..(264): n is a, c, g, or t
  misc_feature (266)..(266): n is a, c, g, or t
  misc_feature (272)..(273): n is a, c, g, or t
  misc_feature (276)..(277): n is a, c, g, or t
  misc_feature (282)..(282): n is a, c, g, or t
  misc_feature (286)..(286): n is a, c, g, or t
  misc_feature (294)..(294): n is a, c, g, or t
  misc_feature (299)..(299): n is a, c, g, or t
  misc_feature (302)..(302): n is a, c, g, or t
  misc_feature (307)..(307): n is a, c, g, or t
  Peptide Sequence Number=SeqID_9177
  Probeset Number=SeqID_10744
cnnnnnnnnnncnnngncnncgtnncnnnngnnnnnntngnnangatnnnnngncacgccngnnnnnnnnnncggnnnngnncnnnncgnnnccnccgnnntncnnnnnccnnccgcncccnnngannccgcnccgggncacnnccnnaccangngnngncnngngnggngntnnngannngagntccncnccccgancnggggnggnagggtacaaacannncngagggagngagtnngccactnnnnctnnnaaaaaanggngnggtcgnntcnnacccnggtncacaaggngaatnganctgcntgatgccgaagcggagagagacagctgctgagtgaagcaagggagagagacgccgacggtttccgagtgagatgatgatagcctcgaagatgatgcgacggtgactcgcggaggagctccgattagcagcgacgccatcgtctgtgtgtgtttttgaggaaagataaggtttgaagaaat

SEQ ID NO: 966 - DNA, 694 bp, Glycine max
  misc_feature (694)..(694): n is a, c, g, or t
  Probeset Number=SeqID_10745
ctgagatggatgttgcttctgctaacgcagttgaatttgctctgaagaatgacactgagatgggtgttgctgcctctgcttctgccaacgcagttgagtttgctctgaagaatgatactgagatgggtgatgctggcaacttggttgaggaggctctggagaatgtcacggcgatggctgatgccgtttctggtgctgataatgcagtcaaggagtctgacatgaacaggggtgatgtagaccaagagaagagtggtgaggacatggctggtgcaggttcagagaagaatgcagagatggctgatactactggaagtggagaggaagagggcaaggagcaggcctgatgctccagctagaaaacggtgaatagagcaagcaggcctaagctgaaggtgggggcttggagatggaagatggacagtggaaaaatgcacaagggtttccttccctggttgtttgttactgtacatacttgcagatgaagccatgcggcgtgtttcggtcttggggactgaaacgtcgcgtgcccgaggcggtggtttgtcggcgtcggtgatgttatatgtttgttgccattttgagttctctatattcggaacctgtagtgttttagcggcctagctaagctgctgctcaaggtggtagtaagatactcctatggatttgttgctactgttaagatgatgttgtn

SEQ ID NO: 967 - DNA, 1909 bp, Glycine max
  misc_feature (13)..(13): n is a, c, g, or t
  misc_feature (16)..(16): n is a, c, g, or t
  misc_feature (31)..(31): n is a, c, g, or t
  misc_feature (130)..(130): n is a, c, g, or t
  misc_feature (403)..(404): n is a, c, g, or t
  misc_feature (420)..(420): n is a, c, g, or t
  misc_feature (436)..(436): n is a, c, g, or t
  misc_feature (717)..(717): n is a, c, g, or t
  misc_feature (1131)..(1131): n is a, c, g, or t
  misc_feature (1303)..(1303): n is a, c, g, or t
  misc_feature (1518)..(1518): n is a, c, g, or t
  misc_feature (1550)..(1550): n is a, c, g, or t
  misc_feature (1583)..(1583): n is a, c, g, or t
  misc_feature (1585)..(1585): n is a, c, g, or t
  misc_feature (1606)..(1606): n is a, c, g, or t
  misc_feature (1673)..(1673): n is a, c, g, or t
  misc_feature (1699)..(1699): n is a, c, g, or t
  misc_feature (1731)..(1731): n is a, c, g, or t
  misc_feature (1737)..(1737): n is a, c, g, or t
  misc_feature (1762)..(1762): n is a, c, g, or t
  misc_feature (1779)..(1779): n is a, c, g, or t
  misc_feature (1783)..(1783): n is a, c, g, or t
  misc_feature (1897)..(1897): n is a, c, g, or t
  misc_feature (1906)..(1906): n is a, c, g, or t
  Peptide Sequence Number=SeqID_9186
  Probeset Number=SeqID_10746
ctttttttttttnttnttctattttttattnaatttccccctacccgcttattcgcccctactcgctgcggcccagtcacactctacaaagtcctacacaacattatcttatcctatacatagagcaatncgacgtgcgaggtgtacgatgtataggtagccgtaaacgaggatacttatcgtatttactagcatatgataaatataggacaaattgacaccgcctgtgccgcatcttgtcccgccgtacaatcaattgataggaaaccagacagaacaagagcagggacgacattttgtcgcggaggctaccacttgaggaggacaggggacggtatatatgtggtgtttgtgcgcgcgacgcggagtgtaagtgataggtgcatgtcgctcctctgtcccnnctgtactcccgagtcncctctgtccttctccnctctctcgtctgtggtggtggctcagcggcatccacacaccatcttaattagatcaccctttatacgacactcataccagctgcatatgtactgtctagctccactcaacccagcccacgtcacacaccactgcgccatactaactcacagtcgcaccacacatacccgatcccaagaaagcacgagacgctatgtgatggcatgaagattattctacgccgtcgcgcacgcgacgctcacgatggagagagatttaatcagtatgctcgaagcattgcanaccgcggtggattagattgggtttgcagtgcgctgagcggatgttgttatatgtgacgcacgggaggtacgactgagagtatgtgagagacatgcagcactgtgggtggcgcagcatgatagtgaatacaggtgcctatgatggcgagcatcgcgagggcgtatgagcatcaagtcgacatcgtcgtgcgtacaggctattaatagtatatgatgtggtacgcgagtgcgcgcgtgtgcggtgagaagggaggtggcgcgacgtgggaggaggagagatgtcatccacgtcgctagtgtgttgtggtgtactgtcgtgtggttcgagtcgcagtggctggcggttgagtgttgcggagtatgtcgcagtgtggctgcgcgatgtcgagatctagagatatattgatatgataanaccggctacgtcatgaagatcttgtaccgcgtcggtattcgctgcgcggttcggtattgtcccttcaaccggtgctcgtgctcttgagatcgctgcgttatctccaccgtcgccgtctgcgtcggtgtgtctgtctcgtgcgcacgctactgactctcatcgtctctctgtngtcttcaacgcctgctctccactacccgtttatcgcgtcggccatctgatatcggcgatgttatagcgaggtgttggtccttaacgttgacacatatgcgccgtatctcacgctggtcgcgacacacgctacatctactcatcatctatgctctcctacgcatatgtgacactctatatatatactaactgactacatattatgtcgatcactcnagtcgtcgtgaatgcacaaccacgcgcgagcncacgttaatataacgcgctagcatgaagctgcncntgcatctactattgtgtatgncgctcgtgcgcgtatagctttcgtcacttcgctaggcacgctcgcgacaaatacttgtacgcaatangatgggcgccgatatctgagtctccnctgcacgtcgcactccgtccactctgtctcgncgttgnctcggccgcactcggctgagtactngctggtcgtagctgccntagnattagactagtggtggtgggacgtgagtgggctatcatgtcggacgacgtagtgagagcgtgcggtgttgatgatccgtgtagtctgtctacgcgcccgcgacgcgctcgagcncgcgtgtangcg

SEQ ID NO: 968 - DNA, 410 bp, Glycine max
  Probeset Number=SeqID_10747
atttctgaacttttacgttttggggacaagatggagaagaaggtagctttggtgttgtcgttgatgttgcttatgtctatgaactcggtgttggtttcggctgaggaagcagcaccaacggttggacagagggtagacacagccaccaacgacgttaccaacttcttcaatgaacatgccggtcctgccgccgatacggtctcctctacagccaagtcggtctacaactggtttggtgataaagccaaggaatggggcctctaaactatatgttttatgagcgaaggatttgcggacttgggattggaagcattttcatgtattagagtttgatatccgtgtactattttatgtaagattaacattataataagaaagatatacaatttgatcaaaaaaaaaaaaaaaaa

SEQ ID NO: 969 - DNA, 828 bp, Glycine max
  misc_feature (601)..(828): n is a, c, g, or t
  Peptide Sequence Number=SeqID_9187
  Probeset Number=SeqID_10748
acttccattgtatcttttctagggtttttaaggtttccgcacgaatcttcaatacacgtatcaatatcatcatgactaccgaagagaaagagatcctcgccgccaaattggaagagcagaagatcgatcttgataagcctgaggttgaggacgctgacgacaacgatgaggatgactccgaagacgatgataaggatgatgatgcagagggacaagatggagagggaggcaagtcaaaacaaagcaggagtgagaagaagagtcgcaaagccatgttgaagcttgggatgaaacccatcactggtgttagccgtgtcaccatcaaaaagagcaagaacatcatgttcgtcatatcgaaacccgatgtgttcaagagccctgcgtcagacacttatgtgatcttcggagaggcaaagattgaggatttgagctctcagatccagtcccaggccgcagagcagttcaaggctccggatctcagcaacgttgtctcgcaaggtgaatcttcgtccagcgctgcagtggttcaagacgatgatgaggagattgacgaggatggtgttgacgcaaaggacgttgagttggtgatgacccaagcggnnnnnnnnnnnnnnnnnnnnnnnnnnnnnnnnnnnnnnnnnnnnnnnnnnnnnnnnnnnnnnnnnnnnnnnnnnnnnnnnnnnnnnnnnnnnnnnnnnnnnnnnnnnnnnnnnnnnnnnnnnnnnnnnnnnnnnnnnnnnnnnnnnnnnnnnnnnnnnnnnnnnnnnnnnnnnnnnnnnnnnnnnnnnnnnnnnnnnnnnnnnnnnnnnnnnnnnnnnnnnnnnnnnn

SEQ ID NO: 970 - DNA, 430 bp, Glycine max
  Peptide Sequence Number=SeqID_9188
  Probeset Number=SeqID_10749
ccgagaaatggggtgagaccaaggcgatcagcaaaatgaggatatcaaggagcatattggaaaatatgatgaagaactagaggatgtatgacagtgcgtgagttggtgtctggggtaccagattggtgacaggatggcggtgagagtgtttttactagaggatcaatgtgagacgaaaagcaaggacaatgtcaatgacaatgtggttgcatctgtgcaataccgagctgagtatgaaaaagcatctgatgcattctatagggttaccaacacgagggagcacatccaagcatatgtttatgatgacgtcagggacagtgtaacagagagggagccggagtctgactttgagcataaaaatgatataaaaaaggatgtggagaaggagctggagaaggacatgtgaaacgatggatttgagaaaggacag

SEQ ID NO: 971 - DNA, 1629 bp, Glycine max
  misc_feature (29)..(29): n is a, c, g, or t
  misc_feature (34)..(34): n is a, c, g, or t
  misc_feature (55)..(55): n is a, c, g, or t
  misc_feature (72)..(75): n is a, c, g, or t
  misc_feature (117)..(117): n is a, c, g, or t
  misc_feature (130)..(130): n is a, c, g, or t
  misc_feature (202)..(202): n is a, c, g, or t
  misc_feature (255)..(255): n is a, c, g, or t
  misc_feature (391)..(391): n is a, c, g, or t
  misc_feature (483)..(483): n is a, c, g, or t
  misc_feature (1045)..(1045): n is a, c, g, or t
  misc_feature (1166)..(1166): n is a, c, g, or t
  misc_feature (1403)..(1403): n is a, c, g, or t
  misc_feature (1429)..(1429): n is a, c, g, or t
  misc_feature (1489)..(1489): n is a, c, g, or t
  misc_feature (1508)..(1508): n is a, c, g, or t
  misc_feature (1516)..(1516): n is a, c, g, or t
  misc_feature (1582)..(1582): n is a, c, g, or t
  misc_feature (1606)..(1606): n is a, c, g, or t
  misc_feature (1629)..(1629): n is a, c, g, or t
  Peptide Sequence Number=SeqID_9189
  Probeset Number=SeqID_10750
ttttttttttttttggtttgttgtttttngtgtnagtgagtggaggggggcaganaacaaaacaaaacctannnngaattctagtacttacaacatatatatggtggagggcgtggnttgtttgctgatngggttggtctggtcttttgctctgcagcgtgtgacttgtgatattccatcacctccttttctctccgccgtntttccctctgtgtcagcacgagcagcaccatatcgcgcacgcagccgaactgnggttgttcgtagggcgtctactgtccactcgtactattattctatctttcattatcatttctgttctctaacaaagcgcaggcctacgacgcgtccgcgccgccgcacccccgccagtgcgcggacagataacacncataatacacttaatatagttagaataacataatcgcactttcgaacattataaaatattttatctccttaatctactaacttattatgcgngtgattctttcactggatcagcacgtcggaaacacaaaatacaccactaatactgacatctccacatcgtggcgaggatatggtgggttaccacacaccgcggacgatagtgtatgtttgcgggtgtgggagagtggtgttctacgtaatcatgagagtgcttattattaatatatatatgaacgcaacattagatatgccttggaatgagacacacgtgttatttccacgccagcgcatggtgcgcgtcgatgcgattgtagggatcgccaccacccaccgcggtagaagcgcggcggtcggactagaagtttgaacacagcaacaacgattaccgtgctccgatgcaaactgagggatgccaatgagaggtgaaagctgcatggacgaccgtactgtagtagtgtgatgtgagtagcatctgatataggattgatatatacatgtgatgtcaatctagatacgaatataacacaggactttaattgaataatgcatcagtcggtgcgctgtactaatgtaatgactacgcacggaccccgacaacgcaattgccagcgcncgcatactacctatcgaattacagcattcgtttatcttatctcacgtaaactatatgattatatatcgcatcacgtacacacacacatccactaggagacgcgagacacatcgcgagcgtnggacagcacggtgccagactggtcttactcactcatataaacgacacaactcgtacgtgagtatggaacatacgaccacaatagacgacacacgtaactcgatacatacagataatatcgcagcatcacgtcgcgcatccactgatgtgttgatagtcgtgctcttgacaccacataggaatgtagcggagagaccgatctcctgagaactgccgaacactacgtagcacgcgaatntgcactcctcaaacactcatatacgnagctacgatgaatacatcaaatagaaacctacggcacggacttgttgatacgagtagctntgcgttctaaactcttttnttgaatcntattatattgggtatacttatgtgtatgggtgagttgtgaataggatggacaaggatatgacatanatatgttcacaccgctcgtgcacncatgacggagaattcctgtccgn

SEQ ID NO: 972 - DNA, 939 bp, Glycine max
  Probeset Number=SeqID_10751
gctccatcaaagaagaacaagaatgaggattatgacgatggtgaagactatggcggcgacagcggctcagaccaaagcgagacaatggaccaatatcaagatgactatgattttgaaggaggaaatgggaagagtggcaagggaggaagagacaagtcaaagggaagaagagataactcactgaacgtcttgacaagaaagtttattgatttgatcagaaagtccccaaaccaaacagtcgatttgaataatgcagtcaagattttgaatgtgcagaaaagaagaatctatgatattacaaatgttttggaaggtattcaatacattgagaaggtgctcaaaaacaaaatcaagtgggttggaaagcaagtgactgaggaattagatgacaagataaacgaattggaagaactcgaaaacttgcaaaaagaagaaagtgacattgatcattggatcaattatttacaggagaacctcggtgatttgaccaaagatgaagtgaacaacaattattcttatgttacctttgatgatgtgaaatcagtcaatacccttgccagagaagacgatcagccatttttggtgatcagagcaccaaagggaacagtcctggaagttcctgttgttgataacgagaccgaagaaaacttccctcatagaatgcaacttacaagtcaggatgaagagattctcatttacgttgtatccaatgatcaaaatgctgccccaggtggtgaagtcacaaagttgaacagatgatgataatccaacaatatttattttgactttttattaaaaataaaaatctgaatggaaattcccataactcgaatttttttttatctttcagtctggtaatgtctctaattttaattttgtttaagctataccggtatatatctctctatgaactatctatttgtttctccctgttttatt

SEQ ID NO: 973 - DNA, 1388 bp, Glycine max
  Peptide Sequence Number=SeqID_9190
  Probeset Number=SeqID_10752
aattcctattaaaaaaaaacaaaaattctattcacgttaaaaagtagttgctaacacttaaaaaatgaatgctatggtagaaacatatggccaagaagtggccctccacgcaaatgaaaaactttccattgactcttttactcttatgtgtgtcattggtaaaggctcctacgctgaagttatcctagctcgtaagaaggatactggcaaaatatatgctctcaagatccttaagaagaagaagatcgagcaaagaaaccagaaagaacatgtcagaacagaaagaaacatccttaccgaaatgaaccatcctttcttaatcaagatggcattcgctttccaaactgaaaagaaactctactttgccctcgaatactgtcctggaggagaactctttaaccttcttcaaaagaagagacgtttctcagaagaccacgctcgattctatgcgacacagatcgtacttgcactcgaacatttacacaaatatgacataatctacagagatctcaagccagaaaatgtgcttattgattctgatggttatatccgtttaaccgatttcggtctctccaagactggaatccaaggcaacaagggagcatactcagtctgcggaactcctgaatatctcgctccagaaattcttttccaaagaggacatggcaaggctgttgattggtggacgctaggggctattctgtttgaaatgcttactggacttcctcctttctacactaataacagagaggagttattccaaaagatcaaatactatgctcttaagtatccaccatacctcagtcctaatgccagagcccttcttgatggacttttccagaaggaaccttccaagagacttggaagcggtactacaggtgcagaagaaattaaggcccatccatggttccacggagtggattggaatatgatttacaataaggagttcaaggcaccttttactcctgttattaagaatgatgttgatgtgtctaacttcgatgctgaattcactgaagctcctattggttcgctgggatcaattactgatactactgcagatgtagatgcaagctatactggatggagttattgtggaaatgaacttgaacaacaaggacagggattggatagaccttccactatggaaatcgaataagagacagagaaatagattgagggatcagaaactaaaatgtaaataaaagtctgatgatccggttagaagtggaatttactatgattagccactttttttactaagagaaaaatttgctaaaaggtcttataccttgagttatttatttgaaagtaaatatataacgatatttttcaaccctactataattactatttcacattaaaaagtaaaagcataaaataattct

SEQ ID NO: 974 - DNA, 1412 bp, Glycine max
  misc_feature (1)..(1): n is a, c, g, or t
  misc_feature (32)..(32): n is a, c, g, or t
  misc_feature (67)..(67): n is a, c, g, or t
  misc_feature (122)..(122): n is a, c, g, or t
  misc_feature (127)..(127): n is a, c, g, or t
  misc_feature (129)..(129): n is a, c, g, or t
  misc_feature (155)..(155): n is a, c, g, or t
  misc_feature (166)..(166): n is a, c, g, or t
  misc_feature (182)..(182): n is a, c, g, or t
  misc_feature (323)..(323): n is a, c, g, or t
  misc_feature (333)..(333): n is a, c, g, or t
  misc_feature (350)..(350): n is a, c, g, or t
  misc_feature (371)..(371): n is a, c, g, or t
  misc_feature (432)..(432): n is a, c, g, or t
  misc_feature (463)..(463): n is a, c, g, or t
  misc_feature (533)..(533): n is a, c, g, or t
  misc_feature (631)..(631): n is a, c, g, or t
  misc_feature (762)..(762): n is a, c, g, or t
  misc_feature (775)..(775): n is a, c, g, or t
  misc_feature (779)..(779): n is a, c, g, or t
  misc_feature (865)..(865): n is a, c, g, or t
  misc_feature (880)..(880): n is a, c, g, or t
  misc_feature (1141)..(1141): n is a, c, g, or t
  misc_feature (1143)..(1143): n is a, c, g, or t
  misc_feature (1198)..(1198): n is a, c, g, or t
  Peptide Sequence Number=SeqID_9191
  Probeset Number=SeqID_10753
nagacgtatatgtcgaccgagtaagagtgacngctcactaccagtgctcttcgcatgcagacggtancactcgatcatgtctgcctctatactcacacacacactcatctcgcgacgtatcntacananctgacgagagcacgacacatacacgncagcgagagcnaacaccctcaccacanctctcgctgggatgagcacctctcgttcgcgcacccacgcacgcagtcactcatcccgcgccaacgagaagtgaggagcggcctgatatcatctaagagactccgcactcggcggatggcacattcgcgcgcgtgcgttgnccgagcaggnatatagggaacgctcgnccctcctgcggagcgcgtacncggggcgcgttatcctgctcatttcgcgtgttggagtgatctgtgctgcgcgcccgtgctncgtcttctctaacacttactccacacaagcnagatacggcgagcgcgccttacaacgcgggagcggcttctgcggtgcgtctacaccaccactagcggggngctgcagcaccactatttgctctaacaggcgtctcttacctttcgcactgcccctcggaagataaaaacgaggggcgggagctcgctccctccgaggnaatgtggcgataggtcttagcaccggaacaggggtgttagccgccggccgggcgagggtctaactagagacgccctaaagcacacggtcaagaggggaggagacggccgctgtgctggcaacgcgatgtanaagagccgcctcnttgnagtagtcccgccacgcatccagccactctaggaagaaaggacgccactccccgacggacgtgatctcgctaacacgctcacggganggggtggcttccctngctctagaaggacaaggtgcgcagagaactgcctccggttcactaacaaactatatgttcactccgactccacgaggggctctatgctaggctttgactctgacactcatcagacagtgctgacattcgagcagactaagacgagggcactgggtcggccagccacactccattgcgtcatggcacagtgactgcgagcggttcgagatgcgcgctactatcagcatatcatccagtgacatgatatggagctacctcagngngttggatatcctacgctctccatacgtactatatgttatatttaaatgagaaagnagaagagcactagacaaggccattgtgcggggcatgccctccggagggcacttgggaaggtagttcccgagggcagacgaggccgggcgcgacgcctcccactggaggacttggcaggccttttaggtgaggggggggggggccgcgccacggtgcgccgtcgaagcgcgccgtggcagagcacggcgcggaggccgcgtgccggttctcacca

SEQ ID NO: 975 - DNA, 588 bp, Glycine max
  misc_feature (43)..(44): n is a, c, g, or t
  misc_feature (51)..(63): n is a, c, g, or t
  misc_feature (424)..(424): n is a, c, g, or t
  misc_feature (478)..(478): n is a, c, g, or t
  Probeset Number=SeqID_10754
accgggagagaaaattggttcggggtggggggaggagatttgnnccctctnnnnnnnnnnnnnatattttaaaggttatatcgttccaaaaagaacttagtttggttaagaagtccattcccccttctgaatttcccaaagggtacccaaattgtaagaaatgtggatccagcatccctccatcctgtaaattgacagaagcttgagggaaatcatcttccaatacttggcttagaggaaaacctttcttgtgtttcgctgcagtaaggttcagtgctctgttcaccatctttaaccaggcgcagaccgcccaatcccagaaaatagccatgtttgagattaggaaccaatgggagttgaattctttaccttcaagtaatcagaataataatgatcgggttgcggaagtttacaagtaatgctnctgcagtagagtccaagcccagagagatggggccaagaaccatttttaaacatncacatactatggagttgttagtggagagtttctaatgggaaagtcacgaatacaagttgattagacaggtgactggttcatcacctgaaagtacatcacatcaatctagc

SEQ ID NO: 976 - DNA, 1588 bp, Glycine max
  misc_feature (36)..(36): n is a, c, g, or t
  misc_feature (58)..(58): n is a, c, g, or t
  misc_feature (141)..(141): n is a, c, g, or t
  misc_feature (256)..(256): n is a, c, g, or t
  misc_feature (270)..(270): n is a, c, g, or t
  misc_feature (637)..(637): n is a, c, g, or t
  misc_feature (1571)..(1571): n is a, c, g, or t
  Peptide Sequence Number=SeqID_9192
  Probeset Number=SeqID_10755
cgcgagagatatttgcgtgcgaggatgctagatcgntcactactcgatggacttcatntcgcggctgaggtgcgcgcaacagatagtagtacactgcagtgtcgtagagaagaaccgtgagcgaaagagattattgtcgangtgagatgttgacgggtgtatgtaaatcaatgagataatagactcgagatgtcaataaggattatatggtcgatgtgtcgagaagatagagcgcatatgaaaatagaatgtgtantacaatagagtatntactctgtcgctcaggtgatgtgcatagacgttagtccatatatgagttctatcgtcgtgtatatgtctgtttccaatacggacagtcacggacatccatgatgcgtgcgggtgctctgccgtgagtgctctagaagcatatgcggacaatgtaggagcgtgagcggtgtgctattcgcatgtgatgcgttcgatacgagtatgtatacgtcgcgcataagcattatgtgtgcaagtcatacatattacatatagtttgtgtgtatattaggtgtcacaacaaggacactgatctctccagttaatacatgtagtgttcgagaaacatgcgtgagttgtagtgcgtaagtgaagacatatggctcgntcgcgagcctgagaatgtaccgagtcaagcagcatactgtatgtgttcgcagtgtagcaaatataagaaatattatatgcgtcattgcagaatagacatcatatcagtgagttacataccattaggttatgatgtgatagatatcagtatgagcgaggaggcgattgttcggtacacgagacataggtactattcggtgcaatcccaagaggaaaggaaaaaatatactcggtacaattataccgcatggtacactattagcataccgatctaaaggtagtgtggtgcgaacacataaaaatgagtaagtgacagtgatgttatgtattatgtgctcgttcttttatctaaattaagtagtggtgttgtcttctgtttctttcctagtggacacgataacgtgtatatagcggtttgggacataccaagagcagaatccagggttatgagctaaaacgagcggggagtctgggaggataattatctatatagagtcgcacacggtatggtattataatcgcacttaccgttcttgcggctgagaagaactggagtaactagagctgtacgtaggtagactaggagaacgtggacatagagaggatgttctacgatgtcagacgagtgctctgagaggtcgtacgagagaaacaggtacaaaagtactaacactactctaagtacactatctcacatttatatatctttaccggggtgatacacatactacaagctgtgcgttgctctatatagattatgtcacattgtatatacttgactacaccgctccctctcgtgcgggtggatgtgagggttatgttgtttcatcacaaacctctacgtggaaaatgtttgtttgcagcccgcaacaccacacactctgattactttaagctggtaagttaatagaaggttatatatggagagaaaaaanataaatagtataggcgg

SEQ ID NO: 977 - DNA, 570 bp, Glycine max
  misc_feature (216)..(237): n is a, c, g, or t
  misc_feature (537)..(541): n is a, c, g, or t
  Probeset Number=SeqID_10756
caagacgacgtgtccgtacgggtccggcgtgtggagcaagaagtagtgggtctctaccagaaatatactctgcagcacatcgtttcaccgttagaaggcaacagcaatctcttttgtgcggagcgcttcgggattcagttcgtgggaatgaacagtttgtgggtgaagcagtcaggattcacaccagccgtgaagcttcaaggatcttggcatgannnnnnnnnnnnnnnnnnnnnnaccgctctccgcaaaatgatccgccccgtcgtcggcgtcagatgtgcgcactccaagcgcatgatacttactctcgcagcatctccgccatagtagcgcattcctccggaaatcactcgtccatcgtcttcctccacggcaacaagatgtcccctgcgcaggtaatccagccggtttctatcggctcttagtggtcagcatcaacagcgcatttagcgtctgcataaggttgattcgtgcaatcaccagcgaaagcaccatctacaggcgaattcggttacagtggagtaaggagggtcnnnnnccctcatcaaagagattcgcaggcagcaa

SEQ ID NO: 978 - DNA, 1525 bp, Glycine max
  misc_feature (9)..(9): n is a, c, g, or t
  misc_feature (90)..(90): n is a, c, g, or t
  misc_feature (247)..(247): n is a, c, g, or t
  misc_feature (253)..(255): n is a, c, g, or t
  misc_feature (335)..(335): n is a, c, g, or t
  misc_feature (378)..(378): n is a, c, g, or t
  misc_feature (450)..(450): n is a, c, g, or t
  misc_feature (481)..(481): n is a, c, g, or t
  misc_feature (743)..(743): n is a, c, g, or t
  misc_feature (923)..(923): n is a, c, g, or t
  misc_feature (973)..(973): n is a, c, g, or t
  misc_feature (1015)..(1015): n is a, c, g, or t
  misc_feature (1082)..(1082): n is a, c, g, or t
  misc_feature (1099)..(1099): n is a, c, g, or t
  misc_feature (1267)..(1267): n is a, c, g, or t
  misc_feature (1355)..(1355): n is a, c, g, or t
  misc_feature (1383)..(1383): n is a, c, g, or t
  misc_feature (1387)..(1387): n is a, c, g, or t
  misc_feature (1390)..(1394): n is a, c, g, or t
  misc_feature (1396)..(1399): n is a, c, g, or t
  misc_feature (1447)..(1447): n is a, c, g, or t
  misc_feature (1492)..(1492): n is a, c, g, or t
  misc_feature (1494)..(1494): n is a, c, g, or t
  misc_feature (1496)..(1498): n is a, c, g, or t
  misc_feature (1502)..(1503): n is a, c, g, or t
  misc_feature (1505)..(1505): n is a, c, g, or t
  Peptide Sequence Number=SeqID_9193
  Probeset Number=SeqID_10757
atatgatgntaagtggtgtgattttagttatggtgtgatcaagagaagatggagcggtgtgtgagcgcgtgatgatagatgcgcgcagtnggacgtgacaccaccatccgcgctcgatacgttctcacccttcttccatctccgtcctcgtgctgcagcatctcctcactgcttcgctctctctctgtgatcacacacaccactgctatgcactacctacacagacggctatgctacatattaaggntggtannncacgacgctcgcgatacactgcgtgtaggtgtatgcatatagatattgacatttcgatgatgttctgatcgactctttanctcacgctatgattgcacctcatacacacgtatgcccagttcngcgcaactcacactggtgtacacaatcagtcacgcaagctttgtaagtgcagtgctgtgcaatatgcatgtntattacactcttctcatgattatcgtggtgntatcactttcttgtctctgtggtgtcactagaggtggatcttgtgattgtatctcctgatctgtccggtcgtccgacctattatactctcccacgcccgccccgttagtagagagaggatctgacgcgacatatgtagtagatataatgtgtgaggagactgtctgttactgccatcttcgcgcttatatctcgtagagtacggggtccagttgttgaccaggccgaatgtcagtcgctattttcatctacttattacaganggccagaaacggtctacggcgagcgcgaggcgggaagtgaactatattcctgtgacttatctagattatactccttcctcatcgtcattctcgcatggcaagcaggacgttcgcgcgactgcgcgtgggcgggcgggctccggcgaccacgcgccgcttctgttgttgttatctctgtcnatccttagaatgtcgaggttgaggtggagagatagggtgtaggatgaaanaatatgaatacacaccccagacaatatactcacttcattagntctactatcaatgactctgttagtaagacagcagatgaagacaattgaataaaaatgaacacacctnaccactatcccaactcngacactcaggctcaccgtgtgcttcgctaatttctctagctattggtgtgcgtgccacgtccttatcatcattcagcccccgcccgccgcgcggccacgcagtgtagccaagcaaggacagcctatggagtctcatataaccagctactactacatagtgcgagagangagtgagaaaaggacacccagcccgtcatgacataataaacatattatatatttaattatgttagtgtctacgtagttcgagtaatgngggcggagagctgtaagtccaaactaantagnaannnnngnnnncctcttccccccgtctggcttgtgcttatatatcgagaatgacaccancactcaacccacaaaggcgacgcccgcaaccgcatgtccgataantntnnntttnncnaaacgaggggggggggggag

SEQ ID NO: 979 - DNA, 420 bp, Glycine max
  Probeset Number=SeqID_10758
actgattagtgatttttaaatcatgactgacgccccaattaccagaaagcaagaagacttcctcagattgctcggcagcaacgctcacttcggtaccttgaaccttaactacgaaatgggcagatatgttgaccataaaaacgccgaaggtgtccacatcatcaacctcgaaaagacctggcaaaagattaagctcgctgctagagtcatcgccgccgtcgacagacccgaagatgtcatcgttgtctgcgccagaccttatggtcaaagagccgtcatcaagtacgctaagtacactggtgccaccgccaactcttcctccagatggacccccggtaccctcaccaatcaaaacactaaacaattcagagaacccaagcttttgattgttgttgaccccaagagcgatagacaagccgt

SEQ ID NO: 980 - DNA, 1385 bp, Glycine max
  misc_feature (22)..(23): n is a, c, g, or t
  misc_feature (112)..(112): n is a, c, g, or t
  misc_feature (115)..(115): n is a, c, g, or t
  misc_feature (124)..(130): n is a, c, g, or t
  misc_feature (167)..(167): n is a, c, g, or t
  misc_feature (169)..(169): n is a, c, g, or t
  misc_feature (172)..(174): n is a, c, g, or t
  misc_feature (177)..(177): n is a, c, g, or t
  misc_feature (182)..(182): n is a, c, g, or t
  misc_feature (184)..(184): n is a, c, g, or t
  misc_feature (237)..(237): n is a, c, g, or t
  misc_feature (296)..(296): n is a, c, g, or t
  misc_feature (444)..(444): n is a, c, g, or t
  misc_feature (696)..(696): n is a, c, g, or t
  misc_feature (880)..(880): n is a, c, g, or t
  misc_feature (1233)..(1233): n is a, c, g, or t
  misc_feature (1385)..(1385): n is a, c, g, or t
  Peptide Sequence Number=SeqID_9194
  Probeset Number=SeqID_10759
ttcggggtgcggtcgttgggtnngggtgttttctccgtgcgcctttttgccgcttttctttcgctcgccccaacgctctattattttgtgtggtggggtggggttgtgggcnaanatggagatnnnnnnnggttcgagtgagtgccatgacacgcctctctattacncntcnnnatntcgcncntgacggctgatgggtcccgcctctcccctcagtctctcttattgtataggganaagatactttggggtttcatggatagttggtgatagttgtagtacgcatttttgcgtgnttgtcattgcagtgactggcacggtgtagttccgatcagttcttccgtgcgacctggtgtgtagagtaggagcattatgtgtctgtgtagttgactcggtttaaaatgaggagtgtatatatagctcgcggccttgaatcttcggtgngaatggataagcataggttatgaatcgcattgggtgtcggttgtgtatgtgggaagtattaggacgggtgtatagatgcagcgtatgaataactgagattcattgcatactccctgtgttagttacagtgtgtgttatttgtgagatatcgtgaagtagcgatggggatgtcacagaaatgcgagcgtggatgttttgtaatataccatatgacattttgccgttgtatgggaagacgatacgtagtcatcngttagcgtggggtgacgcatgtgatcggttgggtgacacggcgcatgtatttgaacatatgtctaagctattcgttgacgttagtatgtagtttatctgaaaatatacttatcttcacagaccactcgcgctgacacaagctgtattcactagacgtattgttagagatgtttaatatgtggtntattagtattaaacattagattttaattatgcgatctcctatacgatgactgacaagtcctggcatggacgatctcatgtgatgcgaccggttgtgtggtatttggggatatgacacaagtacctgagggaagatctactcgctcgtgcagtgatcaatactccaggccgtagcatctcatgggatcctgttatgaggttgttgattcatagtttcttgtagacgcgcgtttcatacagtctctttcctattgagacggcgtcatctctcatgtgtgagctcttgtgtctataacgatttcggccatggtcgctcgtggtgttagcgcgttgtaagatgaagagacttaggangtgagctagtgaggatgatggcgcacacacactatattgttgtgctagtctatagccgatcggttcactgcgcgacactgtagctagatgcacacaccacactcacgatacgcccacgccgtttatccccgcgcaactacattatatagttn

SEQ ID NO: 981 - DNA, 619 bp, Glycine max
  misc_feature (478)..(478): n is a, c, g, or t
  misc_feature (537)..(537): n is a, c, g, or t
  Probeset Number=SeqID_10760
ggctcgaggtctatttgattatgttttcgaagtgacatgcgcaacccactctatcttttcggaccgtacaaacatggaacgcatattgggcggcaagtactagctcggacgcaagatctgctgagggtcctgcagagatagctacctcggcacgcagattgactcctcagagatcgaccctgtctggagcgacagtaccggatcaactacatccgcaactgctccacgaggcgaaagtctccactatgcttgaaagaggacgtgggattcctaacatagcatggtcctgaatacatggggatgatcatgtgctcgttattgacttgctagtgcctactcgtgaggatctctgtgtgcatagcggaaggaagtttgcattgcatactgtgttaatgttggctgagcagatgatcactacagaggagaatgtgcattcgaaagggattttacgagggagatattgaaaccggataacttntctcatgggaactggtcgaaaggccaaccaggtttacataattgattttgggcttgcanaacgatatgcggattccactactaatcgccacatcccttacagggagaaacaaaacgtaacaggtactgctcgatatgcaag

SEQ ID NO: 982 - DNA, 522 bp, Glycine max
  Peptide Sequence Number=SeqID_9195
  Probeset Number=SeqID_10761
atattcacttggaaattgtaaaaagaggcggggtcaaccagtttatcccggcgccggcccgaatccagggtcatcatcctctttataacgacgtctttcactgcacttctttgctgaaaaattagcggccagtaacaatgtgcgtcgacccacgaactgggacaagagcatacagagaaccgtactcgggagagggaatccaacccgaacgttttccgaacgcttgcccccacccacactctacctcgacactctcttgtcgctctagggacgtttcgtcgatcctactcatctcttcctcgtgtccgcctagctcacaagcattcggtttgtcatgcgatcatagaattattggctgaaccaattgttacgtcagtgtttttgtactgcgtacaaaacaaatttatgggtcttttagaggttctgttttttttgtcccgccgcggaaaaatacagtcgccccgccactgatttctagttttaattatccgtccctcccacgaaacgaattaaagctgtatt

SEQ ID NO: 983 - DNA, 1644 bp, Glycine max
  misc_feature (1)..(1): n is a, c, g, or t
  misc_feature (115)..(115): n is a, c, g, or t
  misc_feature (117)..(117): n is a, c, g, or t
  misc_feature (144)..(144): n is a, c, g, or t
  misc_feature (146)..(146): n is a, c, g, or t
  misc_feature (241)..(241): n is a, c, g, or t
  misc_feature (313)..(313): n is a, c, g, or t
  misc_feature (339)..(339): n is a, c, g, or t
  misc_feature (393)..(393): n is a, c, g, or t
  misc_feature (432)..(432): n is a, c, g, or t
  misc_feature (500)..(500): n is a, c, g, or t
  misc_feature (582)..(582): n is a, c, g, or t
  misc_feature (598)..(598): n is a, c, g, or t
  misc_feature (647)..(647): n is a, c, g, or t
  misc_feature (928)..(928): n is a, c, g, or t
  misc_feature (1003)..(1003): n is a, c, g, or t
  misc_feature (1023)..(1023): n is a, c, g, or t
  misc_feature (1077)..(1077): n is a, c, g, or t
  misc_feature (1080)..(1080): n is a, c, g, or t
  misc_feature (1198)..(1198): n is a, c, g, or t
  misc_feature (1285)..(1285): n is a, c, g, or t
  misc_feature (1300)..(1300): n is a, c, g, or t
  misc_feature (1367)..(1367): n is a, c, g, or t
  misc_feature (1413)..(1413): n is a, c, g, or t
  misc_feature (1509)..(1510): n is a, c, g, or t
  misc_feature (1515)..(1515): n is a, c, g, or t
  misc_feature (1545)..(1545): n is a, c, g, or t
  misc_feature (1576)..(1576): n is a, c, g, or t
  misc_feature (1585)..(1585): n is a, c, g, or t
  misc_feature (1612)..(1612): n is a, c, g, or t
  misc_feature (1614)..(1614): n is a, c, g, or t
  misc_feature (1623)..(1627): n is a, c, g, or t
  misc_feature (1643)..(1644): n is a, c, g, or t
  Probeset Number=SeqID_10762
nagcacgagtgaagatagagatctgcgagaccagtgagaatgacggcctatgatagaggtctagtgggagcgcggcgatgcggactcactagacgctagtcatctagtcacacantntcatagtagagtagcagacatagacangngacagggtctacagcacactgtaacgaagacgtgacacatgtgtgaatgagttgtggttagactctctgctgtacgctcgatcgcgctcgtgacntcagcatgaattacaatagagccatctccactatcgcgcatcgactggcgtggtggattgtatgcgacatangagacgcgtaagagagaaagatcacncactctaggagcagcgcacttacatgtgggcaggcagcgagcgcgcacgtagantacacacaacacatatatcagagagtcgagtcgagtcgntggcgcgaggtagacatatcatatatattgagtacatgatacgcgcatacatactacacacgctgagnatgctgtgcggtgacgtcgatgcgtgcgcatgacaagcgagatcgtactggatattgagatgactgtaatagtagtgtctcnctctatactaaatctnatacactctactacacgaataacatagaagcgatacggagtagcaccgnaaaactagacgatgagcgtccagacgacgcaggcgagcaagacgcagcggtgtacgcgacgacatcatgtagccacaacgcagatcacgtgctacgacaaatgctcatatattaccaacgcctcacacactgcgaatatctatctaccttactgagctgtgagcggtcggacgtgtctactacgtcgtacacgatatacagtactactcgtcgcctctgtgcgcgagagatatatgtgtatgacgagacatgctagagcgcatctagtgaaagcaatacanacctacacacccatactacttatagcagaagagagcatcacacaaagagcaagcagcatcgattatacgaacggnggtgagacgcaaaagcatgnaacgggagaataggaccgagcggagaaagggatatagtctatcatagtacatanatnatcataacagataagggaaacgagtgatagtgtagcaagcggagcatgatatgagatgacataagaagatgagatagatgtgtgacgccgcgcatatcatagttctagcagctgctcntatgtatgtggtagtagtgatcgctcgacgcacactctctctgctatacatatgattgaaagaagtctggagataagaagagtatcncccgcacgtctctcnctcattattcattacgtcataatcctaacgacgacagggagagaagaccgaaagacagcaactatanttactaacagtaagcaaccatacacctcctcccacacaaccccctnccgcgcgccctcccatctcgtagctccgccggagcggctctctctccctttctcacccaacggcggtagatctgccgctcgccatgtggggggcgnncggcntccgtggggggggggagtatacaaccaaanattacaggtacaggaaacactaccatccatnatgtgagcngcgagcacgcaagtacgcagcacggcnanccaacaaannnnntccaaaaaaaaaaaann

SEQ ID NO: 984 - DNA, 1807 bp, Glycine max
  misc_feature (10)..(11): n is a, c, g, or t
  misc_feature (13)..(13): n is a, c, g, or t
  misc_feature (19)..(20): n is a, c, g, or t
  misc_feature (22)..(23): n is a, c, g, or t
  misc_feature (25)..(25): n is a, c, g, or t
  misc_feature (27)..(27): n is a, c, g, or t
  misc_feature (31)..(32): n is a, c, g, or t
  misc_feature (37)..(42): n is a, c, g, or t
  misc_feature (44)..(44): n is a, c, g, or t
  misc_feature (50)..(50): n is a, c, g, or t
  misc_feature (78)..(78): n is a, c, g, or t
  misc_feature (83)..(83): n is a, c, g, or t
  misc_feature (109)..(109): n is a, c, g, or t
  misc_feature (178)..(178): n is a, c, g, or t
  misc_feature (198)..(198): n is a, c, g, or t
  misc_feature (266)..(266): n is a, c, g, or t
  misc_feature (387)..(387): n is a, c, g, or t
  misc_feature (394)..(394): n is a, c, g, or t
  misc_feature (534)..(534): n is a, c, g, or t
  misc_feature (630)..(630): n is a, c, g, or t
  misc_feature (647)..(647): n is a, c, g, or t
  misc_feature (654)..(654): n is a, c, g, or t
  misc_feature (918)..(918): n is a, c, g, or t
  misc_feature (1082)..(1082): n is a, c, g, or t
  misc_feature (1120)..(1120): n is a, c, g, or t
  misc_feature (1186)..(1186): n is a, c, g, or t
  misc_feature (1232)..(1232): n is a, c, g, or t
  misc_feature (1281)..(1281): n is a, c, g, or t
  misc_feature (1388)..(1388): n is a, c, g, or t
  misc_feature (1395)..(1395): n is a, c, g, or t
  misc_feature (1432)..(1432): n is a, c, g, or t
  misc_feature (1514)..(1514): n is a, c, g, or t
  misc_feature (1528)..(1528): n is a, c, g, or t
  misc_feature (1536)..(1536): n is a, c, g, or t
  misc_feature (1634)..(1634): n is a, c, g, or t
  misc_feature (1636)..(1636): n is a, c, g, or t
  misc_feature (1752)..(1752): n is a, c, g, or t
  misc_feature (1755)..(1755): n is a, c, g, or t
  misc_feature (1766)..(1766): n is a, c, g, or t
  misc_feature (1779)..(1779): n is a, c, g, or t
  misc_feature (1781)..(1781): n is a, c, g, or t
  misc_feature (1784)..(1784): n is a, c, g, or t
  misc_feature (1790)..(1790): n is a, c, g, or t
  misc_feature (1805)..(1805): n is a, c, g, or t
  misc_feature (1807)..(1807): n is a, c, g, or t
  Peptide Sequence Number=SeqID_9196
  Probeset Number=SeqID_10763
tttttttatnnantttttnntnntntntttnnttatnnnnnnantatttnatttgtaatagtatatatagaaatatantaaanatatgtattttttcttattatgtatnatagttagttggtgttatcatatctcgtagtatattgctttgcgtctagtatctcacataaatttatgntacttataatatggtaagtngatgatttatacttattaataaattatatattatatccgaaatatttctctttaatatatattatgtnttatgttatttacttacattatcatcgcagatgcagcgacagcagtgcaagccggagaagcagatacaaccgccgcgcgccgctcgtgcccgcccgtcggccggaccggcgctcgcgagcngcgtgcncgtgttccggctcggtggagacgagacgcggtagagatcaggcgcgaggaggcggacaaggggctcggcgcctgcgccgtcgcgacaagaatggcgcccgtcggaggagaggaggacacagtaccaggagccatgagganaggtggacgccgggctggagcctgtgagcgcgtagagtgtggcagtgactgcatatcagtgtgtcgcgtatgtgttcttctgtgtctgtctgtatncttgtctgtggtcgcgngctgctngaccattggtcaagaaaggaggccatagcatcaagatggagataacatgaatcgataagtgcgaacgatgattgtgaggtagtagaacacgcgcgcgtagtacagacgtgtggatcgcgcggcgtgaaggagaccgacggacaagtgagctctggtgatggctatgtcgtacgtggcgcggcgagtgtctgttacaggtgcgtgggtagagacaacgcagaaggcgtacgcacgacactcggcgctcgctcaatgtcagtcctnacatcgttatatcgactatctacatcatactgatgatgcaacgacacaacacacgtcctcacgcagagacagactagttatatagtcatctaatgagttataatattgcagtcacacgcgcagcctcgcacatcacatgaagtatacgtacagcgtgtaataancatagcacaatagtagtggcgcctcgcactgacaaagncgacgaccgtacgcagagcgcgacactgtaatgacaagcacgacggatttgtgcggtcccgtgtcngaggtgtggtgtagagtgagtgtgatgtgtgcgtgacggcttgtgngctgcatacatactgagatgatcactgtcgatgtgtctatcagagaganatcaatacatccacgacagatcgagacgcatgatcagataatgatattatacgatgctcatggcactctaagagtgtgcgttacgtatctatcaggctagcagctangatactngataatgatgtggtagtgtgatgtgtcgagtgagtgncttgatgatgcgtgactgtacatgagtgtgctctagcagctaggtcctgccattctcgatgctcgtgtgcactagcagtcgngctgcgacgcggangacacganctgcgcgtgtgagaggcgacctcaggccgctcgcgtgacgctgccgccgtcggtcggcctcgcgcgtgctgactccgagacgtcgtctacgcgtcgcngnctcgctgatacgcgcgaggcagcgcactgattcattcgcgcgtagagttacgatggagaagcgtgtaaacgcaggttgcgacgacgacgtatcaccaggtcgagacgtgatagtangtngtttcgtagtncgagcgagggcgngnatntagtgntgatcggctgtagangn

SEQ ID NO: 985 - DNA, 1404 bp, Glycine max
  misc_feature (19)..(19): n is a, c, g, or t
  misc_feature (32)..(35): n is a, c, g, or t
  misc_feature (49)..(49): n is a, c, g, or t
  misc_feature (116)..(117): n is a, c, g, or t
  misc_feature (138)..(138): n is a, c, g, or t
  misc_feature (637)..(637): n is a, c, g, or t
  misc_feature (877)..(877): n is a, c, g, or t
  misc_feature (904)..(905): n is a, c, g, or t
  misc_feature (907)..(907): n is a, c, g, or t
  misc_feature (920)..(920): n is a, c, g, or t
  misc_feature (985)..(985): n is a, c, g, or t
  misc_feature (1074)..(1074): n is a, c, g, or t
  misc_feature (1091)..(1091): n is a, c, g, or t
  misc_feature (1109)..(1109): n is a, c, g, or t
  misc_feature (1154)..(1154): n is a, c, g, or t
  misc_feature (1260)..(1260): n is a, c, g, or t
  misc_feature (1305)..(1305): n is a, c, g, or t
  misc_feature (1322)..(1322): n is a, c, g, or t
  misc_feature (1394)..(1394): n is a, c, g, or t
  Peptide Sequence Number=SeqID_9197
  Probeset Number=SeqID_10764
gtttttttttttttcgccnctcactcctcctnnnngcgaaagtggcggntggcacgacacaactcatataacaacagaaagtgaacatacacagagagaggaacatatgtgtgcanntaaatattttgatgtaatcantataatgttttttccaacgtagagacggcgcgataggatgccgccggcacgtgatgcttgttgtcatcggtgagatgtacaggacacaacctacaccagcagcgatagaacaatcacatcagaacatctatagtcgtcccgcgctcaagccacagctgcacctcgcattcttcacgctccacctgtgtaacaggaccagtccgcgcgacgcagacggtctcacgctaccgtctctgtctgacactagcgcgacgatccgccttcatattcatatctactcctgccgcattctcactcatcctcgccacgactccgatggcatcgttttacgcgtgcggactccaccgacctgcccagccctctgcctctggctcgagttacgaaagcagctatgactgagcgtagaagaaatacacacgagcacagccgactgtcactatgtgatggtgttgatataagatcagtttgctttgagattattatcggtactactgcacgncttggcgtggcgcagcgcgtcgttgtcgctcgcgcctgttacgccgtcctcgtcccatactctactcatatctcgtgatcgcatctggtctgttagtgcagatccgatgatattcgactagttagctcgtgtatacatctcgtcatatacgtactacgtctgctagctgcctgcactctatccacatatgagctagctactcagacgcgcgactgtaccgatctcagagagagagatgcntacgagatgagaatacacatactgaanntnccatgccacgaanctatctctatacatagtcagcgtacgtattaaacatcaccgctactcgtgtcgagtctctgtatnagcgtgctctcccatcatcacactcgtagcgctcgctctgtctctgtatatgagctatgtgatagagcacgcatgagacgcgatccatngagagatgtacgagtanatacgtggtcgaaaagcnacacacatgagactaactacacgagcggatctaggtcgcgctctnatcttcatgcgcgcgtgtcagctcgcatcctcgaaacagcactgtagagtgatcgcatctacgataacatcgatcctcactgcgtctcagacgagacagtgtgganagtacttctataacatccgcctgtcttatcaaatcagcatcgacngatcagaccatatgcgnttcttcatgcatgactacgacgatatcatgtcctgcgttgacgtcaactcacgtcttatgcgcgtgctcggncgctatcgcg

SEQ ID NO: 986 - DNA, 411 bp, Glycine max
  misc_feature (370)..(374): n is a, c, g, or t
  Probeset Number=SeqID_10765
ctgcaggctatgagagtgaaaattggggcctggctactgcacaagaatttgagcccgtgcctcggatctgtcggctaatcttagccgtctacgaagatgatattcgtaaccctcaatgggctccccaaggacgcgatggaattgatcaagatagggtgatcgtgcgtaaacactccgaccatcaccatggtcgcgctgctccatacgtgatacaccttgatcatgatcgtgcggagcgcatactggctgttagtggactcaatttggggaaggaaagtgattatatagttttgcttgataacaagctgggacaggcggaatttcacggtggttatgttcataacgggttgttgaaggcagcgggatgggnnnnngatgcagaatatgaggttctcagggagctagctgcag

SEQ ID NO: 987 - DNA, 1537 bp, Glycine max
  misc_feature (26)..(26): n is a, c, g, or t
  misc_feature (118)..(118): n is a, c, g, or t
  misc_feature (169)..(169): n is a, c, g, or t
  misc_feature (199)..(199): n is a, c, g, or t
  misc_feature (261)..(261): n is a, c, g, or t
  misc_feature (274)..(274): n is a, c, g, or t
  misc_feature (281)..(281): n is a, c, g, or t
  misc_feature (339)..(339): n is a, c, g, or t
  misc_feature (420)..(420): n is a, c, g, or t
  misc_feature (443)..(443): n is a, c, g, or t
  misc_feature (446)..(446): n is a, c, g, or t
  misc_feature (454)..(454): n is a, c, g, or t
  misc_feature (525)..(525): n is a, c, g, or t
  misc_feature (559)..(559): n is a, c, g, or t
  misc_feature (565)..(565): n is a, c, g, or t
  misc_feature (588)..(588): n is a, c, g, or t
  misc_feature (623)..(623): n is a, c, g, or t
  misc_feature (635)..(636): n is a, c, g, or t
  misc_feature (762)..(763): n is a, c, g, or t
  misc_feature (777)..(779): n is a, c, g, or t
  misc_feature (787)..(787): n is a, c, g, or t
  misc_feature (829)..(829): n is a, c, g, or t
  misc_feature (884)..(884): n is a, c, g, or t
  misc_feature (1028)..(1028): n is a, c, g, or t
  misc_feature (1353)..(1353): n is a, c, g, or t
  misc_feature (1371)..(1371): n is a, c, g, or t
  misc_feature (1490)..(1490): n is a, c, g, or t
  misc_feature (1495)..(1495): n is a, c, g, or t
  misc_feature (1500)..(1503): n is a, c, g, or t
  Peptide Sequence Number=SeqID_9198
  Probeset Number=SeqID_10766
ccgtgggtagccgatagtatcgatcnaggactcaggagcgtgcacatcgtggtgagtatgaactcatcgcattctttgaatagccgctagcatacgtcagtctatatacgtcatgatnacttacaagacacacatgagcacgcgatacagtttcttacagcatgtgacncacgacatcgagcttgtcagatcatatacntatacgtattgtctcataactgtgtcgcacgtcgatgacagtattctcgaacctcagtgcgnctctcgatcacancgtactnagctcttagagcgtcatcatacgcgatcgagagctaactatacgcaatagtcctcatnatgcattcgctacgtcaatatactcaatctatacatccacattcactgtacaatagattacctcgtcagagcgatgcgcgncggatcgacagcatgatctcacntgncgctcagnacacatctcagtgagaagctacatagtatcacgaactgtgtcgttcgtgatacatggtggatacgatagtngtgaccggagttctacagcagacaaacacactcnacactncacatcatatcaatatctacgcncaatcatcaatcgatatattctacatcttctacantattgtgtgtgnnggtggtgtggtgcgtgagtgggtggggttgtcttctcacgattatatattaataactatctgacaatatctatatatcatatctcactcacgtacatggtgagtgtggtgtgggtgtgttgtgttnnttttttttattttnnnttttatcntttctctatatataatatctatatatgtaaatatactcgtanatacactcatcacacatatactcactacactaatatcttacattgtgtcattttnatcgcaagcaacacagaatgagtctatacactaggtcatcatagacgccgacactcgaactatatgaccaacaccacagtcacgatccaccgtcaaccgactgtgcagtagcaagacaccgctcactccacgatcacacagacncacgacgctacaacactcacatccgcagtctcatctctcttgtctattacttgatgaaaacacgacaaatgatgcaaatctatatatactgtctctacggcgattcagtctgtgtcactccttggttgacagcgaacttaatgttagatatcgtatattatactcgttaattctatgccagatagtcatagagatcctcacggcgaagctcatacgatccgcaggcagatcatcctaaataaagcgccccagaccagcatcacgcgcgccatgtcctctctattctcatcatagagatactcctacccaccacaacagtcacgcnagtgggatggcgcttagntgttcagcggcatacggtctagcggtgatcttcgtttactctctataactgcccgcactcaccctattatcatccttacattcacaacatactcgatagaattacatcgtgtgactggntattngtgtnnnntcaaccacaaaccagaaggaggagaacaatacaa

SEQ ID NO: 988 - DNA, 2236 bp, Glycine max
  misc_feature (1)..(1): n is a, c, g, or t
  misc_feature (21)..(21): n is a, c, g, or t
  misc_feature (26)..(26): n is a, c, g, or t
  misc_feature (36)..(36): n is a, c, g, or t
  misc_feature (40)..(40): n is a, c, g, or t
  misc_feature (46)..(46): n is a, c, g, or t
  misc_feature (51)..(51): n is a, c, g, or t
  misc_feature (56)..(56): n is a, c, g, or t
  misc_feature (70)..(70): n is a, c, g, or t
  misc_feature (80)..(80): n is a, c, g, or t
  misc_feature (98)..(98): n is a, c, g, or t
  misc_feature (151)..(151): n is a, c, g, or t
  misc_feature (157)..(157): n is a, c, g, or t
  misc_feature (169)..(169): n is a, c, g, or t
  misc_feature (182)..(182): n is a, c, g, or t
  misc_feature (186)..(186): n is a, c, g, or t
  misc_feature (201)..(201): n is a, c, g, or t
  misc_feature (240)..(240): n is a, c, g, or t
  misc_feature (254)..(255): n is a, c, g, or t
  misc_feature (277)..(277): n is a, c, g, or t
  misc_feature (346)..(346): n is a, c, g, or t
  misc_feature (350)..(350): n is a, c, g, or t
  misc_feature (353)..(353): n is a, c, g, or t
  misc_feature (363)..(363): n is a, c, g, or t
  misc_feature (365)..(365): n is a, c, g, or t
  misc_feature (385)..(385): n is a, c, g, or t
  misc_feature (391)..(391): n is a, c, g, or t
  misc_feature (404)..(404): n is a, c, g, or t
  misc_feature (425)..(425): n is a, c, g, or t
  misc_feature (445)..(445): n is a, c, g, or t
  misc_feature (448)..(448): n is a, c, g, or t
  misc_feature (450)..(450): n is a, c, g, or t
  misc_feature (452)..(452): n is a, c, g, or t
  misc_feature (457)..(457): n is a, c, g, or t
  misc_feature (465)..(465): n is a, c, g, or t
  misc_feature (472)..(472): n is a, c, g, or t
  misc_feature (529)..(529): n is a, c, g, or t
  misc_feature (538)..(538): n is a, c, g, or t
  misc_feature (540)..(540): n is a, c, g, or t
  misc_feature (542)..(542): n is a, c, g, or t
  misc_feature (551)..(551): n is a, c, g, or t
  misc_feature (567)..(567): n is a, c, g, or t
  misc_feature (571)..(571): n is a, c, g, or t
  misc_feature (573)..(573): n is a, c, g, or t
  misc_feature (596)..(596): n is a, c, g, or t
  misc_feature (615)..(615): n is a, c, g, or t
  misc_feature (624)..(624): n is a, c, g, or t
  misc_feature (627)..(627): n is a, c, g, or t
  misc_feature (645)..(645): n is a, c, g, or t
  misc_feature (712)..(712): n is a, c, g, or t
  misc_feature (742)..(742): n is a, c, g, or t
  misc_feature (762)..(762): n is a, c, g, or t
  misc_feature (776)..(776): n is a, c, g, or t
  misc_feature (778)..(778): n is a, c, g, or t
  misc_feature (801)..(801): n is a, c, g, or t
  misc_feature (812)..(812): n is a, c, g, or t
  misc_feature (831)..(831): n is a, c, g, or t
  misc_feature (843)..(843): n is a, c, g, or t
  misc_feature (851)..(851): n is a, c, g, or t
  misc_feature (870)..(870): n is a, c, g, or t
  misc_feature (892)..(892): n is a, c, g, or t
  misc_feature (902)..(902): n is a, c, g, or t
  misc_feature (906)..(906): n is a, c, g, or t
  misc_feature (924)..(924): n is a, c, g, or t
  misc_feature (972)..(972): n is a, c, g, or t
  misc_feature (1023)..(1023): n is a, c, g, or t
  misc_feature (1030)..(1030): n is a, c, g, or t
  misc_feature (1035)..(1035): n is a, c, g, or t
  misc_feature (1065)..(1065): n is a, c, g, or t
  misc_feature (1084)..(1084): n is a, c, g, or t
  misc_feature (1101)..(1101): n is a, c, g, or t
  misc_feature (1119)..(1119): n is a, c, g, or t
  misc_feature (1123)..(1123): n is a, c, g, or t
  misc_feature (1154)..(1154): n is a, c, g, or t
  misc_feature (1163)..(1163): n is a, c, g, or t
  misc_feature (1166)..(1166): n is a, c, g, or t
  misc_feature (1203)..(1203): n is a, c, g, or t
  misc_feature (1216)..(1216): n is a, c, g, or t
  misc_feature (1223)..(1223): n is a, c, g, or t
  misc_feature (1294)..(1294): n is a, c, g, or t
  misc_feature (1298)..(1298): n is a, c, g, or t
  misc_feature (1313)..(1313): n is a, c, g, or t
  misc_feature (1328)..(1328): n is a, c, g, or t
  misc_feature (1356)..(1356): n is a, c, g, or t
  misc_feature (1385)..(1385): n is a, c, g, or t
  misc_feature (1426)..(1426): n is a, c, g, or t
  misc_feature (1456)..(1456): n is a, c, g, or t
  misc_feature (1484)..(1484): n is a, c, g, or t
  misc_feature (1487)..(1487): n is a, c, g, or t
  misc_feature (1540)..(1541): n is a, c, g, or t
  misc_feature (1544)..(1544): n is a, c, g, or t
  misc_feature (1555)..(1555): n is a, c, g, or t
  misc_feature (1621)..(1621): n is a, c, g, or t
  misc_feature (1630)..(1630): n is a, c, g, or t
  misc_feature (1678)..(1678): n is a, c, g, or t
  misc_feature (1747)..(1747): n is a, c, g, or t
  misc_feature (1775)..(1775): n is a, c, g, or t
  misc_feature (1805)..(1805): n is a, c, g, or t
  misc_feature (1812)..(1812): n is a, c, g, or t
  misc_feature (1841)..(1841): n is a, c, g, or t
  misc_feature (1856)..(1856): n is a, c, g, or t
  misc_feature (1860)..(1860): n is a, c, g, or t
  misc_feature (1863)..(1863): n is a, c, g, or t
  misc_feature (1871)..(1871): n is a, c, g, or t
  misc_feature (1876)..(1876): n is a, c, g, or t
  misc_feature (1892)..(1893): n is a, c, g, or t
  misc_feature (1898)..(1898): n is a, c, g, or t
  misc_feature (1903)..(1903): n is a, c, g, or t
  misc_feature (1908)..(1908): n is a, c, g, or t
  misc_feature (1933)..(1933): n is a, c, g, or t
  misc_feature (1936)..(1936): n is a, c, g, or t
  misc_feature (1943)..(1943): n is a, c, g, or t
  misc_feature (1948)..(1948): n is a, c, g, or t
  misc_feature (1960)..(1960): n is a, c, g, or t
  misc_feature (1965)..(1965): n is a, c, g, or t
  misc_feature (1977)..(1977): n is a, c, g, or t
  misc_feature (1982)..(1982): n is a, c, g, or t
  misc_feature (2003)..(2003): n is a, c, g, or t
  misc_feature (2005)..(2005): n is a, c, g, or t
  misc_feature (2084)..(2084): n is a, c, g, or t
  misc_feature (2138)..(2138): n is a, c, g, or t
  misc_feature (2148)..(2150): n is a, c, g, or t
  misc_feature (2161)..(2161): n is a, c, g, or t
  misc_feature (2164)..(2164): n is a, c, g, or t
  misc_feature (2169)..(2169): n is a, c, g, or t
  misc_feature (2185)..(2185): n is a, c, g, or t
  misc_feature (2187)..(2187): n is a, c, g, or t
  misc_feature (2192)..(2192): n is a, c, g, or t
  misc_feature (2222)..(2222): n is a, c, g, or t
  Probeset Number=SeqID_10767
ncatcgtgcgcatgtgcagantgacnacgcgtacgntganggagtngttgnatggntcgggcagtgcgtncgtggcagtncaaactagtcgctagacnccgtacagtgtgcacgagattgtgcgacgtgactctcgtacgcggcagatgcnaggcgntgatacgtaatnagattgcgtgcangagncgtcgacgcgactgntccgcgtagtaccgggccaagcactgagcacgctgacgngtcctgcactgtannaactgtacgacgagctgtcgtntagtctgtcatcctcgagccgttgctgtgacgcacgacatgcagtttatgatgtcaggcgatatagtantagnttntatgattaananaactcatatagaaagtactnctgcangctgcgctccgtnctgcacgtgccgccggacganataatgaggtgagtatcagngangnanccagncgcatcgntcgtgancctctgcgatctaggcagcgcggcatgcaggtagttatgatgagctggtcgctgtangtcacggcnancngcgcacgcngcgtgtcacgctagtntggntnattagacgatgcacttagcacgntgccgacgacgacgcgacnggtcgagangcngagtagtacgctatgtcngtactgaccgagtccgaccgcagtgactcgtatgttacgctgtacagtacccagtccactacgccgntcctcagctgatcgacaccacgtagtgtancgcatctcactacgtacgangtgcaccacactgncntcctgatgatctctagtcctgcnacacgcagcancgctctcaccactgctcancttctgctgtgntcacgcgntagtgcgatgccgcacgangatgtgatccgtgtagtcagcnacagtcactngacnggctgcacggtgtgggtntcgtaggctcgtcagcatatccttgacattcagtacagtagcagacancacgtgctacgtcagctacacgtccggcacatgatgatgtatatcagtcgntttatgntcgancatcgctgggctgtgcgtcgcgcgtacgangatcagcctgccccccgcntcagtctgctgcagtgncgcgtcacgcgtaccgcntcgntactgcgctgcacgcgtagccgtcactctgncgtctaacntcnctactccgtcagccgcgttcgtcgggggacgacagtntgctgcgcgtctngggcttntcatacctggctagagacgcgcgacgtagactgtgcgtatgcgtgagcgctgcgtcataacgcctagccgnatcnagctacacgtcacanagactagacatgcgnatgagtagctcctgacgtcgtccacacnagcatcagatccgttgtatcatcgcgtcncgtcacgcgccagcgtcagtacgcgactagcgcgacgcacnagctagatcggctgcgcgacagacgatcgngcgtcgtcctgtgtactagcgacgtagnagntctcagtcgactcgctatgttagtatgcttgtcgtggtgtatatgttcagggnntcnggtcgctcganacgcagcgtgccatcgccacagcgcaccgcacgcgatcccgacgcatcagtacggcgtccgcgtgncactcccancccatcagcgcgagagagaggatagtgatacggagtgagacgtactcncacacgcaagtgatataccgctatcgtcatctttttcctgtcttcgtctttcgttcactccttgcgtanttccctgacgttctgcgcctgctctcgngcgccgcgccgacttcgccgaggacgcatnaccagantgcgactgctgatcgtagcgcgacacacncaaacgaaaaacctnctantgnccacatcntccanctctccatactttctnntctangcggngagtngttatgtggcattacgttgttgcgnttnatagagnttagngagttgtgtttnccttncctgctcgtacngcganatactagccgcatcgaccgangncagctgctggcgcgcgcgtcatgctctcctttctttagtgctacacgtaatctatcgtctgcgcgagcagctcccctgnccgcggctgtggctgggagcgccgcgcgccgctggttcattcgcagcgcggcgngtcggggggnnnggggggggggnganggggnggggggaggggcgggngngaagngagcgaggcgcacacccggcagacggagcnggcgcacccccccc

SEQ ID NO: 989 - DNA, 1685 bp, Glycine max
  misc_feature (1)..(1): n is a, c, g, or t
  misc_feature (18)..(18): n is a, c, g, or t
  misc_feature (52)..(52): n is a, c, g, or t
  misc_feature (73)..(73): n is a, c, g, or t
  misc_feature (75)..(75): n is a, c, g, or t
  misc_feature (89)..(89): n is a, c, g, or t
  misc_feature (95)..(95): n is a, c, g, or t
  misc_feature (110)..(110): n is a, c, g, or t
  misc_feature (112)..(112): n is a, c, g, or t
  misc_feature (114)..(114): n is a, c, g, or t
  misc_feature (116)..(116): n is a, c, g, or t
  misc_feature (126)..(126): n is a, c, g, or t
  misc_feature (130)..(130): n is a, c, g, or t
  misc_feature (136)..(136): n is a, c, g, or t
  misc_feature (174)..(174): n is a, c, g, or t
  misc_feature (185)..(185): n is a, c, g, or t
  misc_feature (224)..(224): n is a, c, g, or t
  misc_feature (294)..(294): n is a, c, g, or t
  misc_feature (298)..(298): n is a, c, g, or t
  misc_feature (335)..(335): n is a, c, g, or t
  misc_feature (341)..(341): n is a, c, g, or t
  misc_feature (804)..(804): n is a, c, g, or t
  misc_feature (952)..(952): n is a, c, g, or t
  misc_feature (987)..(987): n is a, c, g, or t
  misc_feature (1082)..(1082): n is a, c, g, or t
  misc_feature (1269)..(1269): n is a, c, g, or t
  misc_feature (1488)..(1488): n is a, c, g, or t
  misc_feature (1567)..(1567): n is a, c, g, or t
  Peptide Sequence Number=SeqID_9199
  Probeset Number=SeqID_10768
ngaagcgtatgcgcatcntcgatagcgagcagcagtacttgatgtgtcgcancacgtatatcgtccactgcgntncgaggacagctcgnttacgnccaccgcatgatacnancncncgtacgagtnaatnaagatntgtgtcattcgagaacgagcgatacacgtccgacgtcngtttatggatngctcgactcactacgtacacccacgatagtatactgtgnggccgtgcgagctcgtgacgtacatgcagtcgactacgcttcgactcatgtcatatatgtcatagctagnagcngctacatacgtatgatcgagagagtacgcttgtgatntgatanggtagcgcgcagtagcactcttgcacacgtctccacagtctcctcgcatgccgccgaagtgcatgcaccctctcactctcagcgatacctgtatgacgagctcgccgtgcgtgacacgccgacgattaacgagtatcgcgcatcattcaatagagtgacctaccgatccatcgctactatctgccacttctctatccgatagaaaacgctcaagattacatgtattaacagcgcagcacatgtttacgatcgtaggactagtgtgagtaaagcatccatgcccgcatcactgctgtatggacgctactctgatgtcacgccagtcgtcagtagttatattgtcgtttctatatatgccgccggacgagtgataggcactgagagctctgcttcacgtcgggcagatgcatgagcgcacgccatagacatatatgggcactaccgtcagtagtactaagtaagncacgtaggagaagtgcctctcgctgcggagtcatagttctaacattcgtccatagtgtgacgcctgcgtcctggacacatgcatctactcggaatcggctgacagagctttagaccgagcgcacgcagcggtatcatggcttctatcncgatgcgagacagatctgttgctggtgtcgggcangcgtgttggacagaatgactaatcatatcatgcacgcggtcgtttaggatatgcagaaaactattccactgagttgacctaactcaggctgcgcngcgtcgccaacaagcgtggaggcagaagcgactgctgacattcctactcactgtgccgcgatggtccgagcgcgtgggcattcgaagagcgatgcagagacctcttcttttctctatgctatgactatgcgccgccagcgagacgccctgccataactgcaaagcacaggctgcgatctgctgcagngtatgaggtcgtagtatgtctggcgctgcataccgctacatcacgacactgactagctgagattgagagtgctacagatctagtagacgcagtacagagcacgctctgtcagcgcagctatatacattacgcgatgagagggactcgatagtatgtgcaacaggaggaggactcgctcacgagcagcatctaagctcaatcttctgttatagtctacantgcgtcctacgttgtcagaacttacgctagtatgcctccggagtggtgattcccatcataatatgataaggaagacggncacgctcatactcgacgcgcggagccatcacaatctgaatcggcacacaaaacatagtcgctgttagtaaacgcgaggacagaggcgcgatagagttgtgcgcgggtgcgctgtgagt

SEQ ID NO: 990 - DNA, 407 bp, Glycine max
  Probeset Number=SeqID_10769
tacggctgctagaagacgacagaagggggaataagatagctggtgtaatcgctgatgggttggcttatctacatgatgactgtcatcctcccatagtgctcctggacatcaagccaagcattattcttctagactcctctatggggcctcacatagctgactttggtattgccaaacttttagatcagacttctgcttcaaatacttccatttttgtgccgggtacaattgattatattgcaccaaagaatgcttatacaacaacaaatagtaaggagtctgatgtatacaattacggggtaattttgcttgagctgatcaccagaaagaaagcagcataatcatattcttccttcatggagggtactatagtagcggattgggctaggtctttgtggaggagaaca

SEQ ID NO: 991 - DNA, 403 bp, Glycine max
  Peptide Sequence Number=SeqID_9200
  Probeset Number=SeqID_10770
gaccatttccgctgctatcacaaccccatcgatcacccgcgcatgtttagtgcaaaaacgttctcttgggttctcatttccccttcttggtttgccatcaatgggtaaggtgggaagagagagttgttccatggaggaaaagcctttttttgttaaggaaatcaacttatacatgtttggggatggggcatctttgatggcaaccggccacgccgcattcatgtcaggctcaatcatggccttggtggatgagagacttatcacttgaggaaccgggctaccctttgggcttatcaacaaccctctcggatggatcctgttccgcgtcttcggactcatctgtgctctctattttgtttacacttcctctcttgaagaagattatgatcacggactgtcctta

SEQ ID NO: 992 - DNA, 1413 bp, Glycine max
  misc_feature (12)..(12): n is a, c, g, or t
  misc_feature (53)..(55): n is a, c, g, or t
  misc_feature (113)..(113): n is a, c, g, or t
  misc_feature (294)..(294): n is a, c, g, or t
  misc_feature (418)..(418): n is a, c, g, or t
  misc_feature (743)..(743): n is a, c, g, or t
  misc_feature (820)..(820): n is a, c, g, or t
  misc_feature (824)..(825): n is a, c, g, or t
  misc_feature (1105)..(1105): n is a, c, g, or t
  misc_feature (1207)..(1207): n is a, c, g, or t
  Peptide Sequence Number=SeqID_9201
  Probeset Number=SeqID_10771
gcttccccctcntctacttcaactatattgtaataggatctctatatcttgannngcgcgctctctgtctggtgtgtggtctgatcactacacaccacaccacaacgcgcganactagcctacccgtttactacaccacctctcaccaccacactagcgagtcatcgcgcatgtgtgcgcatcgacgccgcgactcggactcccggcgatcactctgcgccgtataatatatgtatcatataatatatatggatatgagagtgtacaagagagagataatacattacagtttanagaatatataatatagcacgcgtagttggtgaggagtctgtgacacggaaggggcatacgcacatagtacgtgcctagacacatagtcattgcacctcgctagtcgctgcgcgccggaagcggnttggtgcaatccagcgtacgcgggagcagcagacggcgtgccgctgcctgcactcgactgacatcctatcaacgctgcgcagcagcaccgacgatgcaatatgaaaatagatcgaacatatacatccatctatgcgttatgtgtctgatcgctgtcgacgcgaaggcaacgacagactacattacatgagtgacaggtaggcgcacacgattctcctaccagtgtgcgctcgctcgctgagcctttgagattggatgtggtgggatgcaggggagcgatcctgggccggatcgtcgtatgagatgatgtactgatgtgcggaganactgtgtgtgcgctgctgcgacggcagcatgtgtccagggtatgctagcgactgactggatatcgtgtacgtcattntccnncacaacactgtatggcgacactatcttactatgtggtatgaggagagagcgcggacgtctctctgtgagcacagctcactatgcggtaaatgagcatgccagcagcgttagtgatgccgagctgtcggtggctacgtacgctcggaagcggcgagtcgatcgcatgcgatagatgtatccactacactacacatgtcgcgtcgtgtgctcatgacaacagtagggatgctatctgcgcgctagatcagtgtatgtgttcgatagccatgtggtgcgtgangtgcagacgtgtatgagcggtcggttgatgttgcgaggcgcgcgtgagtgtcggcagcaattgtcctgttatcgatgctagtatatatacgcacgatgtggncgtccaccactaacatgtgtgaatgagtatagtataaagtagagaggcgtaacagcgacatggtacgaggtgacatgtcgcggcatgtgacttgctaactcaatctatatagtggtcgcgtcgcgtgatgactgccttcgatatggcgcgtgtatgcatcatgataatggagatggatatgttgcacatgctgctcgacgcgactg

SEQ ID NO: 993 - DNA, 1487 bp, Glycine max
  misc_feature (1)..(1): n is a, c, g, or t
  misc_feature (15)..(15): n is a, c, g, or t
  misc_feature (32)..(32): n is a, c, g, or t
  misc_feature (42)..(42): n is a, c, g, or t
  misc_feature (108)..(108): n is a, c, g, or t
  misc_feature (149)..(149): n is a, c, g, or t
  misc_feature (190)..(190): n is a, c, g, or t
  misc_feature (225)..(225): n is a, c, g, or t
  misc_feature (264)..(264): n is a, c, g, or t
  misc_feature (281)..(281): n is a, c, g, or t
  misc_feature (336)..(336): n is a, c, g, or t
  misc_feature (354)..(354): n is a, c, g, or t
  misc_feature (392)..(392): n is a, c, g, or t
  misc_feature (492)..(492): n is a, c, g, or t
  misc_feature (528)..(528): n is a, c, g, or t
  misc_feature (653)..(653): n is a, c, g, or t
  misc_feature (858)..(858): n is a, c, g, or t
  misc_feature (882)..(882): n is a, c, g, or t
  misc_feature (887)..(887): n is a, c, g, or t
  misc_feature (1289)..(1289): n is a, c, g, or t
  misc_feature (1404)..(1404): n is a, c, g, or t
  misc_feature (1409)..(1410): n is a, c, g, or t
  misc_feature (1430)..(1431): n is a, c, g, or t
  Probeset Number=SeqID_10772
ncgagtatatagtangtctcagtaatatatcngtattgtgtnacaatgcagtaagtacacaccgatcgcgctcgttattacgtagatggtaggtgcagagtgcttgtngttatatcatgtgtgagtcgcgttaagtgagagtgtagagntggatgtattgtgtgggtggatgtgtatgcgcggtgatgtnagtagtgtagagagagagagtgaggtgtcgtgtgngggcgcgtgatcgtatacatcatactcacagatgatagngtcagctacacatactncaatgcacagagcatctacgacgacggagacagtagaacaaaacgagcgcggagntcacaaagaacagcacancaacatacgccagctacagtgtcgcgtcgactagagancgagaagagatggaagagtgaggggacatatcagaataggatgaagagggcgcgcaatcagcacggaagaattgtcgagacgtgtggcgtgttgttatgntgacgtgcatagtcagcgtgcgcattcgctctcacntgcgtgtgacgacgagagacataatagataataatgcataagatatgacatataggatagtgacactgacgcgtgtgttagtgatgttcgtggtgtagtgattatgttatcgatgtatatacganctcagtacgtgttgtgtagagagagtggggtgtgtggatggtatatatagtgagggatgtaagtaggcgagcgaacagggagagcaatgcacgcaccactcaatagataactccttacatacgatccctgtgttgtgttgtgtgggaggagagagggtgcgtaaagagtgcaccctgaagagggaaaggagatcttattaactcncactccactcggtgcaatttctcntatcnattctctcccatatcgatctccgatgtggtttagtgtcgtgtcggactccttgttgcccccgtaagccgtcccgtcaggcctctaacgccaacaacaaagaaaagagcaccagactggtaaaacctattgacgcaaaacaacacaagtcgatataaagcgaaacgtaagacacaacatccataggaaataacactacatctacttcgcaatacttcagtgataggacaagaagcgaaaatacaacatgggaacagataagagaaataattgaaaaatgttaattattattgtccttattgatcttttcatatggatagttttagaatagacaacacgcaacgcacatcttgctctcgctacacccctctcacgcgtcttctttgggataagggcggcgtgtntagtgtgttatgccctgggcgagcaagttagcgcgggggcgtatgactgcggatgttcatcggagttaacaaatgttactatcatctatcaaggaactcttaataaaatttttantttanntagtagaaacatgcgtgtcnnccctcctcccctccctctccacccacaaaacaacaaaaaaaaacaacacacaaaac

SEQ ID NO: 994 - DNA, 1592 bp, Glycine max
  misc_feature (86)..(86): n is a, c, g, or t
  misc_feature (261)..(261): n is a, c, g, or t
  misc_feature (285)..(285): n is a, c, g, or t
  misc_feature (366)..(366): n is a, c, g, or t
  misc_feature (382)..(382): n is a, c, g, or t
  misc_feature (456)..(456): n is a, c, g, or t
  misc_feature (650)..(650): n is a, c, g, or t
  misc_feature (817)..(817): n is a, c, g, or t
  misc_feature (843)..(843): n is a, c, g, or t
  misc_feature (887)..(887): n is a, c, g, or t
  misc_feature (1101)..(1101): n is a, c, g, or t
  misc_feature (1129)..(1129): n is a, c, g, or t
  misc_feature (1173)..(1173): n is a, c, g, or t
  misc_feature (1222)..(1222): n is a, c, g, or t
  misc_feature (1285)..(1285): n is a, c, g, or t
  misc_feature (1382)..(1382): n is a, c, g, or t
  misc_feature (1390)..(1390): n is a, c, g, or t
  misc_feature (1428)..(1428): n is a, c, g, or t
  misc_feature (1447)..(1447): n is a, c, g, or t
  misc_feature (1478)..(1478): n is a, c, g, or t
  Peptide Sequence Number=SeqID_9202
  Probeset Number=SeqID_10773
ggtggcgcgccccccgccgcgacgccccgtcgaggtgcgtctcgtatgcggagtctgcgggtgcgtgccctatatatattgtgaanaagcctcctcgccgccggcagcgccggggcggcgtcatgagcatctctttcgagaaacctcctcgagagtcccgccgcgggagcattgccatggaacactcacttatcctcttatgcctacagctagctcgcgccgaagaacgtagttcttagagtatcactctcgcacccagcngccttgcgcgtagagttaagtcgnatgagagcgtcgactgccaggttggaagagatacaagagaagatgatcgtgtgtagtggcagtgttcgcgatatcccttcnccagctgtacccctgntcgcgccgcacttaaccctccgccgagcactgacagccgcggccacccctgtgcgcgatatagatgagatagangagattatagtaagtgttgatgtatagcgcgggttcggactcgcagcgcaacaccacggagagcgagttacgggtagaccgttgcccgtcttccgactattatcgcgcgttagtcctcgctgtattgatctccgcgccgggtgtaggtatatatagtttattggcgagttagttcggatgagcgagactgactncgtcgagcagctagtgccacatttggtgcagtagtggcgagatctctaatacctgcgaatcttgccatttatgtacacacatcttttcttacgtcaagcttggtgagcctattgccgacgcgagatcagagcgcgataccctctagatgtgaccgataccatagttngtgagagcctaggcatgcaaagccgncaacctctacacctctcgtccacacgcactaggacgcatgtgtncggcatggatataaggagagagcgaccaatctttcggaggccaatcatacactcctcagagcaatgggtctctcttatggaggggcatcgtgacgacaacactacccatatatcgtgttagatacgatgcatcggatgagacgtaaatccgatacagtgcgactaaccgatctatacagacttcggcatagaatgatggggaacggcgtgcacnagccatccatcgtcatcccacctcgcgntaggcgcctgcgctcttgagaatcggcggatagatggcagcgcntacagcacgtctctataagggacgtcggctggatcgtatgagtcacgtncgtcgagatacgataccgcaagctacatgatcgatatagagacatgacgcagcgtgagtaggnatcacacactgagcgcagatgttctctcgatgatgtctgtgtgacatgcttctctctatggtgtctcttacaccacgcgacatgcatctacgttganctgcatcncgtactctagcgcagcggtaatcgtctaccatcacctncgtcacactacgtgtgagnctcgagagtagagagcgccagagacagtcgntctctcgcatcgctcttcgtagctctagttgtctgctgccacatcgttcatgacttcactctactcccgagagtggatatctgcttcgtcacagtagtgcggttacgatcgacg

SEQ ID NO: 995 - DNA, 1341 bp, Glycine max
  misc_feature (147)..(147): n is a, c, g, or t
  misc_feature (451)..(451): n is a, c, g, or t
  misc_feature (639)..(639): n is a, c, g, or t
  misc_feature (652)..(653): n is a, c, g, or t
  misc_feature (1240)..(1240): n is a, c, g, or t
  misc_feature (1261)..(1261): n is a, c, g, or t
  misc_feature (1264)..(1264): n is a, c, g, or t
  misc_feature (1320)..(1320): n is a, c, g, or t
  Probeset Number=SeqID_10774
gtgtgtactatagtctttgactctgctcgttcataccagtctctctctcactcgatatatctcgtcagtttactatgtctcatcatataataaagtcaactcacgcgacatacacgcatcataactcaccattaactcccaggcgtnggaagacagatactacctagtagcgtatgtagtggtgtagatgaataatagagtagacagcgttctgagggaggagtaattttggtatgttgcgtccactttctgacgaccagtatacaccgacattgtacgtgctattcaccgggtgtggagccgacaatacctgactgcaaatcgaataatggcgactacgcgttaattggtgctgtttagatggtgtattaaatccttagggtggatgtgggtcattggggtgtgaggcgtagcgtgctcggctctcttgcgcatattgacagcgaacgcncaccaccacaccatgtgggcggggcgagggtggggtgtgtgaggagggtttgtggatagttgtggaaacttactttatggttctacttacataatctatgctatgtgagtgtggtggcggtagtgagacgaggtgggttagctggttgttatgttgtgttttttgttgtgttctttcttttttttgtnatatatttttttnntttttatttccactctccctcctgcaccacccacaagagaacgctcacacgtccatcccctagcatggcagcgaaaaccgagtagttatagtgttatagtggatttaattgtacaacaaaagtatgcttcgcaagtcacttataataccttgacgttccagtctcgatataaattatattataagaatggtattcgggatagatgttgacgctcggtatttgtattcagaagaagctgacacaggatagtatagagagagccagcatatctgtgtatttacatatcagatttgtgtagggtgtataatatgtcttgattgatattagcgtatgtacttcatgcctccacatctatgttcctaggaattaagaagacctaggcggccaaagaagaaaaaagtcagaattttgcaactgcggggtagggcgtatgtggtgatagcaatggcgcgagtagctaggtctggaaatagttaagaagtcgttcgtcgcatttccctcgtgtgattcatacactccacgttattatggcgggttcttgatgtctgacatttggcacccaatacaccgcctccgtctctaaggtntagtaagcaaaggtttgagtntgngagatcatctaaatgaagattcattcccctcttccttttatcaagtaactgcacancacccctcgtgtttcgaaatt

SEQ ID NO: 996 - DNA, 947 bp, Glycine max
  misc_feature (12)..(22): n is a, c, g, or t
  misc_feature (26)..(26): n is a, c, g, or t
  misc_feature (935)..(935): n is a, c, g, or t
  Peptide Sequence Number=SeqID_9203
  Probeset Number=SeqID_10775
tttttgggggtnnnnnnnnnnncggngcccgcgttttttttttttttttcgttttccgaaacagcgagagatttcaattttttagcctgaacacgagcactgattagaagctgagttccaaactgtgactcactgggcacaccgtacggagatcccgagtatttacacttgcatctaaaacctaaacgttcgtaataacgcaacactcatcctattgcctcctaaaccaacggcgccaaaaacactactcacatttctcatccccgagctctgcgtctacaacgcttcctgctccatcgatctccggcgcgcgcgagctcggtcacaccgtccgaccgagagccaagggagacgtcgccaccggagacccctggcaggctccatctactactagctctccggcatagcggtcaggtctaaggaaaacctgaacgccctccccgctccccgccgcggttaatacaacccccccgttccgcattggctccccacaccgcctacccccggctttaacttgaccgggaaccggggcgcaaacgccaacttccaccgggaaatattgactaggagactccctccagaggcatgacagcggaacgacggactaagtcaagggacgcccaaccccgggtcgagggccacagctcaaaccccggaattctaaacaagggcgaaccttggcaaaaaaggtgtgggactgttacgggaatccctccaacttgcaaaattgctttcccccgagaacaccggaaaaaaaaaaccgtgtccccccccgcgcccacgctccgcttcatcgtccctctcatatgctccaaacgctccttcctaccaccccccattccacttctcacaaacccactcttccctccccccacacacccgctgcacttacccaacacggcgaaactcctcccattccacccacatctcccttngcacttctcccg

SEQ ID NO: 997 - DNA, 461 bp, Glycine max
  misc_feature (209)..(209): n is a, c, g, or t
  misc_feature (377)..(377): n is a, c, g, or t
  Peptide Sequence Number=SeqID_9204
  Probeset Number=SeqID_10776
gccccccccagtggatgttggtaaagggtgtgctaaatgctcctcctagttggagtcctctcttaatgtgttgtgactttgatcctcgagatctacacgcaattcttaaagaggttatcttattctcgattggattagagtcaacaatactttctctgtatcatccttgattttatgttcaacttaagacccgtaggagggtttttttnagaatttttctttctattttgatagtttgaataggttttatgcatttatcaaaaatatgaatgattcactattcacctggtttctggacatcattatgcaggagagatggccgagtggttcaaggcgtagcattggaactacgtaggctttttgtttaccgagggtantacaaaaatagttgaaaaaagtgagcaaggaatgacaatttttatcatatccatgtctatgatacatgaatggcggaaaatcct

SEQ ID NO: 998 - DNA, 461 bp, Glycine max
  misc_feature (22)..(24): n is a, c, g, or t
  misc_feature (27)..(27): n is a, c, g, or t
  misc_feature (56)..(56): n is a, c, g, or t
  misc_feature (58)..(58): n is a, c, g, or t
  misc_feature (101)..(101): n is a, c, g, or t
  misc_feature (117)..(117): n is a, c, g, or t
  misc_feature (152)..(152): n is a, c, g, or t
  misc_feature (154)..(154): n is a, c, g, or t
  misc_feature (199)..(199): n is a, c, g, or t
  misc_feature (207)..(207): n is a, c, g, or t
  misc_feature (210)..(210): n is a, c, g, or t
  misc_feature (215)..(215): n is a, c, g, or t
  misc_feature (238)..(238): n is a, c, g, or t
  misc_feature (246)..(247): n is a, c, g, or t
  misc_feature (249)..(249): n is a, c, g, or t
  misc_feature (252)..(252): n is a, c, g, or t
  misc_feature (260)..(261): n is a, c, g, or t
  misc_feature (263)..(263): n is a, c, g, or t
  misc_feature (267)..(268): n is a, c, g, or t
  misc_feature (271)..(271): n is a, c, g, or t
  misc_feature (275)..(275): n is a, c, g, or t
  misc_feature (285)..(285): n is a, c, g, or t
  misc_feature (293)..(293): n is a, c, g, or t
  misc_feature (296)..(296): n is a, c, g, or t
  misc_feature (315)..(315): n is a, c, g, or t
  misc_feature (321)..(321): n is a, c, g, or t
  misc_feature (323)..(323): n is a, c, g, or t
  misc_feature (328)..(329): n is a, c, g, or t
  misc_feature (387)..(387): n is a, c, g, or t
  misc_feature (391)..(392): n is a, c, g, or t
  misc_feature (415)..(415): n is a, c, g, or t
  misc_feature (418)..(418): n is a, c, g, or t
  misc_feature (421)..(421): n is a, c, g, or t
  misc_feature (423)..(423): n is a, c, g, or t
  misc_feature (428)..(428): n is a, c, g, or t
  misc_feature (454)..(455): n is a, c, g, or t
  misc_feature (461)..(461): n is a, c, g, or t
  Probeset Number=SeqID_10777
gcccagattcacatccttcgannngantcacatcattttcccagtgtatggattgncnacggacagaaactagcgctagctaggctgcatgcagatactgntcttgatcgccgccgncgtggcgttcgtcgctggttacacgacggcgtcgntnacgacgatgatggtgatttacgcgtacaggcgttggtgtcgcgangttgatcncgncgccngactggccattcttcgaccgtcntccactcnngnggntggatccnngngaannggngaancatctctaanccgggagncgntggtagctccaacaacaantcatcnanccagnnccacaatcttcttttggaatctctcttatttttctagacctttgatataagaaaaganctgnnctggattttgcttatgaataatntangcnanatganataataattaaaaaaaaaaaaaaaanngcttan

SEQ ID NO: 999 - DNA, 1258 bp, Glycine max
  Peptide Sequence Number=SeqID_9205
  Probeset Number=SeqID_10778
aaaaaaatttgaataaactgactaacaattcccaatgcaggatactcaatttcaagcttttaactttgccggttcatccctggcaattcctgtccaacagacctcgcaaccaggccatgccatgtatggcttcttggggggtttcgctggactccttatggatactgtcctgcatcctattgatacagtaagaaccagaatcaaaaccaacactcaagagtcagttgccttattatcccaaatcaaatacatgtacagaaatgaaggtttctcttcatatgtcagaggtttaacatgcactttgggtggatctttcctcgccaacggtgcttatttctttgcatatgaaaaattaaagaatacatttacacaaagagaaactttcaatgaaggagttgctccattcgtagctgcattcacaagcggcgttctagctaatgtcttgtatctacccttcatagttgttagaaccagaatgcaaaccgcttctggcttttatgactatcgtaatgcttttgatggaatcaaaaaagtcatcaaatatgaaggcttcagaagcctctatttgggtggccctgtattcttaacacaaactgctcttgacctaagtctgactttcggattctatgaaatcttccataaaactataaaatctctcttccaaattgagtctgactcaagtctcccaatcaccatggcatcaagcgttatggccgcatccctcagtgctatcattgctaatcctcttgatgtattggttgcaagaatgcaaaccatgcatacaagtgctcatagtaaatgcactattcctgccatggccaagaggatttacgccagggaagggcttgctggcttcatgaaaggagttacaggaaccatgtctcattattctatggcagcattgatacttttcccaacgtatcaagcactcaaagatttctacaaccttgattcagatctttaagtctttatatcatccaatgttcttctctctctttttttcattttataacaaaaatctgtctgtataattagagtttttgcaatgtaatataccactttactgtttataactatatataccaaagaggagtgagatactttctcaatgaacatttagcgagtatcatgtttataatatattatattttataatgatacattttttttataaaaggatcttttgttggtttgatcccctttatttcattttataaatacacccttgttttatccccaaaaggtaaacccttcttcc

SEQ ID NO: 1000 - DNA, 1562 bp, Glycine max
  misc_feature (1)..(1): n is a, c, g, or t
  misc_feature (35)..(35): n is a, c, g, or t
  misc_feature (44)..(44): n is a, c, g, or t
  misc_feature (217)..(217): n is a, c, g, or t
  misc_feature (292)..(292): n is a, c, g, or t
  misc_feature (323)..(323): n is a, c, g, or t
  misc_feature (330)..(330): n is a, c, g, or t
  misc_feature (573)..(573): n is a, c, g, or t
  misc_feature (618)..(618): n is a, c, g, or t
  misc_feature (661)..(661): n is a, c, g, or t
  misc_feature (891)..(891): n is a, c, g, or t
  misc_feature (985)..(985): n is a, c, g, or t
  misc_feature (988)..(988): n is a, c, g, or t
  misc_feature (1108)..(1108): n is a, c, g, or t
  misc_feature (1168)..(1168): n is a, c, g, or t
  misc_feature (1203)..(1203): n is a, c, g, or t
  misc_feature (1256)..(1256): n is a, c, g, or t
  misc_feature (1266)..(1266): n is a, c, g, or t
  misc_feature (1319)..(1319): n is a, c, g, or t
  misc_feature (1343)..(1343): n is a, c, g, or t
  misc_feature (1471)..(1471): n is a, c, g, or t
  misc_feature (1482)..(1482): n is a, c, g, or t
  misc_feature (1484)..(1484): n is a, c, g, or t
  misc_feature (1488)..(1488): n is a, c, g, or t
  misc_feature (1499)..(1500): n is a, c, g, or t
  misc_feature (1504)..(1505): n is a, c, g, or t
  misc_feature (1507)..(1507): n is a, c, g, or t
  misc_feature (1514)..(1514): n is a, c, g, or t
  misc_feature (1521)..(1521): n is a, c, g, or t
  misc_feature (1523)..(1523): n is a, c, g, or t
  misc_feature (1533)..(1534): n is a, c, g, or t
  misc_feature (1538)..(1540): n is a, c, g, or t
  misc_feature (1561)..(1562): n is a, c, g, or t
  Peptide Sequence Number=SeqID_9206
  Probeset Number=SeqID_10779
ngcgcatcacaccccatcacaatcacgcgtggatnctctctctntgatcctatgcgcgcgctcgaggcgatcgcgtagcgtgcgaggttcggagctagtgggggcatgtgtatgtctcgcctccacgtcgcgcttcacgctcgtgacgcagtatgtgcagagtctggtctatcaagtgcacaggacgagaggcaaagcggcgaacgtatacgagcgnagtcatgtatactatgatctaagtggagtcgacttgtctgtccgccatttatctacgatccaatgtatcgctagngccgtccagctgaggcgtgctgcgcgcgatncgtgcgngcggtgcggtcggcagtcaggtacataacacgacagtaataagcacagccgctctccacgcctgtcggctgcgccgagacgcgtgcggcgcgctacttcgtctcgctgcactcgctatacatcaaatacatatataatattatattgtactctcattatctatctatatcaaccagtcgacaactagtatagagactacgtcgtacagtcggcgcatttcacgtgtactattcatctgctatnttcataacataccacggcagtgtcgcgttgtgttggtgttgcgcngctgcggatgctattggtgtgcttgttatatcacatgcaagcnaagagacggtggcgtggctttgccgcctattgtgatgttgtcgatctgcgggtgtcgtattcatgctgtgctactctgtccagtcgtcagtgtaacaggagaattactctctcgctctatttcgctactatcattgctgagctagtgcgggctaacgcactaccttcattcgcgtgcttatactatccacggaccataccaccttccccacacaaacaaataagaaacanaacaacacacacacaacaaacgacagagcacaccgagaccaagagagaaccagccacgcgcgcgcgcaccacacacatgacacatgccagccancgngagcacaacaacatacacgaacacgaagtggtagagctccacattatgcgataataagtctattgtgtaggcgcgtcgtgataaggagcggagcgcgcgaatggtggtgttgctggtcanatttcatgccaggcagttcgcccgggcctcctctcagtcgcggtttgtcgttcatagtgncttgctcatttcgtatactactatactccaccgancaatatcacatacatatcgatcgtaagtcatatcgtggtgcgagaaggtgatnacagcacacnagcgagagcatgtttataccgaagctgtggagattctgcgatagagtaaaagnagaccgctccttcagcacttcaantggctccgacccgggggcagacagcgcctccgcgcaccgcgccacgcaggggcatcaggcctgttatgcgtgacatcgtagcgcgtgcgtcccacgcgttcctcacttcacacatcttctccgtaatnattttagtttntntggnttttatgtaannttannantctttantaagaantngggggggggnnggtnnnggggtggggaggggggggggnn

SEQ ID NO: 1001 - DNA, 1024 bp, Glycine max
  misc_feature (33)..(33): n is a, c, g, or t
  misc_feature (161)..(161): n is a, c, g, or t
  misc_feature (164)..(164): n is a, c, g, or t
  misc_feature (1024)..(1024): n is a, c, g, or t
  Probeset Number=SeqID_10780
aatcaaaattattcgctatcaaataaattaagntgaaagaaatcacaattaaactgttgctcagaagatgtttcattgaattggattgctaagaattgctcgaaaaatcatcaagtaactcccagctttatcttattgctcagatggatggaaaccttttnagntttgaatcataactgactatgctatgaaagacagaagaagaaagctttgtaactttgaagctggagagaatgatcagctacgtaggcccccccccgaaatcagagtaaattttcaatggactaaacatatcaggacacaactggaaaatcgaagaaaccttttgttacctatccaagaagatgatacgactcaaataatcctgaattatctcttactgaatcagctatcttactgatgaagaacaagaagaacttttactatcagactatgatgatgatcccgaaaaccaaaaggtactcaaggacaattcaccattgatagacgcacatattgctgaaactttttgaaaatacaagaagaagactatcgataaataatccttgaagacattgattgaaaacatgaactcgtttatggaagaaatttgctgagaaaaggtacctttggagaagttatgcttggtagatgaacgaaatcaaaacacatgaaatttctcaagactcgaatcaaagaagctaatgtcgaatgaacacggagaatcaagcatgaatcaagagatcaaggcaggtacctactggaaaagttatgcttcgtagttggaagaaatcagttaaactatttgctctatcataaaatatcaagaaggaaaagctccaagaagattttcagaatatatgaagactaattatgatatctctcaagaagatcaatttatcaaggcctgaaatgatatgattgaccaatcaagaatcaaaatcacttatcatattggaacaagtaaaatgcgactatgttacaatttcaggcaaatttggggttgaaaaaacttatccaagacaatatatccaagaattcaagn

SEQ ID NO: 1002 - DNA, 774 bp, Glycine max
  misc_feature (202)..(202): n is a, c, g, or t
  misc_feature (390)..(390): n is a, c, g, or t
  misc_feature (601)..(774): n is a, c, g, or t
  Peptide Sequence Number=SeqID_9207
  Probeset Number=SeqID_10781
attttggtatcttcagctaaaaatggagagcagctgcattctggcttttcttttcctcctcattctcccactcagtacaacaaaagctgccttcagtgttgcgtggtggagttggtgtaggtgaaggtgtaggtataggcgccggcggttgccgtctgcaatggaaatggtgccaagggggaaatgcttcgcgtcgctcggnggggattacccgccccgagccaccctaaatcttccgtcgccaagcctttaaggaagactacctagttacttcccccccccccccaaattctggccgccccctgagggccccccccttataatttttattcccgttttgggattgtggccccacaaggcggggggggttaaaaaaaaggaaagataccntgtgggcggccacacccccccccccgaaatgaaaaccgtgtgggtgtctcgtttactgaaaagacattcccccgcacgtacggtgggtcaccccgcgcatcaacaccccccccccagccatcgcgcacaattgcacaaaggaagaacacctcgcgtcggggaggagtccccttccccacaccccccgcgataatgttgtgcactctttccnnnnnnnnnnnnnnnnnnnnnnnnnnnnnnnnnnnnnnnnnnnnnnnnnnnnnnnnnnnnnnnnnnnnnnnnnnnnnnnnnnnnnnnnnnnnnnnnnnnnnnnnnnnnnnnnnnnnnnnnnnnnnnnnnnnnnnnnnnnnnnnnnnnnnnnnnnnnnnnnnnnnnnnnnnnnnn

SEQ ID NO: 1003 - DNA, 1651 bp, Glycine max
  misc_feature (1)..(243): n is a, c, g, or t
  misc_feature (1651)..(1651): n is a, c, g, or t
  Probeset Number=SeqID_10782
nnnnnnnnnnnnnnnnnnnnnnnnnnnnnnnnnnnnnnnnnnnnnnnnnnnnnnnnnnnnnnnnnnnnnnnnnnnnnnnnnnnnnnnnnnnnnnnnnnnnnnnnnnnnnnnnnnnnnnnnnnnnnnnnnnnnnnnnnnnnnnnnnnnnnnnnnnnnnnnnnnnnnnnnnnnnnnnnnnnnnnnnnnnnnnnnnnnnnnnnnnnnnnnnnnnnnnnnnnnnnnnnnnnnnnnnnnnnnnnnnnncaaaactttatcctttctctttctctttttttctttggggggagggggtgaatgaaaatttctggttactgtgcttttttctggttttaggatatgcattacttttgagggaatttggatctggaagagcttttagtgcatgaagattcttttctctctctcactctctcttcaattcatataattaccggggcaccaacttggcccccccccccgaaacttttaagtactagtggcactgggtttcactcttattatttgtttttttcaatgcaaacaaaagtctctttcttagcagccagttggtgttgtttgtcgcaggaattgggcactggtagcttagctcgtgtaaatgtgtgtctggctttggaaatccatgaataaaattatctgagatttgagagctttgagctgcgaagatggtggctaattgactttgaggtcaacttgcaaggtcatgaggtggagttgcagtgagctacatgtaggagcaagatgattgagcaattcatcaatttcgttattaggcctcccagggcggagtataaccctgatcagtacctatgggaaaaggaattcacccttacaggtcgaacataccaaaggcaggatttggagctcaagaacaccagaggctataccttgaagtgtagtcattatcttccttctcctttccctgaagatacttctcttccttgtgttatatattgccatggaaacagtggatgtagggcagatgccaatgaagctgctgtaattcttcttccttcaaatattactgtttttacccttgacttctcggggtcaggcttatctgatggagactatgttagtcttggttggcatgaaaaagatgatctcaagatggtggtgtcatatttgaggagcaacaaacaaatatctcgtataggtctttggggacgatctatgggtgctgttactagtcttctttatggagctgaagacccttctattgctggaatggtgttggatagtgccttttcgaacttatatgatctcatgatggagcttgtggatgtttataaaattcggctgcctaaattcactgttaaaatggctgtacagtacatgcggcgggttattgagaagaaggcaaagtttgatattatgaatctgaactgtttgcaggtatgtattagttgtgcagttcttcttttgttttcttctttagaaaaatggtgaagcatatttcaagttgtttaacatttttaaattattaaaattatttatgtaattatgtaaacttcattaacttggatccaaattacttttttaacattcagaaaaaaacgtccgcttaaaatataatataaaaatattaaaagaaacatctcttagaattttttttgtttgagattccatatcatagaaaaaaaaaaaaaaaaan

SEQ ID NO: 1004 - DNA, 1520 bp, Glycine max
  misc_feature (274)..(274): n is a, c, g, or t
  misc_feature (697)..(697): n is a, c, g, or t
  misc_feature (1423)..(1423): n is a, c, g, or t
  misc_feature (1491)..(1493): n is a, c, g, or t
  misc_feature (1496)..(1496): n is a, c, g, or t
  misc_feature (1498)..(1499): n is a, c, g, or t
  misc_feature (1506)..(1506): n is a, c, g, or t
  misc_feature (1511)..(1514): n is a, c, g, or t
  Peptide Sequence Number=SeqID_9208
  Probeset Number=SeqID_10783
tagagacagagacgtatgattgagagtggtgagaggcagtggcggaagagtgagcagcagcagagagcagagagatgtgtgtaggaagagagactcggcgcaggaacagcagagacccgcgtccggatcttgcatcatagcctcattcgtgggaacttattcacgtcaatacagagcatgccgtctggtacgataacagtgtcgcgccactacattagctatgataggtacatgtatctgcgggataagtcgattatctgcacttgctatcatnggtgctgtcacgcgcattcgcgggcgcagacgtgatgtgcacgtatgagagtgtgtgacgccgtactgtgcagtgttgatatgatgtgcgtataagcaatatcctactgtatatttcgtggcttatattctgctcgtctatctctctatattgtatgatcacggattatagagaagcgggaatgaatcagtaccgaatagagatgttagagagtgcatggtaatgtatgcacgacagcgagccagtggacactcacgtgccagcagcgcacgatccagcactgcagtcatgattatctaaattaattggtcagagcgccagagagcgagtacatctgttcgcgtacgatgatgagttaggtcacaagagcgcttcatgtgctgcggcaacgtaatagattatgtgtcagatgtagaccggtgntgtatgtcacagcgaatagcgtaaataatacattctgccgctcattaatatgtctattgctgagtcgccgcagccttgcggttatgaaatggaatacggacaaggtagaatatgtcactagttgaatatataagttgaggatattcaggtgtggcggcgagcagagtaaccgcgtccgcgcggaaattttacctcattgatatatgattcctgttgtttagcgttttatgtcgtgatctaaagctgtgttaagatggtggtggtacattagataacagtttaaatacaactcttgttatgccaccccgatgaaacgcacgggtcgaccgcaagcaacatcgccctctataccgggcggtcaacacaatcataggggtgaggaggggaacgagcgcgagaggagagggcgcagggtggtggtgcttgggagggttatggtgcgtatccattcataccagattagcacagcactaatgacttgtagaatagagagaatgatgaggagatatactgatcgtatgtacgtgacgcatctcagaggattaagatgagattgcatgatgcgatgtgtttggtgcggtgggagttgctaagtattcgttcgctcccgtcgttgactgtctattgtgaggttgtgtggatgatacgcatgtgtatgatggtacgagcagactgtagacaaagatacagagtaagagggagcgcgcggtgggtgaaatgtttacncttctgcgttgtgttgtgagaagtgcgcgcattcgaatattaaagcgtcacaaaagaagaaataaaannnaanannaaaaaanttaannnngggggg

SEQ ID NO: 1005 - DNA, 1487 bp, Glycine max
  misc_feature (1)..(1): n is a, c, g, or t
  misc_feature (7)..(7): n is a, c, g, or t
  misc_feature (24)..(24): n is a, c, g, or t
  misc_feature (44)..(44): n is a, c, g, or t
  misc_feature (60)..(61): n is a, c, g, or t
  misc_feature (113)..(113): n is a, c, g, or t
  misc_feature (169)..(169): n is a, c, g, or t
  misc_feature (178)..(178): n is a, c, g, or t
  misc_feature (186)..(186): n is a, c, g, or t
  misc_feature (194)..(194): n is a, c, g, or t
  misc_feature (198)..(198): n is a, c, g, or t
  misc_feature (223)..(223): n is a, c, g, or t
  misc_feature (225)..(226): n is a, c, g, or t
  misc_feature (248)..(248): n is a, c, g, or t
  misc_feature (250)..(250): n is a, c, g, or t
  misc_feature (252)..(252): n is a, c, g, or t
  misc_feature (271)..(271): n is a, c, g, or t
  misc_feature (284)..(284): n is a, c, g, or t
  misc_feature (303)..(303): n is a, c, g, or t
  misc_feature (306)..(306): n is a, c, g, or t
  misc_feature (311)..(311): n is a, c, g, or t
  misc_feature (325)..(327): n is a, c, g, or t
  misc_feature (337)..(337): n is a, c, g, or t
  misc_feature (339)..(339): n is a, c, g, or t
  misc_feature (360)..(360): n is a, c, g, or t
  misc_feature (364)..(364): n is a, c, g, or t
  misc_feature (367)..(367): n is a, c, g, or t
  misc_feature (370)..(370): n is a, c, g, or t
  misc_feature (383)..(384): n is a, c, g, or t
  misc_feature (386)..(386): n is a, c, g, or t
  misc_feature (401)..(401): n is a, c, g, or t
  misc_feature (406)..(406): n is a, c, g, or t
  misc_feature (424)..(424): n is a, c, g, or t
  misc_feature (435)..(435): n is a, c, g, or t
  misc_feature (440)..(440): n is a, c, g, or t
  misc_feature (455)..(455): n is a, c, g, or t
  misc_feature (463)..(463): n is a, c, g, or t
  misc_feature (466)..(466): n is a, c, g, or t
  misc_feature (483)..(483): n is a, c, g, or t
  misc_feature (486)..(486): n is a, c, g, or t
  misc_feature (488)..(489): n is a, c, g, or t
  misc_feature (494)..(494): n is a, c, g, or t
  misc_feature (499)..(499): n is a, c, g, or t
  misc_feature (515)..(515): n is a, c, g, or t
  misc_feature (517)..(518): n is a, c, g, or t
  misc_feature (520)..(520): n is a, c, g, or t
  misc_feature (522)..(522): n is a, c, g, or t
  misc_feature (524)..(525): n is a, c, g, or t
  misc_feature (546)..(546): n is a, c, g, or t
  misc_feature (555)..(555): n is a, c, g, or t
  misc_feature (560)..(560): n is a, c, g, or t
  misc_feature (562)..(562): n is a, c, g, or t
  misc_feature (573)..(574): n is a, c, g, or t
  misc_feature (577)..(577): n is a, c, g, or t
  misc_feature (586)..(586): n is a, c, g, or t
  misc_feature (590)..(590): n is a, c, g, or t
  misc_feature (605)..(605): n is a, c, g, or t
  misc_feature (636)..(636): n is a, c, g, or t
  misc_feature (638)..(645): n is a, c, g, or t
  misc_feature (647)..(647): n is a, c, g, or t
  misc_feature (654)..(654): n is a, c, g, or t
  misc_feature (661)..(661): n is a, c, g, or t
  misc_feature (700)..(700): n is a, c, g, or t
  misc_feature (746)..(746): n is a, c, g, or t
  misc_feature (759)..(759): n is a, c, g, or t
  misc_feature (761)..(761): n is a, c, g, or t
  misc_feature (788)..(788): n is a, c, g, or t
  misc_feature (810)..(810): n is a, c, g, or t
  misc_feature (838)..(838): n is a, c, g, or t
  misc_feature (885)..(885): n is a, c, g, or t
  misc_feature (924)..(924): n is a, c, g, or t
  misc_feature (934)..(934): n is a, c, g, or t
  misc_feature (988)..(988): n is a, c, g, or t
  misc_feature (1087)..(1087): n is a, c, g, or t
  misc_feature (1089)..(1089): n is a, c, g, or t
  misc_feature (1094)..(1094): n is a, c, g, or t
  misc_feature (1145)..(1145): n is a, c, g, or t
  misc_feature (1182)..(1182): n is a, c, g, or t
  misc_feature (1289)..(1289): n is a, c, g, or t
  misc_feature (1387)..(1387): n is a, c, g, or t
  Probeset Number=SeqID_10784
ncacatncctactcacctacttanagcaaaatatctatacacancacacatctcaaatanntatcaccatacaaaacatactatacataatacatatcacacatatataatantgttcaccaccccacgccacatccaaccactatctattctctctcacaatctcatntatctactnatacatantaaatacncatnatactaacataacttctcagtgtantnncacaacacaccactatctcttncnantccactctctaatataatnaccatcatgaatncatatatccatcaattatntanaaatnaaactaacacccannnacttatatanancccccaatagttcatatatgncatnatnctncacatcctactcnntntacgccagcccattntattntaaataaatcactattcncctcatcacancaatncatcacccaatacanaattctanaancaccctacctatactanttnanntcgtnctttntaataaatatacacancnnantnannctctatccccccatcacttanatacttctntactnancattgctaagnnganggtgtgggngtgnttgattataattatntacaacaacacaccacacacaacactttttntnnnnnnnngnggcgggngtgaaantatagagggtggggggtgtcctcttcacatctatcactnacttattctattacataatcaacaataaaaacaaaacaaacatccntaatatataacanancataaatcattcaatctccaccacacntcccaacaaacatacaatgacnatagacagccactcacatgattataagnaaaaggatatatagacatctccccacacacacctttcacacaatctntctcaatatacaacttcatatatccacacaccacattcnctcttactanatcaatgtccatctctgcccacacaccacccaccatacatctccagaatcattnaacaaccaacactaaagcctctctcgctcaacaccacacctaacccacatcacacctcaaccgtacaaattaacttcgcctccctctcgccccaatgtncnctctnaacacactacaccatccaactctacgcactctttctctccctatacccacncattaatctctccttccattctatactcttaatgacnctccaatattattcacttatatcatctacaatattacctctattagtatattatcatctcatatctaattatgtctctaattattatatttatattattttgtcctnttaatctttataacctttctatctttcgtaccactatatgaatcagtttcctttccttacctttacttatatcttatacttcctatattatatttacntacatatacacataatcttgttgttattatatattattattatcttatttctttctcttattctatattttttgttttattgtaatactttatatatctt

SEQ ID NO: 1006 - DNA, 761 bp, Glycine max
  misc_feature (761)..(761): n is a, c, g, or t
  Peptide Sequence Number=SeqID_9209
  Probeset Number=SeqID_10785
acatccctcaaaaccatttcgaaatcaaatctagtttgagagagagacacacagacgacaccaagcttctttcaatctcctcgccgcagatcaaactctcctattcctcggataaacctctccttctgcggcggcgatataaaaagaacaaaacctcccaaacaacaagaaaagtttcaaccttttattgtctgttccatctctctctctttcacatatttcgataaacatggctcgttccctctctagcgttaagttcgtatccgctttcgtctctcaagaactctccaatgcaatcttccgacgtggttttgctgccacgacggcgcaaccgagcggtggaaaaggtggagccgttgtttcggcggtgatgaagaagggaatggaagaatcgaaccagaagctttctgcttggattccagaccccaaaaccggctattacagaccggaaaccggttccaacgagattgatccagctgagctacgagcagctctcttgaacaaaaagcagtgattgattaattgagtaaagaagtctgcttcttctttttttttgattaattattgtaatgttaatttaatgtcttgagacgagatcaggggaagagggttatgatcttgtgcggtgaaccctgttttacgtgcgattctgtaataaaccaatagagaaaccttcttggttgctctattttgtaacaaaaaggatcgttggatatgatgtataatgtattatccattaatatagttttctaaaatcactn

SEQ ID NO: 1007 - DNA, 489 bp, Glycine max
  Peptide Sequence Number=SeqID_9210
  Probeset Number=SeqID_10786
agaagatgaactcactcgctatccgagtttccaagcttctgagatcctctccgatatctcctcctctaggcaatcaatcccctcttctttcacctaaatcatctgggagtgtagcagtcactgcttggaggtcttggttctcgactggtcccatcgacgaggaagggttggaagaagattttgaagaaaccatctcagaaagacccgccgagcttcagcctcatggtgttgatccccgtaaaggttggggctttcgcggtgtccacagggtaaacttgatctttaatctattattgttttctttgctgaagattgttgttacaatcaaaccttagtcttcaaccctattgaaaaggaaagagtcttgaagaatccaactgtgttctatcaaatcttcattcattcatgacctgagttatcttgttgttgatgtcttttgatttgctcgcacaggccatcatttgtgggaaggtagggcaagcaccatta

SEQ ID NO: 1008 - DNA, 1454 bp, Glycine max
  misc_feature (1)..(12): n is a, c, g, or t
  misc_feature (20)..(21): n is a, c, g, or t
  misc_feature (23)..(26): n is a, c, g, or t
  misc_feature (29)..(36): n is a, c, g, or t
  misc_feature (53)..(58): n is a, c, g, or t
  misc_feature (61)..(62): n is a, c, g, or t
  misc_feature (64)..(64): n is a, c, g, or t
  misc_feature (69)..(71): n is a, c, g, or t
  misc_feature (86)..(86): n is a, c, g, or t
  misc_feature (88)..(88): n is a, c, g, or t
  misc_feature (90)..(91): n is a, c, g, or t
  misc_feature (93)..(93): n is a, c, g, or t
  misc_feature (98)..(98): n is a, c, g, or t
  misc_feature (110)..(110): n is a, c, g, or t
  misc_feature (119)..(120): n is a, c, g, or t
  misc_feature (124)..(125): n is a, c, g, or t
  misc_feature (129)..(129): n is a, c, g, or t
  misc_feature (133)..(134): n is a, c, g, or t
  misc_feature (137)..(138): n is a, c, g, or t
  misc_feature (140)..(143): n is a, c, g, or t
  misc_feature (147)..(147): n is a, c, g, or t
  misc_feature (149)..(150): n is a, c, g, or t
  misc_feature (154)..(155): n is a, c, g, or t
  misc_feature (158)..(159): n is a, c, g, or t
  misc_feature (161)..(162): n is a, c, g, or t
  misc_feature (169)..(170): n is a, c, g, or t
  misc_feature (174)..(175): n is a, c, g, or t
  misc_feature (177)..(177): n is a, c, g, or t
  misc_feature (188)..(189): n is a, c, g, or t
  misc_feature (199)..(202): n is a, c, g, or t
  misc_feature (204)..(206): n is a, c, g, or t
  misc_feature (439)..(439): n is a, c, g, or t
  misc_feature (454)..(454): n is a, c, g, or t
  misc_feature (465)..(465): n is a, c, g, or t
  misc_feature (492)..(492): n is a, c, g, or t
  misc_feature (785)..(785): n is a, c, g, or t
  misc_feature (883)..(883): n is a, c, g, or t
  misc_feature (1098)..(1098): n is a, c, g, or t
  misc_feature (1144)..(1144): n is a, c, g, or t
  misc_feature (1317)..(1317): n is a, c, g, or t
  misc_feature (1360)..(1360): n is a, c, g, or t
  misc_feature (1380)..(1380): n is a, c, g, or t
  Peptide Sequence Number=SeqID_9211
  Probeset Number=SeqID_10787
nnnnnnnnnnnngggggggnnannnnaannnnnnnnaagccacagaaagtaannnnnnatnnanaaaannncaactaaaaacaaantnanncncccgnagtccacgaggncagggactnntacnncggnacgnngtnnannnntggngnngagnntgnngnnggggggnngagnngngggtggggganngcgggggggnnnngnnnaaaaaactcgtcgaatctaacatatgacataactttcggtctatcattcatcatctctcatcccctagctacatctaactgtagattatacctattgtcgaatatctctgtctgatgaatctataatcactagtatcatacacatctctctcatagtaatactagcattatgtcattatgtatgtactagacaccttaacactaatcgacataagaacaatattagtagtaanataacaaaatataanaaatatatctntcaaccaaacaaacacacccacacccnctctcccactcccacactcacatctactcaaagtatacatcactaatcactgcatacaccaacaccaccaccaccatacaaggagacgtgacaacacgaaaagcgaaacaaagcaagaaatatacacgaagtgacaggaaaaatatattattgttctcataagacatataataaaaacctgacgcaggagataacacgtaaaccaacgagaaacaacacaacgtggcaaacacactatatgttcacgtactcactgaccatatcgcacccacccgacaacaagacacgacgcncagcgaggtagaagcgtcacgacaccaaggagggtgcggcgtagaagatacggacgagaggacagatggatggagaacaaacaggtgacgagatgcangcgacataggtgggcggcttatgactcacaccacacttcgtatactatcgtcacttgtcactcatcctctctctacatccgctcatccacgatcgctatacgccgtgtatcattatggtcatgagcatgatccttagatgacacacaatacacagacaccgtcgaccagacacgatagcggtgcgtgcttctctatcatactctactctatgatngtgttgattatatctcatatataccgatcgcgatgatgctacaatngatgcacgcactcgcacgacatataaatgtccgctcgtgtatatacacgcatattgtggttgagtgaacaacgtgtatgctatgaagaatgagtctctacatatactatcacatattatgtgagtgtcgtctatctcatcacacaagtttctctcggctctatcgtcaaatcnatctctctgagctcagatacacagctcagtgcgacatattacntcgcgccgtcacaacaacantctcacgccgtctatatagcggccacacgcagcctgcgccgacaccaagaagaacgtgaacacacgacgagaca

SEQ ID NO: 1009 - DNA, 310 bp, Glycine max
  misc_feature (44)..(44): n is a, c, g, or t
  misc_feature (68)..(68): n is a, c, g, or t
  misc_feature (94)..(94): n is a, c, g, or t
  misc_feature (98)..(98): n is a, c, g, or t
  misc_feature (119)..(119): n is a, c, g, or t
  misc_feature (224)..(224): n is a, c, g, or t
  Peptide Sequence Number=SeqID_9212
  Probeset Number=SeqID_10788
cttgtttgtctcctgtttttgtccctgttctttgttgttcggcntgtttgtgttcctttgttgctctnttctgctctccggtgtgggtctgggntggncttcggttgtgtgcttcttcnggttgcctcgttgttgcgctgttttggtccctgttgttggttgtttgtcttgggttctttcctttgttgttcgccccggctgttcggctttgttgcgccggcccncttttttgtgtgggtcccccgcccgccttcgttttgtgcttcttgtttccggctctctcgtgcgcttgcgtgggcccgtgcgtggg

SEQ ID NO: 1010 - DNA, 1401 bp, Glycine max
  misc_feature (1)..(1): n is a, c, g, or t
  misc_feature (4)..(4): n is a, c, g, or t
  misc_feature (74)..(74): n is a, c, g, or t
  misc_feature (93)..(93): n is a, c, g, or t
  misc_feature (101)..(101): n is a, c, g, or t
  misc_feature (108)..(108): n is a, c, g, or t
  misc_feature (162)..(162): n is a, c, g, or t
  misc_feature (284)..(284): n is a, c, g, or t
  misc_feature (311)..(311): n is a, c, g, or t
  misc_feature (337)..(337): n is a, c, g, or t
  misc_feature (344)..(344): n is a, c, g, or t
  misc_feature (367)..(367): n is a, c, g, or t
  misc_feature (381)..(381): n is a, c, g, or t
  misc_feature (383)..(383): n is a, c, g, or t
  misc_feature (396)..(396): n is a, c, g, or t
  misc_feature (398)..(398): n is a, c, g, or t
  misc_feature (514)..(514): n is a, c, g, or t
  misc_feature (619)..(619): n is a, c, g, or t
  misc_feature (660)..(660): n is a, c, g, or t
  misc_feature (715)..(715): n is a, c, g, or t
  misc_feature (974)..(974): n is a, c, g, or t
  misc_feature (1054)..(1054): n is a, c, g, or t
  misc_feature (1289)..(1289): n is a, c, g, or t
  misc_feature (1380)..(1380): n is a, c, g, or t
  Probeset Number=SeqID_10789
ncgngcgtgagagcgcgtgtcagacagtacacactgcacactccataccttcatacaccactcacattacgcgncgctacatctagtcatatnttgatcgntaaaatncatatcctactctcgacgacaattgcacatgtcagtataatatatatggacgancatatatcgatgcaagcatgtataaatactataggcgtcgatctattatccacatgcaccaatactgtcacgcgatcatgagtcgtctttctcttctatatatatttctcgagcgtctacanagatctcactacatcatccgctacgtnttaagtgtacacacacaatcacacgntactcantacgcatctactccttttagtcngcataactactctnangcagctcatcganangacgacaaacatctatgtaactactactgtccacaatcatcttcatatgacccgactctactcttacatacgccgttcatatatgctcacaatcataaaccagctctcagtattcnacgctcatacactaaatatgtcgattgttagttttactcactattctctctctctctttcctatctatccacattacaacgtctacattcctccattacagactntaacatccgctcttcaatgtcccatcatatccttctccatnctctgtctcgacactatatctatttgtttggtagtatatacctcactcatattcncctcatttctagctcctcctctctccattatataacatttatattaccatcatgatatttatctaatataactataagatataatacatatattattctataatgttacatatgtgtcttacctcatctgtctcatatattccatctccctctcatatttcttatcagttacattatctatactatatttaatcaaataaataatcacactccctatctctactcatcttcatatgttcccacactaaacataatctanaaaagaagatacatcttagagagaaatattaattacatgaacactcttctattctacttaactctttataagaatattgntggctacaacccaacaccacaaccaccaacctcctctacatcatacatccacaccaccctccacaccagctatcattaattttcatatatattatactatacaataaataaatacttcttttccatctcttctctcttctttcctcttcatcttctcatacatcctctttatcatatcacaataactactcaattccttatacttctttattttttatattttattttatcttantttatatactaatggggtggggtggtttctcctctcatttccctattattctttatctctttcttttcatctactacatatctatcgtgtntattcttatatatatcatctt

SEQ ID NO: 1011 - DNA, 3076 bp, Glycine max
  misc_feature (3025)..(3076): n is a, c, g, or t
  Peptide Sequence Number=SeqID_9213
  Probeset Number=SeqID_10790
aaatttatggtcaacaaaagcagcgaaaggcaccagaagctgctgatattgctttattgttacagaggaatgaggcactccgagttgctttcattcatgttgatgaaagtacaactgatggaaatacttcaaaagtgttttattcaaagcttgtcaaagccgatataaatggaaaagatcaggaaatatattctataaaacttcctggagatcctaagcttggggaaggaaagcctgaaaaccaaaaccatgcaatagttttcactcgtggtgaagctgttcaaactattgacatgaatcaggacaattatcttgaagaagcaatgaaaatgaggaatcttctggaggagttccatgcgaatcatggccttcgccctccaagcattcttggagtgagggagcatgtttttacaggaagtgtctcttccttggcttggttcatgtcaaatcaagaaactagctttgtaaccttggcccaacgagttttagcaaatcctctcaaagttcgcatgcactatggacacccagatgtatttgaccgaatatttcacataactcgaggaggcattagtaaggcatcacgtgttattaatattagtgaggatatatacgctggtttcaactccacattgcggctgggaaatgtcacacaccatgaatacattcaggttggaaaaggaagggatgttgggttaaaccagattgccctctttgaggggaaagtggcaggtggtaatggagagcaagtgcttagcagggatatttacaggcttggacaactttttgatttcttcagaatgctttctttcttcttcacaactgttggttattatgtctgcaccatgatgacagtccttacagtgtatattttcttatatggaagagcatacctggctttttctggtcttgatgaagatgtctcgaagaatgcaaaattgcagggtaacacagcacttgatgcagctttaaatgctcaatttttggtccagattggtgttttcactgcagtaccaatgataatgggttttatacttgaattaggattgctgaaggctgttttcagtttcatcacaatgcaactacaattgtgttctgtcttcttcactttctcattgggaactagaactcattattttgggcgtaccattctccatgggggtgcaaaatatcgtgctactggtagaggctttgttgttcgtcacataaagtttgctgaaattattacagactatattctaggagccactttgtcaaagcgcttgaggtggcattgcttcttatagtttatatcgcatatgggtatgcaaagggaggtgctgatacgtatgttttgctaactctaagtagttggttccttgtcatttattgatttttcgatccttaccttttcaacctctctggtttcgagtggcagaagactgtggaagattttgatgattggacaagttggcttttttacaaaggaggagtaggagtaaaaggagaaaatagttgggagtcttggtgggacgaagaacagatgcatatccaaactttgaggggtcgtattttggagacaattttgagtgcaaggttcttcttgtttcaatatggtgttgtgtataagctgcatcttaccggaaacaatacatcacttgcgatatatggattctcatgggctgtcttggttggaattgtcttgatatttaagatctttacctacagcccaaaaaagtctgctgattttcagctagtattgcgattttcacaaggagttgcatctataggccttgttgcagctgtgtgtcttgttgttgcctttactccactgtcgatagctgacctatttgcaagcatccttgcatttatccctactggatggggaatattatccttggcaattgcatggaagaagatagtttggagtctcggcatgtgggattctgttcgtgagtttgctagaatgtacgatgctggaatgggtatgatcatttttgcaccaatagcatttttatcgtggtttccattcatttcgactttccaatctcgccttctcttcaatcaagccttcagccgtggtctttgaacgtctgtccccggcaaaactcgcagcaggcctgccgacttcaacaactaaaagcccgccaagctgctcttttagccgtgtggccacataacgctgaatcctctgtgctcgcctgacgagactctccagagccttactaaatcgttgagcaggtttagttgcagttgataaaaggcaaagcaaaaaaggtagagaaatctctatcatccttgctggaaataaagctccattcgtcttactctcctgtgggggccttgtatatttatctacaatcgcatattattcgggtgataaattaaatagcaacataaaatgttgcagcttttgctgacaaaactgcaagacccgttgccgtgtgctagtgttccttaaaatgaaatacacattcttagagggttgttcttaaactttatggtgaacaaactcttctgagttcgtttgtgaagcattgaatgcacacacaataattagtcagttcctgctgtatttataagtaaggccgaaaattatggttgcatttggacagaaccatgtgctggaaattttacacatatatgaagatctagcacaacattcgaataatcaatcttggaaagtactcctattgatttgacagataaatatttgccccttttggttttgcttcttcctcttacttcttcaggttcagatgtgggttcttcgtctgtaacatgcgattgtccttctactgtatttcagtcaaacggtcttcctacctaagttattgcgttgatgtatattatttcatgtagttcagtgttgagttatacatttagtctatgaaaaaaaatgaaagatgcctttttaagggtgtgtttgttttgccttgttcagctgtttattagttttgatacattttgtctttgatcagtatttggcatttttgcgtatgtatattattttgtagttcagtgttgagttatacattttgttttgccnnnnnnnnnnnnnnnnnnnnnnnnnnnnnnnnnnnnnnnnnnnnnnnnnnnn

SEQ ID NO: 1012 - DNA, 1606 bp, Glycine max
  misc_feature (36)..(36): n is a, c, g, or t
  misc_feature (46)..(46): n is a, c, g, or t
  misc_feature (195)..(195): n is a, c, g, or t
  misc_feature (231)..(231): n is a, c, g, or t
  misc_feature (438)..(438): n is a, c, g, or t
  misc_feature (449)..(449): n is a, c, g, or t
  misc_feature (453)..(454): n is a, c, g, or t
  misc_feature (476)..(476): n is a, c, g, or t
  misc_feature (508)..(508): n is a, c, g, or t
  misc_feature (682)..(682): n is a, c, g, or t
  misc_feature (692)..(692): n is a, c, g, or t
  misc_feature (809)..(809): n is a, c, g, or t
  misc_feature (982)..(982): n is a, c, g, or t
  misc_feature (1226)..(1226): n is a, c, g, or t
  misc_feature (1281)..(1281): n is a, c, g, or t
  misc_feature (1403)..(1403): n is a, c, g, or t
  misc_feature (1422)..(1422): n is a, c, g, or t
  misc_feature (1425)..(1425): n is a, c, g, or t
  misc_feature (1433)..(1433): n is a, c, g, or t
  misc_feature (1439)..(1439): n is a, c, g, or t
  misc_feature (1441)..(1443): n is a, c, g, or t
  misc_feature (1445)..(1445): n is a, c, g, or t
  misc_feature (1464)..(1464): n is a, c, g, or t
  misc_feature (1481)..(1483): n is a, c, g, or t
  misc_feature (1492)..(1492): n is a, c, g, or t
  misc_feature (1497)..(1501): n is a, c, g, or t
  misc_feature (1505)..(1505): n is a, c, g, or t
  misc_feature (1523)..(1525): n is a, c, g, or t
  misc_feature (1529)..(1530): n is a, c, g, or t
  misc_feature (1532)..(1532): n is a, c, g, or t
  misc_feature (1535)..(1535): n is a, c, g, or t
  misc_feature (1549)..(1549): n is a, c, g, or t
  misc_feature (1566)..(1574): n is a, c, g, or t
  misc_feature (1579)..(1587): n is a, c, g, or t
  misc_feature (1592)..(1606): n is a, c, g, or t
  Peptide Sequence Number=SeqID_9214
  Probeset Number=SeqID_10791
tgcgctggtagtagtcagcaggagctgcgactcgtngaggttgtgngatgtgcgccagcgcaccacacgcgcgcggcggaccagagagcatatcagttgtatactgtagcgaccgtatggcgacccacacgcagcgttttagtttatgtagactattgatcggccgtcacggtgtaagatagagatagtagagangtcggtgtgagagggcggtaggagtagagtgatatncgtggtcccggacgagatatagtatatataatgaagaataagaacgagcaccccacgccggcaggatgtattcgtgagttgtgtatgtattacatcgactcctacgacttcccgtattttctatttgtgtgctgcataggactctggtgatgcgtagataagtatacactgtggtggcggagagatggagagctggtgatgtctagnttcgtagcagnacanncgcgatagtgcgcgatttgatntgtagtagcacatgaactcgcaccataatatnagctgacgctgacacagctacaggtatgatatagccgaaacggcgagacgtcgttctgcgcggcggcgtcgtgtgttctctatagtacacactgccacgcgcgccggtggtggttcggtgtgtttggataaggcagtaccatccacaacacccgctattaaagatcttaaatgngggacgggcngcgaagcgagcaggtgagtgtatgatggttgtatgagcagccgccccgcgcctatcatgtattgattatgcccccgcccggcacgctcgtttattattttctctcccctattatatnatacaccaaacccgcaagctagtattataaggaatcttaatatttaacgcgcaccatattattctatctacacccgcgcccctatttgattggtgtgtgggtggagtatgctcgcacgtattctctcatctcaccgcgccacaatctatcacgttcactattttaactacaancactacgtacaccagatcttgtagcatctccgcgaagcaagaacagcaaagagcaccactacctcgatctgcgtgtatattttttctttttcagtcagtgtatatgcctaattgagtgccgaccatcgagcacggagaacgcgtagaaagcccgccccaagaaataatatgtatgactctcccacgcagcccacgggcgtggcgggcgggcgtgtttgtggtcggtgagcgcgccactgcgggnggtatctggcctaggcgtacgtatagagattgctccacgatacatctctttaccncaatatttgtctacagaagatttatctattaccatcacattatatttatttattattgagtactctcccctcccctccttcttttacggagtgtcgcggccggcgcggaagcgctgtttatnaatatgatatgtcagcagnttntttttgtnttgtcntnnncnttttcacttataatgtcancaggaacaaacaaacannntcaactaancattnnnnnagcnatatatatatacaaaaannntaanntntanaatcaacaacaacnatatattataacaaccnnnnnnnnnccccnnnnnnnnnaaaannnnnnnnnnnnnnn

SEQ ID NO: 1013 - DNA, 755 bp, Glycine max
  misc_feature (2)..(3): n is a, c, g, or t
  misc_feature (9)..(9): n is a, c, g, or t
  misc_feature (276)..(276): n is a, c, g, or t
  misc_feature (282)..(282): n is a, c, g, or t
  misc_feature (284)..(284): n is a, c, g, or t
  misc_feature (289)..(289): n is a, c, g, or t
  misc_feature (292)..(292): n is a, c, g, or t
  misc_feature (294)..(294): n is a, c, g, or t
  misc_feature (306)..(306): n is a, c, g, or t
  misc_feature (309)..(309): n is a, c, g, or t
  misc_feature (317)..(317): n is a, c, g, or t
  misc_feature (319)..(319): n is a, c, g, or t
  misc_feature (327)..(327): n is a, c, g, or t
  misc_feature (332)..(332): n is a, c, g, or t
  misc_feature (334)..(334): n is a, c, g, or t
  misc_feature (366)..(366): n is a, c, g, or t
  misc_feature (371)..(372): n is a, c, g, or t
  misc_feature (378)..(378): n is a, c, g, or t
  misc_feature (387)..(389): n is a, c, g, or t
  misc_feature (392)..(393): n is a, c, g, or t
  misc_feature (395)..(395): n is a, c, g, or t
  misc_feature (399)..(399): n is a, c, g, or t
  misc_feature (401)..(401): n is a, c, g, or t
  misc_feature (405)..(407): n is a, c, g, or t
  misc_feature (413)..(414): n is a, c, g, or t
  misc_feature (419)..(420): n is a, c, g, or t
  misc_feature (424)..(424): n is a, c, g, or t
  misc_feature (434)..(434): n is a, c, g, or t
  misc_feature (441)..(441): n is a, c, g, or t
  misc_feature (447)..(447): n is a, c, g, or t
  misc_feature (449)..(450): n is a, c, g, or t
  misc_feature (454)..(457): n is a, c, g, or t
  misc_feature (463)..(463): n is a, c, g, or t
  misc_feature (465)..(465): n is a, c, g, or t
  misc_feature (476)..(476): n is a, c, g, or t
  misc_feature (481)..(481): n is a, c, g, or t
  misc_feature (492)..(493): n is a, c, g, or t
  misc_feature (507)..(507): n is a, c, g, or t
  misc_feature (519)..(519): n is a, c, g, or t
  misc_feature (521)..(521): n is a, c, g, or t
  misc_feature (524)..(524): n is a, c, g, or t
  misc_feature (526)..(526): n is a, c, g, or t
  misc_feature (532)..(533): n is a, c, g, or t
  misc_feature (535)..(536): n is a, c, g, or t
  misc_feature (538)..(538): n is a, c, g, or t
  misc_feature (540)..(540): n is a, c, g, or t
  misc_feature (543)..(543): n is a, c, g, or t
  misc_feature (545)..(545): n is a, c, g, or t
  misc_feature (550)..(550): n is a, c, g, or t
  misc_feature (552)..(552): n is a, c, g, or t
  misc_feature (555)..(555): n is a, c, g, or t
  misc_feature (558)..(560): n is a, c, g, or t
  misc_feature (563)..(565): n is a, c, g, or t
  misc_feature (572)..(573): n is a, c, g, or t
  misc_feature (576)..(576): n is a, c, g, or t
  misc_feature (579)..(579): n is a, c, g, or t
  misc_feature (585)..(586): n is a, c, g, or t
  misc_feature (589)..(589): n is a, c, g, or t
  misc_feature (592)..(593): n is a, c, g, or t
  misc_feature (597)..(597): n is a, c, g, or t
  misc_feature (601)..(755): n is a, c, g, or t
  Probeset Number=SeqID_10792
annactctnttatacaagaaccctgaagaaagacgcagccattgtttgcttactttccattgattgagcgaaagctttgttttttctgcgatcattttccattgggtggaagaaagtctcaacctttcgtccaaagagcaaggatctgactgagtgagctatcatgtgcaggtggtgctattatctcctacgttcattccagcgggtcccgccggcaggggcgcatcgctgtgaccgccgacatcctgcggccgaatttgaggaagcggctcttgnattccntnctggnccntnagttctaggcanggntcagagancnctaggatngactngnatatctatgatggaaaggatgattgactgatnaattnnaggagnagtttgacnnngannangccngnttannntctctnntttcnnaacntggtagttcnatgcctntttctngnntatnnnntactgntnatctgtggtancttangggccatcaannatttgcctaagagngtgatgaacacntngcngntgcccnncnncntnggnantgggntntgnatnnntannntgaaggnntcnatngatttnnacnttnntatnttcnnnnnnnnnnnnnnnnnnnnnnnnnnnnnnnnnnnnnnnnnnnnnnnnnnnnnnnnnnnnnnnnnnnnnnnnnnnnnnnnnnnnnnnnnnnnnnnnnnnnnnnnnnnnnnnnnnnnnnnnnnnnnnnnnnnnnnnnnnnnnnnnnnnnnnnnnnn

SEQ ID NO: 1014 - DNA, 1761 bp, Glycine max
  misc_feature (16)..(16): n is a, c, g, or t
  misc_feature (23)..(23): n is a, c, g, or t
  misc_feature (25)..(25): n is a, c, g, or t
  misc_feature (61)..(61): n is a, c, g, or t
  misc_feature (102)..(103): n is a, c, g, or t
  misc_feature (303)..(303): n is a, c, g, or t
  misc_feature (424)..(424): n is a, c, g, or t
  misc_feature (433)..(433): n is a, c, g, or t
  misc_feature (474)..(474): n is a, c, g, or t
  misc_feature (509)..(509): n is a, c, g, or t
  misc_feature (537)..(537): n is a, c, g, or t
  misc_feature (906)..(906): n is a, c, g, or t
  misc_feature (1095)..(1095): n is a, c, g, or t
  misc_feature (1143)..(1143): n is a, c, g, or t
  misc_feature (1157)..(1157): n is a, c, g, or t
  misc_feature (1319)..(1319): n is a, c, g, or t
  misc_feature (1368)..(1368): n is a, c, g, or t
  misc_feature (1463)..(1463): n is a, c, g, or t
  misc_feature (1531)..(1531): n is a, c, g, or t
  misc_feature (1533)..(1533): n is a, c, g, or t
  misc_feature (1587)..(1587): n is a, c, g, or t
  misc_feature (1589)..(1589): n is a, c, g, or t
  misc_feature (1634)..(1634): n is a, c, g, or t
  misc_feature (1667)..(1667): n is a, c, g, or t
  misc_feature (1761)..(1761): n is a, c, g, or t
  Peptide Sequence Number=SeqID_9215
  Probeset Number=SeqID_10793
gattgtcgtgtgtganagtaatnantacagaatgcgaaccacaccactagcgaatgagaanacacgacagacatacagaatctaaaccaaagcacatagtannacagagagagtggacgagcctggacgcatacccgaagagatactattaactaactacacacagtactcatagcaccacatatatcaccctattctcacatagactcactacatattgcacatatacctccatactagcgtacgcaccagacaagtacaagcaggtataacgagtaagaatatgggctacatctgcactanctcacgcatatccgagatctctcatcaatcttatcaacatatctccaattcaggagcgggctggcgaggtacgaccagaatttactgttctcatctccttatcgatatgctgaacactcanctgtcccgncacgctacaccgcatccgctgcacgatgatcttcctcaacntcgcttcttcacatcctctgctcattctgctattntattatatctgtatgcctctaatcgctnatctcaaccatagagacagtatccagatagctgatctatgccagtcagttacgtatagatacttacgcagcctacaacgcacttcgtgatcaatatcatgaacttcaatgccgcatctatgacgcgccagacctgtcactgcgtgctgtgcggctgcgtatccgtctctctacacgcgtctcagacttcagtctagcagctctattccacacacactacctacatccacctacgcctctctcacatatcatccctcactcacaccacactatcctcatctgcacctcgtcgcacactcccacctcatactctcactgcatctgtcttcactatgttatcgtatcgaccgacctgcacctccaccgcgcngtgtctgtgtacgcgccctgatcagtgcgcacaatctgcgtctctctacacgtctctctcaccactcacactccctctcttactcctgataagctaatattacaatgttcatctagctgactcagctgttccattctcaccgactacacgtacataacgtgtcagtcgccgtcacccgtctcacgccantcttgtatatgaagtatgctacgcgatacttactctctagttcttgtncatgtgtaatatancagctggttcacctcacaccttgttatagtatgcacgctcagcacacgtgacacacgtattgctctcgcactactcatctcaactcgatagaatgctcgcgtcctgccgcgctgtcacacatcatctccacactcgcttcgcgactacacacgacgctatcntgagactcagactacagcgacgtcgtgtgacacggtaatatactgcacntactatctctcatctaatagatatcgcgcgtcctgcgttgtcacgatatttgactgtatacggcaaccgatacgcgactccttcaactatcactncttcctcctctcacatcgacacacacaccgctggcactcgccacgttacccatctgacaccatgtgtnanctcacatctcgtatgcagatgacacacgatatcattactctgcttcacgtatancngagctctcacccagatctacgctaatcgctctctccgtcacgctnactccgctcagactcgtgcgaacgtctcactcntatctcgatctcgtgccgactagccacgctgtccccactgcttataagtatctgctcgtttgtctctacgtactccacatcgtctccctctcgn

SEQ ID NO: 1015 - DNA, 1700 bp, Glycine max
  Probeset Number=SeqID_10794
ggctcgcagggatatcgattactggtcgtaaggggtgggatatctggttcagcagcagatcctaattacccttctggtgactccgtaactcattgcttcctctcttttcaaagcttgtgggtgctctgcttcaagagtctagtctatttatcatttaacggattgccgagcggagaagcgttaactactgggatatcggggagttcctctccagctactggaacttccctcgctacatgagctattgtataagtacaggtacacaaactacatccgctatagtggaaacaatggcatccgtagcttcacccctttcttttgaatggggcatcaacagtaagaaagtcagtagtagtggtaccatctctagttctttactgatcatgtatattttagcaagggacggaaagaagtagatcagtaggaatactaggattggcaagggtggataacaaggaaatagagagtgacaagacaattataggaaaagaatgagtaaccaccttctacatctacaagttcattaaaaaattcgctgcaacctaaaagaaaagaaggaatagcgggtcggcaaagcagctaaatccttatttaccatatggtggggtagttcctttcttccactgaattgcttcctttattggctgagctagaggatgccatgcctatttcttttgtttgacaccgaaatgaatagctaactggcttagcagcctgtcccagaagtagaagcaagttaatattaataataagaagaagtaagctttgtgtcactggtactgatctgatggggtaaccgtacctttaccctatgtcagtcttgctcgtcgaagacgtagaaatgaaactgtgtagatagaggtgaaggttacaaaatgaacaacctatcaatcctcgtagtcgaaccttctttttgtggaatatgtaccccggccctgtatcatgaacacatgaagggtacatggccctctcttatcatcatatcaagattaatgcactgaaaagattggaacttggcgcgccacctagcatttgcaactgcctgatcaagtctttcgttcatcttggataaaggtatgaatgagagctctcgaggctcgacaaacgtatgatcatcctctctcctgtaggaggtccaggtcaacttgtaaccaacgaagccaagaagcgcgagagaaagctggattcttcattgaaaagtgccaattcctatgtccgtctcatttctctgtagatgttttctagctatagctttaagaatgtgcttttatgcttgctttcaatgttgtctcatcttcaagatgattgtctttttcttatcttgaaaagaaagacgggcaaagtcggtacgatcgcgctgagatacggaaagtgagttcgttgacgatctctgttgaaatgaaagaggttttcggcgacatccaactagatgaacatgaaaaaagtagttctagtagcgatgccaccggcaggcaaagcaccacccttctttttcagtctttttaagaatatgagtgtgtttggcaaatcctttccagcctagggggtccaagcatgtcgtatcgacgcgaagcattctattaagagggtagagtaatcgggttgaggtcgatcgtcccggccagaagattgagattcagagctaaagcccattctggtttagattggatcttctgctcctttttcactatataactata

SEQ ID NO: 1016 - DNA, 531 bp, Glycine max
  Peptide Sequence Number=SeqID_9216
  Probeset Number=SeqID_10795
atttccatcgagagaaaggagggctcacatttttccttttccttttgcttgcgaatctgaatcaaataatcaatcatccatatcttattgctcatgacgtcgctaaagaaaatcacactgaagagtgcggacggtgaggctttcgaggagaaggaagcggagatgctgtagtcgcagacgataaagcacatggtcgaggaccactgtccctacggcgctatccctctgtcgaacgtgactagcaagatccaggcgaacggcatcgagaactgcaagataaacgatgaggacgtgaatccccaagacgaaccctccgaggacgatctcaaggactgggacgttgaattcgccgaggtccatcaggccacgctcttcgatctcatcctggctggctaactactgtgaacatcgagagtctgctgcaccttagatgtgaaactgtacacgacatgatctaggtcaagactccagaggaaattcgcaagacctttaacattaagaatgacttcacccctgaggaggaagaggaag

SEQ ID NO: 1017 - DNA, 233 bp, Glycine max
  misc_feature (180)..(180): n is a, c, g, or t
  misc_feature (229)..(229): n is a, c, g, or t
  Peptide Sequence Number=SeqID_9217
  Probeset Number=SeqID_10796
tcgagtcagctacgtaggcccccccccctttgttgttaccgagtgtcatctggcactcgacaaagaaagtcgtcgtcacagcgataaatgatggtgatgaagatttgtcaagtgtgtgctcagtagcactcgacaaagtatattttgccgagtgctcgataaatagctctcggcaaaganctaggcacttggcaaagagccagatttccggtagtgtagccatcatatntgtt

SEQ ID NO: 1018 - DNA, 1695 bp, Glycine max
  misc_feature (9)..(12): n is a, c, g, or t
  misc_feature (17)..(34): n is a, c, g, or t
  misc_feature (46)..(46): n is a, c, g, or t
  misc_feature (49)..(52): n is a, c, g, or t
  misc_feature (68)..(68): n is a, c, g, or t
  misc_feature (71)..(71): n is a, c, g, or t
  misc_feature (73)..(73): n is a, c, g, or t
  misc_feature (77)..(78): n is a, c, g, or t
  misc_feature (82)..(83): n is a, c, g, or t
  misc_feature (85)..(85): n is a, c, g, or t
  misc_feature (87)..(87): n is a, c, g, or t
  misc_feature (91)..(92): n is a, c, g, or t
  misc_feature (99)..(100): n is a, c, g, or t
  misc_feature (109)..(109): n is a, c, g, or t
  misc_feature (112)..(113): n is a, c, g, or t
  misc_feature (116)..(116): n is a, c, g, or t
  misc_feature (118)..(118): n is a, c, g, or t
  misc_feature (120)..(120): n is a, c, g, or t
  misc_feature (128)..(129): n is a, c, g, or t
  misc_feature (151)..(151): n is a, c, g, or t
  misc_feature (158)..(158): n is a, c, g, or t
  misc_feature (197)..(197): n is a, c, g, or t
  misc_feature (235)..(235): n is a, c, g, or t
  misc_feature (311)..(311): n is a, c, g, or t
  misc_feature (345)..(345): n is a, c, g, or t
  misc_feature (377)..(377): n is a, c, g, or t
  misc_feature (384)..(384): n is a, c, g, or t
  misc_feature (392)..(392): n is a, c, g, or t
  misc_feature (412)..(412): n is a, c, g, or t
  misc_feature (455)..(455): n is a, c, g, or t
  misc_feature (603)..(603): n is a, c, g, or t
  misc_feature (674)..(674): n is a, c, g, or t
  misc_feature (684)..(684): n is a, c, g, or t
  misc_feature (689)..(689): n is a, c, g, or t
  misc_feature (784)..(784): n is a, c, g, or t
  misc_feature (812)..(812): n is a, c, g, or t
  misc_feature (821)..(821): n is a, c, g, or t
  misc_feature (838)..(838): n is a, c, g, or t
  misc_feature (845)..(845): n is a, c, g, or t
  misc_feature (850)..(851): n is a, c, g, or t
  misc_feature (865)..(865): n is a, c, g, or t
  misc_feature (875)..(875): n is a, c, g, or t
  misc_feature (921)..(921): n is a, c, g, or t
  misc_feature (935)..(936): n is a, c, g, or t
  misc_feature (972)..(972): n is a, c, g, or t
  misc_feature (986)..(986): n is a, c, g, or t
  misc_feature (1086)..(1086): n is a, c, g, or t
  misc_feature (1090)..(1091): n is a, c, g, or t
  misc_feature (1095)..(1095): n is a, c, g, or t
  misc_feature (1108)..(1108): n is a, c, g, or t
  misc_feature (1123)..(1123): n is a, c, g, or t
  misc_feature (1139)..(1139): n is a, c, g, or t
  misc_feature (1141)..(1141): n is a, c, g, or t
  misc_feature (1199)..(1199): n is a, c, g, or t
  misc_feature (1227)..(1227): n is a, c, g, or t
  misc_feature (1407)..(1407): n is a, c, g, or t
  misc_feature (1429)..(1429): n is a, c, g, or t
  misc_feature (1433)..(1433): n is a, c, g, or t
  misc_feature (1608)..(1608): n is a, c, g, or t
  Probeset Number=SeqID_10797
gggggtttnnnnggggnnnnnnnnnnnnnnnnnncccccaaggccngcnnnncgggggccgcgggcgntgngntgtnncacnntngnccgnntctgcgnnacctgggcntcnnggnantngaccggcnnccctccgctcgacggcgccgcnctcagcngcccgcgaggtgcctgtgtcacggacgcgatagatggtntgagagattgtcgtgcgggtgggtgtagtttggtgggnagggagatgggagagagtagagagatgctagtgagtgagaagtataggtggggaatgttgtgtgagagagcgcaanagacgggaagtgcggacggatgagtaggaggagnactcagtatgtgatagaaacgtgagtgtgcanttatttngatggaangaggaggtgtgtgtgatatntgtaatagagacagtagagatggaagtagaggagaagagagtnataagaagagataaggcggtagatgtgaagagttgagaggcgagtgggcgaagtggagatcgtgatcgcgtcgtgtgcgcgaagatacgttatatgcgaccggctagtgcgcatgatccgcagtagtgcagtgtctgcggtcgcgcgntgtagagaacttctcgtgggcgcgaacgctgcgcagcgctagcacacagcacatcgcacatgtacttcgancacacgtccncgccncgtctcaacacctctctatctcgctgtcccgacgctctcacaccatcactcgtaccacgactcaagtctatcacgtcctatcattcgcgtcacancactgctcacacgtatcgactgcaaccntgcacatanctaatcacttcatattncttcacnatcanntcataaatctgtgnctttaccgcntcaaatagctaattagtggaaaatcatatactttcgtgatggtgantaaatagacgtatnnggcactcacgattcgatcgtacacacaactctcttnaaacgagagacatncacgagatcgactgctgtctgagatcaagacaatacacagacatggagatgataaaaatgatgacgagtacgcagtcgcatgtcagagtcacagacaganaganngcgntgtagcagcggtnatagagtcgggaagngatagagagagtgagngnagagtgtgtgcgcacgcgacgtgataagatatgatataagtacgcagcgaagagactngacgatgtcgagacgatgaggagacgancggacgaagatagctgatgtagaggtgagatgcgaagactgtacgcgagagagagtgggtggacggtgtgtgatatggaggaacgacaggacgagagatgtgtgcgatgatatcgtactatgcgatcgcagacgactcgcgagactatcagtagattggatgtgtgatgatatcgcgtgngtagagatctgggacgatcgantaancacggtagataatagcatatgagaacgagatgacacagcacacgactcgctattagacagtagagacaagcaatatagatgcgtgtgctgcgacgatagcgcgagcggatgagaggcgatgacggcgactggtatgtgcgttgtgtgagcgtacacgtatgtagcgcagatagtngcacgtgatgtgtcgagtacacgaccgactcgcgtatcagagctgagctatcaatcgcgcgatgcagacatgagcatatgatgagaa

SEQ ID NO: 1019 - DNA, 470 bp, Glycine max
  Peptide Sequence Number=SeqID_9218
  Probeset Number=SeqID_10798
attgcaaggaaggatgacacatacatcaagtaattgcctgtgtttggcttgttgacttgagtctcgcatccgatccttttgatggcatacatgcacgcatgttggtcgatttggcatgtgtgcaacttgagtgctttcatattagatggcccgtccaccagcccacctgccacatatatattagatggggtctgcagactgcagtctctggctagtgttaatttgcatgttctcttccatgtagtggctcttgcttgttggtgttatttggccatttgtaaaccgctagcagtgccaagtccagtaactgatggaatgatgtagtagtagcagtagtggtagtggtggtgctgattaagttgttgtgtttatttggtgaattggatggaacatgtatgtatgaacaccgtgttaatccttgcatggtgtgtacgggtaagtgccctgccattactttggatgtttcattt

SEQ ID NO: 1020 - DNA, 1529 bp, Glycine max
  misc_feature (38)..(38): n is a, c, g, or t
  misc_feature (173)..(173): n is a, c, g, or t
  misc_feature (251)..(251): n is a, c, g, or t
  misc_feature (293)..(293): n is a, c, g, or t
  misc_feature (330)..(330): n is a, c, g, or t
  misc_feature (337)..(337): n is a, c, g, or t
  misc_feature (350)..(350): n is a, c, g, or t
  misc_feature (403)..(403): n is a, c, g, or t
  misc_feature (405)..(405): n is a, c, g, or t
  misc_feature (425)..(425): n is a, c, g, or t
  misc_feature (501)..(501): n is a, c, g, or t
  misc_feature (635)..(635): n is a, c, g, or t
  misc_feature (645)..(645): n is a, c, g, or t
  misc_feature (706)..(706): n is a, c, g, or t
  misc_feature (990)..(991): n is a, c, g, or t
  misc_feature (997)..(997): n is a, c, g, or t
  misc_feature (1216)..(1216): n is a, c, g, or t
  misc_feature (1361)..(1361): n is a, c, g, or t
  misc_feature (1502)..(1505): n is a, c, g, or t
  misc_feature (1507)..(1507): n is a, c, g, or t
  misc_feature (1512)..(1512): n is a, c, g, or t
  Probeset Number=SeqID_10799
agagagagagtgctcacgtggtgtctacaactgacatnagtcgttatactagagtgcgtgtcagtctagttattgataatcgtattctgtgcgctacgtgtgacacgtcgctattagtcgtgtgcctgtagcgccgcgtcgcacggcctgtacatgtacattgtatctcatcnccgtcgttgcagcacacgatacaactatcatgcagtagagcgatgacatacgagtagtcacttgttactgagagtgtnttacgagatcatgcatcgcgctcacgcccttctggcacattnctgtatactgacgtactatcgcatcgtcgctcttcgnctggtgnctctgctcgctcncatcttcacgtagacgccacgcacacctcacgtgcacaatcacagctacttgngngctcgacgtcagtgctacgnggcgtggtcgcgaccacacagactgcgcaagtgaggaggcgcgggccgcaatcgcgatctcacgtgtctcgacgcncgagtgtctcgtctatgtgcgcttctgtcgctacatattcccattactctgtcatcatacgtggtgcgctgtcttgcgcgcgcgtaccatgcataatataactaattatgagctgtactggagcatgtagaganagatggcagngacgcgaaacgatcagtgagtggtgcacaggaatgatgttctgatattttcgtagcgcgtnctagttcaggtgttaactccacagcagacagagcagtgtgtttcccacgctcttccgcttctgtcgtatgcgcttgctccgtcgcgcctatcgttgatatccgcgctgtgcttcgcccgcactcgtctttacactcgatctatagtcaatatatacactcaagcattaagatatacacatatacacacgctatcgcagcagacacgacggctgcgcgcgccggcatccagccgacacactcgacgcccctcgctctcccctcggcatagcgcactatatagatnntctatntctctgcccccactcacccgctagatttctccatctcactatacacaatattctaccactcacggctccgctctgttgcttctatatatgttatacattttcgctgggcgtgaatgacaagtggtatctctgtggtggaatacatagagtaaatctagtctctctctttgtatgtatgtttctctctcttatttgtgtactacctgctcccctgtcttnctcagtgcagacatgacagtagaaccgcgcgctagtgtgtggcgtggcgtgtgggtggaccgactgacatgcagactacaccatcgcctccccctcagcagcgcacacccatggcagccgcctcaaactacatcaatttactaancctgtcatcactccaaatccctctcctcgaacgatacacggcgtagtgatgagctgcttcaacagatagccgtggtcaccataccccaacccgcgcgcggggaaccggaccacagcgagccggccgccacaaaaaaaaagnnnnanccaanccccacaccaccacccc

SEQ ID NO: 1021 - DNA, 429 bp, Glycine max
  misc_feature (275)..(275): n is a, c, g, or t
  misc_feature (295)..(295): n is a, c, g, or t
  misc_feature (387)..(387): n is a, c, g, or t
  Peptide Sequence Number=SeqID_9219
  Probeset Number=SeqID_10800
cacgcaatacaacccccaaattttccaaccattttcatttaacgccgcccaaacccaattttccccgggaaataaagattaggggaatggtagggtacaattttgggccatatccccaatttaggaagccgcgtaataggtttttggcattttcaggaggaagttacatatatatagcttttgttcagaaggaaattttccaagccttggtggtttctgctgtttcagcaggtttttcttccttcttaagcagcagtctcagctggtttttcttnccacttttttctcatcactngtctcgtctgcttgtggttttcctcttccttttttcttcttcaaccactgtctccctctctttgacaacactacttgtttcttcttctgttntagtttctactgcaggaggggcttcaacttcttttctggtgc

SEQ ID NO: 1022 - DNA, 722 bp, Glycine max
  Probeset Number=SeqID_10801
ctgtatgggatcattatgagtttgtaattgggatgatagtgtgtttggctgttttatttgagttggttggtgttgcatgggtatgagtagggttagcagggagaaagggtagagggcgatacggcagaaagaaggagagagcaagatgggagaggttacgatctaggaggtggagaaataagtatgttgtgcgtaggggtggtattcggggtggtggtgtcggtttagtttggtgtgcacgtgggtttagtgaggggagaggggggattggaacgaacaggcggcgcagtgagcggaatgtgagagtgggtacatgggaggagcgggggggggacaaagggggaagcacaaatgtggtgagtggggtggcgtcggccagtgggccctgaatacccgttccaacggggcggctgcggtttggcaaccccgtggcgccagccttcttggccttcggttctcgcgggtgttgaagaagcggggaggaggaggaggagatgaaggtgggggagtgggcggggatgggagtacgagcagaagtgggtagctcgcggcgcgcggcggcgtgtgtgggggaggggtggaggaggaggcggcggtggagggtgtgcagggcgcgccgcgaggaggcgaaggcgaccgccatgatcggcttggggggtcgaatcgagatcgggttcgcagtcggcgggcaccggaggaggagtcagaagagggattgaacg

SEQ ID NO: 1023 - DNA, 467 bp, Glycine max
  misc_feature (364)..(364): n is a, c, g, or t
  Peptide Sequence Number=SeqID_9220
  Probeset Number=SeqID_10802
atcggtgttcaagcataagcacaagaacgtaaatatatatacatatactcatacaatatatatacgtttccgtgtttataccacacgcacaatgtcaatcaatctccttatgaccctccacgggacgaccttcctccttctcgttgcctcaagccaagcgttgaagctttctctcggtgacccctgcactgtggcggattatccaaaattatgcagacgcaccattaaaggtcaaacgaatgtgaacgcagcgacggatatggccataaaagagctaatgaagcggaccatgcaagccaaagatatggccaagaaagagccgaaaggcgacggaggagttgcggtttgtttgtccaccttcggnagcgcgtttgacaacttggacaaggcccttaagaatattcaggggaatgatggttttagcctcaacattaaccttagcgctgcgttgactgactacgatactt

SEQ ID NO: 1024 - DNA, 475 bp, Glycine max
  Peptide Sequence Number=SeqID_9221
  Probeset Number=SeqID_10803
ctatctaatcctttccaatccacgtccaagtaaaaacagcaaagaaaaaaaaaagatgaacactccaataaaactcacctttctcattctctgcattgccctgaccgcaaccgcattcttagtcccagccaaacgtgccgacgttacaccagaacacgaaaaaaccgtcgcaggaatctgcaacgttgtcgaagacaaaaatctttgtagcataaccttgaaaaccgtcccaagcaatgaccccgccttcttggtccgttacttagccacagccgcagaatcctctgttaaaaagggcttgaacttcctctccgaaatcaaacccaagtacaaaggaaactcattcgccacaaactgcatcactggttgtgagaaacagctaaacaacgccttggaagactttgcagatttctggaaagccgcgggaaaaaacataaccagcatggctgataattacttcacatgcaagaagaag

SEQ ID NO: 1025 - DNA, 559 bp, Glycine max
  Peptide Sequence Number=SeqID_9222
  Probeset Number=SeqID_10804
tatgaccacttgtaactcccttcacccactcagcaacttgtcctaggggagccggacagacccgtgttcccatgaaatgcatcacgtacttgctccattcccagaggcagagggttgtgcttcagaggcaggacgatagcatttcgtgttgaaaagatccctcctccaacaaaaggtgtcccccgtaaagtccgcggcaacggccgttttttggcaagtccaccttcatatttttggtgagagagtggtctggtgaggtgaagggtaagaaagctttggtaggtgaaggtgtgaagaatgatgtggtttatgcgctcaagaggcagggaaggaccctctatggtttcggaggctgaatgattgattcttagtattattaaattatgttgcaggatataatattatgcctgttcttctgaaattcggtgtgatgtttagtttagattcgttctgtaacatatgaatcttcaaaggttctgttcggcacagaaaatgtactactttaattgaaattaaaatgaaggagcagcgttttcgtggtgcaaaaaaaaaaaaaaaa

SEQ ID NO: 1026 - DNA, 1410 bp, Glycine max
  misc_feature (1108)..(1108): n is a, c, g, or t
  misc_feature (1154)..(1154): n is a, c, g, or t
  misc_feature (1186)..(1186): n is a, c, g, or t
  misc_feature (1235)..(1235): n is a, c, g, or t
  misc_feature (1289)..(1289): n is a, c, g, or t
  misc_feature (1304)..(1304): n is a, c, g, or t
  misc_feature (1332)..(1332): n is a, c, g, or t
  misc_feature (1378)..(1378): n is a, c, g, or t
  Probeset Number=SeqID_10805
ggaggggaaaagagaagaagtatgagaggagaagagagcggaagagagagggggggaggacgagaaggaagaaggaagagagagaagagagaagatccgaggaaagaagaaagaaaaaaaagcggaaagaggtcgccaccgaaaaagaaagagaaggaaaaggaaagcaaaagaaagaaagaaggaagcaaaaagaagaaaatgtttacaccgaaaaaagaagagagaaagaaaggaagaagagagagagaggaaaggaggagaagggggagagagagaaggaaagagaaagaaaaaggagagacaaaaagaaaaaagagaagaggcgccaaaaaagaagagaaagaaggagggaacagagggaaggaggggggcaggagaggacagagaggagaaaaaagagaaggagaagaacgaacagaagggagaaagcaggcgagggcacgaagaggccaggaccgaacgaagacagaaacacagagacagggagaagcaaggaaggcggaagaggagaggggcgggagaagaagacaggacgaagagggcggagaaagcgagcaagggacaggaaagaagagggagagagaagggagaaagcgggacgagaaagcaaagaggacagaggcagagagagagaagaaaaggaagagaagcaggcgagagagagcgcaaggtcaagaaagaaaaaggaaggaggaggggaaggagaagacagcgacaagaagcgaggagacaggcaggagaacggcagaaaagaaggaaggcgagacaacggagcaaggcgcgcgtaagtgagcaagcggcgcagacgaacggaggaaaggagaggaaacaacgggaggacgagaacgcagggaaagaaggaggagagagaacagagcgaaaccagaaacagaccaaaagggacgcacgaaaggcagacaggaaggagaaaagaaacaacggccaaaagagagaaagaggagagaaggcaccaggagcacgagagaaaagagagaggaaaagaaagcgaagaaagaagagagacagaaggacagaagagagcagaaagaaagaggaggacacaggcaggaacagagcgagaagagataaagacagaagaccagcnacggaaagagagagaaagaggagacagagagaagcagacaacgaanagagcacatcgagagcaaaatgagataggagnagaaagtgaaggcagcaacgcacagcgaagcgagacgaagaagaggcgncagaagacagcgaaagcagaggagagaagatctagtgagagacgaaacgatagncaacaggaagcgaangcagagagacaagaagaacagcacagancaacagagagcagagcgagggagactagcgacatgacaagagatanacgcacaagagagtgacgaagacagagagaaa

SEQ ID NO: 1027 - DNA, 1898 bp, Glycine max
  misc_feature (22)..(23): n is a, c, g, or t
  misc_feature (27)..(27): n is a, c, g, or t
  misc_feature (30)..(30): n is a, c, g, or t
  misc_feature (32)..(32): n is a, c, g, or t
  misc_feature (34)..(36): n is a, c, g, or t
  misc_feature (39)..(39): n is a, c, g, or t
  misc_feature (48)..(49): n is a, c, g, or t
  misc_feature (56)..(56): n is a, c, g, or t
  misc_feature (59)..(65): n is a, c, g, or t
  misc_feature (67)..(67): n is a, c, g, or t
  misc_feature (72)..(76): n is a, c, g, or t
  misc_feature (80)..(80): n is a, c, g, or t
  misc_feature (82)..(83): n is a, c, g, or t
  misc_feature (90)..(90): n is a, c, g, or t
  misc_feature (92)..(100): n is a, c, g, or t
  misc_feature (113)..(114): n is a, c, g, or t
  misc_feature (121)..(121): n is a, c, g, or t
  misc_feature (124)..(124): n is a, c, g, or t
  misc_feature (128)..(128): n is a, c, g, or t
  misc_feature (135)..(135): n is a, c, g, or t
  misc_feature (156)..(156): n is a, c, g, or t
  misc_feature (174)..(174): n is a, c, g, or t
  misc_feature (179)..(179): n is a, c, g, or t
  misc_feature (182)..(182): n is a, c, g, or t
  misc_feature (184)..(184): n is a, c, g, or t
  misc_feature (186)..(187): n is a, c, g, or t
  misc_feature (191)..(191): n is a, c, g, or t
  misc_feature (199)..(199): n is a, c, g, or t
  misc_feature (215)..(215): n is a, c, g, or t
  misc_feature (219)..(220): n is a, c, g, or t
  misc_feature (232)..(232): n is a, c, g, or t
  misc_feature (237)..(237): n is a, c, g, or t
  misc_feature (262)..(262): n is a, c, g, or t
  misc_feature (270)..(270): n is a, c, g, or t
  misc_feature (273)..(273): n is a, c, g, or t
  misc_feature (276)..(276): n is a, c, g, or t
  misc_feature (284)..(284): n is a, c, g, or t
  misc_feature (287)..(287): n is a, c, g, or t
  misc_feature (289)..(289): n is a, c, g, or t
  misc_feature (304)..(304): n is a, c, g, or t
  misc_feature (309)..(309): n is a, c, g, or t
  misc_feature (329)..(329): n is a, c, g, or t
  misc_feature (331)..(331): n is a, c, g, or t
  misc_feature (333)..(333): n is a, c, g, or t
  misc_feature (337)..(337): n is a, c, g, or t
  misc_feature (345)..(345): n is a, c, g, or t
  misc_feature (353)..(353): n is a, c, g, or t
  misc_feature (364)..(364): n is a, c, g, or t
  misc_feature (366)..(366): n is a, c, g, or t
  misc_feature (373)..(373): n is a, c, g, or t
  misc_feature (380)..(380): n is a, c, g, or t
  misc_feature (404)..(404): n is a, c, g, or t
  misc_feature (407)..(407): n is a, c, g, or t
  misc_feature (424)..(424): n is a, c, g, or t
  misc_feature (471)..(471): n is a, c, g, or t
  misc_feature (495)..(495): n is a, c, g, or t
  misc_feature (503)..(503): n is a, c, g, or t
  misc_feature (505)..(505): n is a, c, g, or t
  misc_feature (527)..(527): n is a, c, g, or t
  misc_feature (537)..(537): n is a, c, g, or t
  misc_feature (550)..(550): n is a, c, g, or t
  misc_feature (558)..(558): n is a, c, g, or t
  misc_feature (563)..(563): n is a, c, g, or t
  misc_feature (566)..(566): n is a, c, g, or t
  misc_feature (638)..(638): n is a, c, g, or t
  misc_feature (654)..(654): n is a, c, g, or t
  misc_feature (666)..(666): n is a, c, g, or t
  misc_feature (669)..(669): n is a, c, g, or t
  misc_feature (672)..(672): n is a, c, g, or t
  misc_feature (710)..(710): n is a, c, g, or t
  misc_feature (775)..(775): n is a, c, g, or t
  misc_feature (777)..(777): n is a, c, g, or t
  misc_feature (792)..(793): n is a, c, g, or t
  misc_feature (826)..(826): n is a, c, g, or t
  misc_feature (883)..(883): n is a, c, g, or t
  misc_feature (909)..(909): n is a, c, g, or t
  misc_feature (937)..(937): n is a, c, g, or t
  misc_feature (977)..(977): n is a, c, g, or t
  misc_feature (981)..(981): n is a, c, g, or t
  misc_feature (983)..(983): n is a, c, g, or t
  misc_feature (1001)..(1001): n is a, c, g, or t
  misc_feature (1007)..(1007): n is a, c, g, or t
  misc_feature (1013)..(1013): n is a, c, g, or t
  misc_feature (1015)..(1015): n is a, c, g, or t
  misc_feature (1017)..(1017): n is a, c, g, or t
  misc_feature (1062)..(1062): n is a, c, g, or t
  misc_feature (1074)..(1074): n is a, c, g, or t
  misc_feature (1081)..(1081): n is a, c, g, or t
  misc_feature (1104)..(1104): n is a, c, g, or t
  misc_feature (1110)..(1110): n is a, c, g, or t
  misc_feature (1124)..(1124): n is a, c, g, or t
  misc_feature (1143)..(1144): n is a, c, g, or t
  misc_feature (1251)..(1251): n is a, c, g, or t
  misc_feature (1338)..(1338): n is a, c, g, or t
  misc_feature (1376)..(1376): n is a, c, g, or t
  misc_feature (1403)..(1403): n is a, c, g, or t
  misc_feature (1421)..(1422): n is a, c, g, or t
  misc_feature (1471)..(1471): n is a, c, g, or t
  misc_feature (1486)..(1486): n is a, c, g, or t
  misc_feature (1563)..(1563): n is a, c, g, or t
  misc_feature (1579)..(1579): n is a, c, g, or t
  misc_feature (1583)..(1583): n is a, c, g, or t
  misc_feature (1588)..(1588): n is a, c, g, or t
  misc_feature (1606)..(1606): n is a, c, g, or t
  misc_feature (1632)..(1632): n is a, c, g, or t
  misc_feature (1767)..(1767): n is a, c, g, or t
  misc_feature (1785)..(1785): n is a, c, g, or t
  misc_feature (1789)..(1789): n is a, c, g, or t
  misc_feature (1818)..(1818): n is a, c, g, or t
  misc_feature (1833)..(1834): n is a, c, g, or t
  misc_feature (1898)..(1898): n is a, c, g, or t
  Peptide Sequence Number=SeqID_9223
  Probeset Number=SeqID_10806
tgtgtgtattgttgtatgtgcnncgcnggngngnnngtnctgctgtgnngtgtgtntannnnnnnangtcannnnnctcncnncgcctcnannnnnnnnntcccccccccccnncacgcantcngctntgctatnttctcgactctctatgcgagnagtgagatgcgagaggangtatnacncncnncccncactcacnacgcagggacagagcnaaanngagatgagattntcacngattcagagatacgcagtctacctntaaatttnatnatnatatctcntantnctaactactatctgnactangtcgagatagagcagtagangnancaancaaccatncaaccggngtatgcatggntngcggatngtagatncggatgtactggtgatgctgaggnctntacgtctgagagagganacgcccagcaagacaggacagtctgatacagtgatctgtactgagtntttactctcacactaacacactcnatcagtantnatatcatatgtgtagagatggntagagaatanaaggacgatcagngaaggcangccancanaacatgagatgtgtatatgactagtgaaggaggagatgcaggatgagatatatatagcacatctgctcgctncctcactctcctactnatgctatactantancancatctgtcgatgactgctgctacgttcctgtcgattgncatggtagtgcgtcgcgtatagtaagttgtcgtcgaggtagtgagatagggggagcgtggcagtntntactaaagggacgcnncaccccacaccctcatcactcacgtctctccancacgaacagtgatgcgtgcgtgcgacgtgtacgcatactatacatctcgcacgatcnacgaaacatatattatattaatatgntctgttgtcttggttggtgtgtgttgtntactgacatgtaagtatctctcaacgagacgcacctcacncacntncactatcacatgatgtgntgatgnaggtcntncngctagatgtagtagtgtcggctgcgtgatgtgatttgatgcaagnatcacacacganactagtnagtatatgatcgacgcggctcgngtggangatgagaggtgtgnagtgtactctctagaaaannatattatagatatatatagtgtgtagtgtagtgtggtcgagctagtcgccgcatcgtatgcttgccaccactcccacgcgcatacgtcgtctggatgacgttgtganggttgtgcgctgcgcgtgcacgttcgtcgctactatctattacatggacgcgaggatacgatcccgacgagacacgtctacattcanatatatagaagatgcgagcgacacggagaaggacaganagactggctctgacgcatagaagggangagttagtgaggagagannagcatacgcaggatgtgtaggatgatgacacgtccccagcgacacatancaaccaacacgatanaccgtcgtgtacgtctaacaatcagtgctgcagtcactctggtcgaggtctatcgctcgcgtctgcaccgctctcanactacacgcacgatgnctancgtgncagcttcgctaggctatngagcgaggtacatccgagcagtatanatcgatacacagatatcagctctacacgatgactcgtaccatgtatgtagtgtctctgtattacctatctctatcatctactctcactattctctgtagtcaactgtcactactagtctgaacgcgcagcccccnactgcactcgcctcgtcnagcnccgtcgacatgcgcacaccttatcatgantcgacgccagagtgnngagcatacactagtacacatctgcacctataagacctggtcactcggcgaccctggacacgcgn

SEQ ID NO: 1028 - DNA, 1381 bp, Glycine max
  misc_feature (19)..(19): n is a, c, g, or t
  misc_feature (46)..(46): n is a, c, g, or t
  misc_feature (102)..(102): n is a, c, g, or t
  misc_feature (150)..(150): n is a, c, g, or t
  misc_feature (255)..(255): n is a, c, g, or t
  misc_feature (519)..(519): n is a, c, g, or t
  misc_feature (754)..(754): n is a, c, g, or t
  misc_feature (886)..(886): n is a, c, g, or t
  misc_feature (1043)..(1043): n is a, c, g, or t
  misc_feature (1066)..(1066): n is a, c, g, or t
  misc_feature (1312)..(1312): n is a, c, g, or t
  misc_feature (1323)..(1323): n is a, c, g, or t
  misc_feature (1351)..(1354): n is a, c, g, or t
  misc_feature (1358)..(1360): n is a, c, g, or t
  misc_feature (1363)..(1364): n is a, c, g, or t
  misc_feature (1367)..(1368): n is a, c, g, or t
  misc_feature (1371)..(1373): n is a, c, g, or t
  misc_feature (1376)..(1376): n is a, c, g, or t
  Probeset Number=SeqID_10807
cgcaatcaagaggatgatnagaaataaagttactttgtaatcctanacgcatgacaatttatatatatagagagatctgcagcggcaaggtacgcacgtacngcgtcggtaggcgggtcatggttcgcatgcgagaggaacgacagggancacagacgttccatcatacaagtagataacacgatagagacaggcgagggatggaacttgtatatagtaagaactaatataatactagcggcagagtatagtaantataatattatagtatgttatgatacactaagtttatgttatattcatatataaatagtgatagctcgttcatgtggagaaggacaggtctaatgattaagatgggtggtgtagcgggctctcgacattgatctagagatatgtatctaaccatcgtctgtgcgtgctgcgtcgaggatgttttcttctgcgtgtctaacgatagaatatgcatgatcagatgagatggcatcatatttgtgtatatcccaggcctgctcttgngagaggatgtggttgtgtagattatcatcaaattcaagtataatgaatgagagagggatatgtgttgttggtttaatatatgagataatagagaggtcggagaaatttacatgtgatatattagctattaatatgtgtcttatcacactactctactaaagttagacctagcacaataggaagtacagaacacgcaagcgctgggacgcatgaggagaagcgagctatggacggnacacagaagcaacgacctcctagcacagttcaccgacccatctacgcaagtcacacttactgcgtccgcctatgcactgtggatactcaagtagtgatcaccactctctcactctactgctcgcacaaggcnatctaatatcggtagagcaggatacaacaaataatactaaataacaggaactgaagaccatgattaactacaagccctgactctatcctaggcgtacagcgcggcgaatgagggaggtggtaagtgataaatgcactcaactagaagacagaggcancgtgtaagaagacaagatcttanccacacactgtagaggacctcggaagaacgcactatattctctagtatgctgttgtcatctactctcacagccactctaagacacactctctctacgcgctgacactgcccctcacgtccccagtgagatcatgacgtcaacagaatgtcactccctcgcctggcgcccgagggggactcctccacctagcttcctagtaccccgtcatatatatcccaaagggagggaggctagcgagtattagnggtggtgtgtnggtgtggtggtggggtaggagcggaggnnnngtgnnnggnnggnnggnnnggncccca

SEQ ID NO: 1029 - DNA, 495 bp, Glycine max
  misc_feature (495)..(495): n is a, c, g, or t
  Peptide Sequence Number=SeqID_9224
  Probeset Number=SeqID_10808
agtgttctcggttcgacccagccatcaatcctcaaatccgagctgagaaaagtgagcacttgccgaataacgagccgctcgattcagtcccgtcgacgcccagcctgcaagtcacgaaccgtaagccccaaatcgatcgataagctcgatccagactgatgaatccatcgctctcggtcaagcctcaatcttccaatccgagcccggcgaatcgttcgaaggccgtgcttggactgcccgatgaggcgctatggatcccatcttctttgcaaacgatgatttcgacggagctctagttaccatggcacgacggcgggagcgatgcacagcagacagaagcgagacgacaccggagagatgagctaacaccggaagtgcagttgcagtagcgccattgatgagcccgagcttggcgaagaggatgaagctccacaatggagtcccgacctgaaacggagaagtgaaagtgaagaccaaacgcaaacgctcatttcn

SEQ ID NO: 1030 - DNA, 506 bp, Glycine max
  misc_feature (303)..(303): n is a, c, g, or t
  Probeset Number=SeqID_10809
cttatttgcttataaacagagagcatgtgggtattacacacaacacttcagatatatcatttttataattttattttattttctttgttaaactaggtagtctttatgaattagataataagcataaatgaagctgtctacaaaattcagcttattgacttttgtgaatcaaaatgacctttagcatattttgcttctcgcaatgcattgtattttgttaacaccaactaccagtgccactatgataccctactccctgcggagaggagttaagttacatgtttctgtggaaattgctaagtngaagcctgatatgacaaaaattgaagtaattggtgcatcttttccttcattacagtccatattttctgtttcatgataggtgctgccttctgtgttgctttttgctttccctattttgttgacagatattcaaggccgagttcacatgtccttcgtggttctcttcaagtgcaaagacgctaatcaacaaaatccttgatcca

SEQ ID NO: 1031 - DNA, 1547 bp, Glycine max
  misc_feature (1)..(3): n is a, c, g, or t
  misc_feature (24)..(24): n is a, c, g, or t
  misc_feature (33)..(33): n is a, c, g, or t
  misc_feature (36)..(36): n is a, c, g, or t
  misc_feature (55)..(55): n is a, c, g, or t
  misc_feature (62)..(62): n is a, c, g, or t
  misc_feature (76)..(78): n is a, c, g, or t
  misc_feature (85)..(85): n is a, c, g, or t
  misc_feature (94)..(94): n is a, c, g, or t
  misc_feature (101)..(101): n is a, c, g, or t
  misc_feature (167)..(167): n is a, c, g, or t
  misc_feature (246)..(246): n is a, c, g, or t
  misc_feature (256)..(256): n is a, c, g, or t
  misc_feature (350)..(350): n is a, c, g, or t
  misc_feature (352)..(352): n is a, c, g, or t
  misc_feature (356)..(356): n is a, c, g, or t
  misc_feature (367)..(367): n is a, c, g, or t
  misc_feature (438)..(438): n is a, c, g, or t
  misc_feature (481)..(481): n is a, c, g, or t
  misc_feature (546)..(546): n is a, c, g, or t
  misc_feature (598)..(598): n is a, c, g, or t
  misc_feature (668)..(668): n is a, c, g, or t
  misc_feature (768)..(768): n is a, c, g, or t
  misc_feature (784)..(784): n is a, c, g, or t
  misc_feature (1104)..(1104): n is a, c, g, or t
  misc_feature (1140)..(1140): n is a, c, g, or t
  misc_feature (1158)..(1158): n is a, c, g, or t
  misc_feature (1168)..(1168): n is a, c, g, or t
  misc_feature (1189)..(1189): n is a, c, g, or t
  misc_feature (1271)..(1271): n is a, c, g, or t
  misc_feature (1422)..(1422): n is a, c, g, or t
  misc_feature (1471)..(1471): n is a, c, g, or t
  misc_feature (1473)..(1473): n is a, c, g, or t
  Peptide Sequence Number=SeqID_9225
  Probeset Number=SeqID_10810
nnnggggggatgatattgtgtagntatttgtgngtngtgtgtagtgggagaagangtatganatgtgtgagaaaannnaaaaganaataataanacaagancagaaagataagtactctctatcactcggtgcggttacactctactataccacataccacgacaanactctatatcaccgcgcgcgccactaccacaccaacacacccattacgcgagcgctacagacctacctactgacatacngtgtcggtgntatcatgcgctaattctatattcaacactcaacaactagcaacacactctgctcactcaaccgactagcgatgtagcttctatctgaacacacnanctcnacacaaatctngcgggactataataactggtcgcgcgactatcccttacgcatactcactcttgacatacgggctcgtcttncgcgatcgtcaatcatctgtgggcggtgttggcgtgtgatagnatctgtcgatagtatgatgtgacgcctgcgtggtggcgtctaactatcacaacagcataacatgngatgtgatacacatatcacaaacacacatatcgtagtggtgtgtgatttctnatacttgcaatatctcaatacacagaatagcgcgcgacgacacccacaccacaaccaccacgacaggcgnaaaaaggacaacaatcgcgcgtggcaaacgcacgataagcacagttatgtagatatatagacataatatgggtcacacacaaaagggtgtggataatatnacagggcaggcgagtngccggcgccgcacaaaacaccaagatattaaagagtttattataacaacacacatctactcagcaggcgtaactaacactagaccgacagtcagcgggcagaaaacaactaatcatatattacgctaaacagcactgcggccataaacacccacctcacatactctctcacacctcatataatatacacacacacacaccacatcctaactcgactgtgtatacacactaacgactccacgacgaccacatcgtgaaccggctctgcacagaacaacgcgtgaatagtgaattaatagatagcgctgaactagctgctcncacagctctcacgatcgcagtcccctctcacagctnctacgactgcgtgtgcgngtgggaacangatcaaagtctaatgtactgngaggataacgactatatatgtgttatagatataatattgagtgcggtcaatatcacatacacacaaagagagtgagcgcgtnaatataacgtgctctctgtctctcattctgaacctatacgactcatatattgataatatgctgcgtcggcgctaactaactaacattaatgtgactctggcgtgtatccgcatgaccaaacgccgctggacgtccgaagacacgaaatctntccgcgtggtagtcggaagtgagaatctaccgagactagagtggtatanantatcatattatctgtatatatcatggtcatataattcacctactataatctcacatagattatgtatcattcat

SEQ ID NO: 1032 - DNA, 649 bp, Glycine max
  misc_feature (588)..(588): n is a, c, g, or t
  misc_feature (595)..(595): n is a, c, g, or t
  misc_feature (597)..(597): n is a, c, g, or t
  misc_feature (610)..(610): n is a, c, g, or t
  misc_feature (612)..(612): n is a, c, g, or t
  misc_feature (639)..(639): n is a, c, g, or t
  Probeset Number=SeqID_10811
ggtcggagcacgagcggaggctggtccgcgccgacgcgctcgacagggcgcggttctccgggacgctctccgccgaggagatcgaggaggacgtgtacgcgctggccggcgcgcgcccgcgccgccgcccccggcgccgccggccccgcgccgtgcagaagcagctcgatatgctacttcccggcgcgtggctatcggagatcaccgccgagttctaccgggtgccggacgatcgctgacccgctcccgctcaactcaacccaacagtaagcaaagcagagcgaattcgccgatcgcaattcacaaatcaattggtcgccgccattgtgagctctacataatccatccattaattggtcatatagcgtcgggctgatatgaatcccagcattgaactgtagtcgtagcagcaagtgcaagtgatgattgatgactagtcagtgattctctggtagtagcggtggttgtggttcgtatcatcgtcagcggattgggaggacacaatgtggtgtgctcctaagtgcactgtcctccatggtcctctcgggaacatcgttacttttccccctttgtggaccccccaacatncccgttngnactcccccccccncnctgctttgggggggcccccccccccanacctctccct

SEQ ID NO: 1033 - DNA, 1056 bp, Glycine max
  misc_feature (50)..(50): n is a, c, g, or t
  misc_feature (601)..(1056): n is a, c, g, or t
  Peptide Sequence Number=SeqID_9226
  Probeset Number=SeqID_10812
gtaccggggccccccctcgaggtcagctacgtaggccccccccccccttnctatgctaggagttggctcgttttagtgcatctctaggacctattgcttggaaaattgcttcccacaggattcaacacgcactgccagctggatgtaaatttggtcgtggttgggttggagagtatgaaccgctttctaccccaatattaatggttaataatcgtgtccaaaaagaaaatagtttggttatgaagttgcattccactactgaattaccaaagggtaaccaaaattgtaagaatgtggaatccagcatcatgcatcctgtaaatggacagatgcttgagggaaaacgtccttcaatgcctgatttcaaaggaaaacctttatttggttctgctggagtaaggctcagtgctcctgtcaacatcctcaatcaggagcagaacgcccaatgccagatattgcacttgtttgtattttcatgacttgtgatttgtgcaacttgataatatttgagcttggaattgtcctacagatatctgcaatactacatgaccttagggatacagaattttccctggaatttgcagaagacgaggctaggaannnnnnnnnnnnnnnnnnnnnnnnnnnnnnnnnnnnnnnnnnnnnnnnnnnnnnnnnnnnnnnnnnnnnnnnnnnnnnnnnnnnnnnnnnnnnnnnnnnnnnnnnnnnnnnnnnnnnnnnnnnnnnnnnnnnnnnnnnnnnnnnnnnnnnnnnnnnnnnnnnnnnnnnnnnnnnnnnnnnnnnnnnnnnnnnnnnnnnnnnnnnnnnnnnnnnnnnnnnnnnnnnnnnnnnnnnnnnnnnnnnnnnnnnnnnnnnnnnnnnnnnnnnnnnnnnnnnnnnnnnnnnnnnnnnnnnnnnnnnnnnnnnnnnnnnnnnnnnnnnnnnnnnnnnnnnnnnnnnnnnnnnnnnnnnnnnnnnnnnnnnnnnnnnnnnnnnnnnnnnnnnnnnnnnnnnnnnnnnnnnnnnnnnnnnnnnnnnnnnnnnnnnnnnnnnnnnnnnnnnnnnnnnnnnnnnnnn

SEQ ID NO: 1034 - DNA, 1681 bp, Glycine max
  misc_feature (93)..(93): n is a, c, g, or t
  misc_feature (117)..(117): n is a, c, g, or t
  misc_feature (172)..(172): n is a, c, g, or t
  misc_feature (215)..(215): n is a, c, g, or t
  misc_feature (258)..(258): n is a, c, g, or t
  misc_feature (303)..(303): n is a, c, g, or t
  misc_feature (325)..(325): n is a, c, g, or t
  misc_feature (350)..(350): n is a, c, g, or t
  misc_feature (357)..(357): n is a, c, g, or t
  misc_feature (456)..(456): n is a, c, g, or t
  misc_feature (1021)..(1021): n is a, c, g, or t
  misc_feature (1028)..(1028): n is a, c, g, or t
  misc_feature (1191)..(1191): n is a, c, g, or t
  misc_feature (1370)..(1370): n is a, c, g, or t
  misc_feature (1562)..(1562): n is a, c, g, or t
  misc_feature (1566)..(1566): n is a, c, g, or t
  Peptide Sequence Number=SeqID_9227
  Probeset Number=SeqID_10813
ataagcaaatatagcacacaatatctggattttggtatccgtgacgagatctcgacatagatgtaaactatatatcgggtgtatgcgagcgcngacgcgccacgacgttgtatagcncatatttgtttcgccgcgcggcggcgcgtgagcagatagtgctgatatgtgatantttacgtcgtgcggagacatgccacacagtcacgcgcacacanagcagcgcgtttttcggtttctcagcacgcgttcatctctgcngactgtatatattatgtgagacgctgcatgcgcagacacgtcatnacatacgatgttctttttaacnaacgctatcatatattgtatataanatatatngtggagacgcgccgtagattagcagcagtgttatatatataacatattgtagtacgcagacgcacggtgcgtgatattttatcaccgcgccgcgcgcantattatatatttaaacagtatataacgcgcaggacacagtacgtacaatgactgagtgagaagtatgtgaggtgcgccgggtatcgccccagacgtcgcgtacacctctcatatatgtatctgacagtataaatcacacaaagcacattcttctcttacgcattagatcatatgtaaaatatattgcctctcagacctataatattatagcgtcgtggtgtgatatacataagactgtgcggtatagagacggacgtagaagacgtgggtatgtaggtaacaaatcagatcattgggatggcatgatacagagcaggtagtgattgatagttgagggaataatatagataccctaccgacatctttatgtgatgtattttacgccacatcaatacgatttacagtacaaacatattgggtggggctaattataactccccagtgttactactacattgctcagaccacacggtatatattttggtggcgtgtggggggagggtcttatataaatataatcgccacacatataatataaggcgtgcgggtgaaacagaaagtaatngtaaccntataggtggcgatagtcgtctatatcgtgtaatgcacgagatatattatttttataacatctacgagcggcggggcgggctttacagcgcgcgaccgaaacgtactaatatacctcacgacatgtcgtatactatacatcgtgtcagttgttgtgtgtgggtnggccggggcggggtggcgaccgcgccccgccggcgatttgataaagaggggcgcgactatcacacacgatagaacaacattggcgcgtagtgcaaatttataatatgaagagcgcgcgtggatagtgtgataatattaagataatagagcgggatagtacaggggaggaggaagcgcgnagtataatatataaatctatatgggcgctgactcaacacttgcgtggtggtgaaataataggggatacgactgtggtgtggtgcgatatgagaggatagtgtatttctgtgtgtgcgtctgcgtctcgctgtagaggagcgaatataaacttgtctagcgcgtccgggtaacgtatggagggagaaaaatanctgnccggcgcgtcgcgtgcagcgcaacacgaacgcgcaaagacgtagcgagagagtggggcggcgcgaaatacggggtggagggataatagattgcgaggcaggaagcgaccggagat

SEQ ID NO: 1035 - DNA, 1481 bp, Glycine max
  misc_feature (13)..(13): n is a, c, g, or t
  misc_feature (18)..(18): n is a, c, g, or t
  misc_feature (20)..(21): n is a, c, g, or t
  misc_feature (28)..(29): n is a, c, g, or t
  misc_feature (68)..(69): n is a, c, g, or t
  misc_feature (71)..(71): n is a, c, g, or t
  misc_feature (98)..(98): n is a, c, g, or t
  misc_feature (111)..(112): n is a, c, g, or t
  misc_feature (136)..(136): n is a, c, g, or t
  misc_feature (203)..(203): n is a, c, g, or t
  misc_feature (257)..(257): n is a, c, g, or t
  misc_feature (282)..(282): n is a, c, g, or t
  misc_feature (464)..(464): n is a, c, g, or t
  misc_feature (555)..(555): n is a, c, g, or t
  misc_feature (929)..(929): n is a, c, g, or t
  misc_feature (1118)..(1121): n is a, c, g, or t
  misc_feature (1124)..(1124): n is a, c, g, or t
  misc_feature (1127)..(1128): n is a, c, g, or t
  misc_feature (1317)..(1317): n is a, c, g, or t
  misc_feature (1376)..(1376): n is a, c, g, or t
  misc_feature (1379)..(1379): n is a, c, g, or t
  misc_feature (1392)..(1392): n is a, c, g, or t
  Probeset Number=SeqID_10814
tagtttgggatantaaangnnggggaanntgggggtggggacgccaaagtgaggagagtagagagaanncnaacactgaagcagaaagagaagaagancacctatgagccnncgctgtggaatacacccagaaggngcggtgagtttactaaaataggcttgggttaagctttcccatcccggtcgtggttagagaaagggancacggaatatcttagggaaacataaaggtgagggataccccgccgcgcgggagnctggccgacgcgcgaaatgtccggngaacggcgaggcaacccattactaacccgtaaaggaaaacacattccccttaaactttcggcaagaaacgacaacatacccggaaaatatgtgttgcgcgttgttgttctcttctataacagcgataggaaatatagaaagaggagaaggaagggcggggaattctcaaccctcaattatangacgacagcgagaatacgctctctctcttttatataaacaaagaggctctcatgtttctcggaatgtggagaaactctctattaatatacnaacatccctcccactcacccctcaacacctccctctggcgtatagtggggtctatcacggggatactacacgttacaacagccgatacaatcacctctctcctctgcgtgtgtcctcgctacagtgatcttcaccctaccctctctatcgcacgcacacccctctatatatttatattttattatggcgctgataaagtgacgaacccacgcaagagcgacaagagaagacacttcttgcacagacgtgctggttctcttcctcacacgagggaggaggaagaacgagaagcgcgtgttgtctgaattaaagaaaatacggcgcccactcccgccgtgaggcggggctcaccccaacctaatacggggctcgcngacaacaaaagaagagatgacacacacctcccttcccctacaatctctacacaacagcaccctcacatcacctttctcccccctcccccggggcgcgcgcaccccacaaccacataaaaagacgaaactatattttgttgggtgcgccgccacatataacagatggggagggagttgcagatcgacgtnnnncgnggnngctccgccgccctcgtcctcctcgtccgctcgcttctcaccgaacaatatacagcgagcacgagacacccttagcgtcaccccgaacacaaccgcaagacagtcgttgcgtcacatccatgtgtgtccgtgcactacataatcccacacccgctctcgcccgcctctctgctctctcagccacatcgcnccaccgctcgagcgccgtgataaaaacacatcaccaccacaaccaacaccggcacacanccnataagactacgcncccatgacgtgatccgcggcgtcgccaatgcgaatctgagcactactgcgccccggcaccttacatactatgctgatgctcatgtatat

SEQ ID NO: 1036 - DNA, 455 bp, Glycine max
  Peptide Sequence Number=SeqID_9228
  Probeset Number=SeqID_10815
aatcggctcgagtcgtcactctcgtgtcgggtcaacgcggtataccatagtcaagatggcatgagagtggtgcgcaaagaggctttatgggaaccacgtcgtcgggcgcgttagggttccggcgacggctgtaccacgagagggttgtggatcactacgacaacccccggaacgttggatcgttagacaagaacgaccctatcgtagggactggtttggtgggggcgcctgcgtgcggccacgtgatgcaacttcatattaatgtgcgcgactgaaccggacatatctttcgttctccgctcaatactgtatgtgtgggctaccccatccgttctttatgttctcttacttattggtggaacggcagctctatggactctcccggggatatgatcattacgtggattgaatatcgtttttgcctttctccgcttgccctttagtgtcgtctgctg

SEQ ID NO: 1037 - DNA, 1488 bp, Glycine max
  misc_feature (100)..(100): n is a, c, g, or t
  misc_feature (135)..(135): n is a, c, g, or t
  misc_feature (137)..(137): n is a, c, g, or t
  misc_feature (140)..(140): n is a, c, g, or t
  misc_feature (253)..(253): n is a, c, g, or t
  misc_feature (422)..(422): n is a, c, g, or t
  misc_feature (452)..(452): n is a, c, g, or t
  misc_feature (675)..(675): n is a, c, g, or t
  misc_feature (794)..(794): n is a, c, g, or t
  misc_feature (899)..(899): n is a, c, g, or t
  misc_feature (911)..(911): n is a, c, g, or t
  misc_feature (1034)..(1034): n is a, c, g, or t
  misc_feature (1070)..(1070): n is a, c, g, or t
  misc_feature (1282)..(1282): n is a, c, g, or t
  misc_feature (1324)..(1324): n is a, c, g, or t
  misc_feature (1441)..(1441): n is a, c, g, or t
  misc_feature (1444)..(1444): n is a, c, g, or t
  misc_feature (1456)..(1456): n is a, c, g, or t
  misc_feature (1472)..(1472): n is a, c, g, or t
  misc_feature (1475)..(1475): n is a, c, g, or t
  misc_feature (1487)..(1487): n is a, c, g, or t
  Peptide Sequence Number=SeqID_9229
  Probeset Number=SeqID_10816
aacagcacacaacaggaaggagaaaaatcaacacaaagcgaacagacgaaaaccgagcgggggaccgcgaacaaaaggaagagcagagggggggccacanagaggaggagtacaagaagaaggagggcggggggncngancctgagtttccccaagaaacacggcggaaggcgccaacaaggcgagaagcacggcaaaccaacgcacagagcagaggaggcccgaaaggcgaaggacgcgcgaagaacgcggnacgcggacacccacagcgagccgagacaggaaacagacacaaacaggacgaaacagagagaaagaagacagacaacacaacgagaggaaaacaacacaaaggagaagaagagaagcgggcggcggaaagcgagacaaagcacagcagaagcaggccacgccaaaggagnacgcgagcggcggaggacggagaagaaaangcagacgaggcgagcaggcagcggagacgcggaggcagaggcgcgacgacagcaccgcgacgccaacgacaagcaagcgcgaacgaggagcaagacagcaagaaacgacgaggagaaagagaaagagaaagaaacacacaaaagacacagcacaccgcagccgaaacgccgaacgcaaaagaaaagggacagaagaaagaaacagcaagggcacacgaaaaanggagagcagaggacaagcagacgagcaagccgcaaaacgacggagaagagagagagcaggcgcaaaacggcggggcgcgcggacaagaggaacgcagggcaaacgaagcggacgaacgncgcgaggtgaacagcaaacacgcagcggagcgcgagacaaagaaacacagcaccaggccgaagaagagggaagacgcgaaagaagaagcaaacacaagaatgacngagggacagaangacggggcagagatgaagagcgaacagacgccgagacgagacgacgccaaggacaggacaaagaagaagaagcgacagagaggaatcgacgaagagagaatacgtacacgagacacgcccgcnccgacggaacagacagaagaaggaggagcaccgagncgacaatacgacgcgcaatcaaagaagcgtacagacacgcacaaagagagcacgatatgaacgagcggagacggacagcacggcagcgtgcaaacaacagcagagacggagcgtaccgtacggagattcacgaggagtcgcgcaccgacgacctgccgaaccacactatcagcaacgacagcgcacggacaagagaggaagaaagcacctgntaatgcgtccgcgcgcagtgaaggggggtatgcgaaaagtanagaggaatacgaccgcacgacgcgaccacgaagaagtcgagaggaatagaagaaacacagagtgcacgagtcgcaccgcacaacgacgcgcaagacggcgacacagagaacgaacancangagacagctacnacaccatgtgatgagnatncaacacgaacgng

SEQ ID NO: 1038 - DNA, 412 bp, Glycine max
  misc_feature (11)..(11): n is a, c, g, or t
  misc_feature (55)..(56): n is a, c, g, or t
  misc_feature (58)..(58): n is a, c, g, or t
  misc_feature (60)..(61): n is a, c, g, or t
  misc_feature (63)..(64): n is a, c, g, or t
  misc_feature (67)..(67): n is a, c, g, or t
  misc_feature (69)..(69): n is a, c, g, or t
  misc_feature (329)..(329): n is a, c, g, or t
  misc_feature (359)..(359): n is a, c, g, or t
  misc_feature (371)..(371): n is a, c, g, or t
  misc_feature (377)..(377): n is a, c, g, or t
  Peptide Sequence Number=SeqID_9230
  Probeset Number=SeqID_10817
gttcagcgganaagaagatccaaatcgatccgttgaaaagggatatcgagtttgnnancnnanntcnantgctgtggacgcgacggggaacccgatccctacttctgcggtattgactgcgtcggcgaagcacataggtctaagatgtatgccggagaacgttgcgtttctcaaatgcaagaagaacgatccaaaccctgagaaatgtctcgacaagggtcgtgacgtcactcgctgtgtccttggcttgctgaaggatcttcaccagaaatgccaaaaggagatggatgactacgttgggtgtatgtattactacacaaacggagtcnagcgaaaggctgttggaatctggggatgcnaggactgcggcnaggtcnaggccggtggtgcttacaccatgaacacagctagt

SEQ ID NO: 1039 - DNA, 490 bp, Glycine max
  misc_feature (288)..(288): n is a, c, g, or t
  Peptide Sequence Number=SeqID_9231
  Probeset Number=SeqID_10818
atccatccattcattctcctaccgaactctcagcctctcacacaactacaacgccgcaaaagagcatcaatcaaaatccagcagatcatcaagaggagcagcaaatccatctccatgggagcagggatgaagcgcgcgagggaggaggagccaaccgtctcgctggcgctgtccctcagcacagactcctcggcgtcgaccacgacgtcggacgactcgggcaccggtgcgcctacgccggcggcgcccgggaagaggacaaggcggaggagagtagtggcgacgtcnggggaaggggacttcgtctgcaagacttgcggccgggccttcgagacgttccaggcgctgggcggccaccggaccagccacctccgcggccgccacgggctggagctcggcgtcggcgttgccagggccatcaaggagcggcaaaggcgcgaggacaggcagcagcacgactgccacatctgcgggctgggcttcgagacgg

SEQ ID NO: 1040 - DNA, 1672 bp, Glycine max
  misc_feature (1)..(1): n is a, c, g, or t
  misc_feature (4)..(4): n is a, c, g, or t
  misc_feature (13)..(13): n is a, c, g, or t
  misc_feature (15)..(15): n is a, c, g, or t
  misc_feature (17)..(18): n is a, c, g, or t
  misc_feature (35)..(35): n is a, c, g, or t
  misc_feature (47)..(48): n is a, c, g, or t
  misc_feature (54)..(55): n is a, c, g, or t
  misc_feature (65)..(65): n is a, c, g, or t
  misc_feature (72)..(72): n is a, c, g, or t
  misc_feature (140)..(140): n is a, c, g, or t
  misc_feature (155)..(155): n is a, c, g, or t
  misc_feature (173)..(173): n is a, c, g, or t
  misc_feature (199)..(199): n is a, c, g, or t
  misc_feature (254)..(254): n is a, c, g, or t
  misc_feature (262)..(263): n is a, c, g, or t
  misc_feature (314)..(314): n is a, c, g, or t
  misc_feature (363)..(363): n is a, c, g, or t
  misc_feature (379)..(379): n is a, c, g, or t
  misc_feature (410)..(410): n is a, c, g, or t
  misc_feature (417)..(417): n is a, c, g, or t
  misc_feature (460)..(460): n is a, c, g, or t
  misc_feature (491)..(491): n is a, c, g, or t
  misc_feature (493)..(493): n is a, c, g, or t
  misc_feature (659)..(659): n is a, c, g, or t
  misc_feature (661)..(661): n is a, c, g, or t
  misc_feature (666)..(666): n is a, c, g, or t
  misc_feature (694)..(696): n is a, c, g, or t
  misc_feature (708)..(708): n is a, c, g, or t
  misc_feature (754)..(754): n is a, c, g, or t
  misc_feature (777)..(777): n is a, c, g, or t
  misc_feature (925)..(925): n is a, c, g, or t
  misc_feature (931)..(931): n is a, c, g, or t
  misc_feature (1179)..(1179): n is a, c, g, or t
  misc_feature (1183)..(1183): n is a, c, g, or t
  misc_feature (1249)..(1249): n is a, c, g, or t
  misc_feature (1271)..(1272): n is a, c, g, or t
  misc_feature (1299)..(1299): n is a, c, g, or t
  misc_feature (1301)..(1302): n is a, c, g, or t
  misc_feature (1305)..(1305): n is a, c, g, or t
  misc_feature (1310)..(1310): n is a, c, g, or t
  misc_feature (1314)..(1314): n is a, c, g, or t
  misc_feature (1329)..(1330): n is a, c, g, or t
  misc_feature (1363)..(1367): n is a, c, g, or t
  misc_feature (1383)..(1383): n is a, c, g, or t
  misc_feature (1388)..(1388): n is a, c, g, or t
  misc_feature (1393)..(1393): n is a, c, g, or t
  misc_feature (1410)..(1411): n is a, c, g, or t
  misc_feature (1460)..(1460): n is a, c, g, or t
  misc_feature (1477)..(1477): n is a, c, g, or t
  misc_feature (1488)..(1488): n is a, c, g, or t
  misc_feature (1490)..(1490): n is a, c, g, or t
  misc_feature (1516)..(1516): n is a, c, g, or t
  misc_feature (1521)..(1523): n is a, c, g, or t
  misc_feature (1531)..(1531): n is a, c, g, or t
  misc_feature (1536)..(1536): n is a, c, g, or t
  misc_feature (1548)..(1548): n is a, c, g, or t
  misc_feature (1555)..(1557): n is a, c, g, or t
  misc_feature (1561)..(1561): n is a, c, g, or t
  misc_feature (1569)..(1571): n is a, c, g, or t
  misc_feature (1580)..(1580): n is a, c, g, or t
  misc_feature (1585)..(1585): n is a, c, g, or t
  misc_feature (1587)..(1588): n is a, c, g, or t
  misc_feature (1615)..(1616): n is a, c, g, or t
  misc_feature (1630)..(1636): n is a, c, g, or t
  misc_feature (1642)..(1643): n is a, c, g, or t
  misc_feature (1647)..(1647): n is a, c, g, or t
  misc_feature (1649)..(1649): n is a, c, g, or t
  misc_feature (1653)..(1653): n is a, c, g, or t
  Peptide Sequence Number=SeqID_9232
  Probeset Number=SeqID_10819
nctntgtgccatngngnnggccagacacgatcatntaccgatagtgnngcggtnnggttcgtagngtttgtntgcgagtctttgcggcagagtctcctgctggacacagtcaattcgggatgtagagacaagcgacacgnagcatgcgggcacancgcgtccgtcgcgcacancggcgcgcgcgcggcgcggaacgcancatgatgcaccggacgacgcgatcgcgcacggccgatatacacagtacaggcgtntagagagnntcgccgatagccgcgaaagtgtagaggtgcagtgcgccgcacgcttatgtnatcgtgtatgcaaccgcgcagcagacacgggacgtcgatgcgcgcgagngcgccgactatcatantgtgcgcgacgcgacgcgcgcaagcgacatnacgcacntcatacagcgaatgagtatactacattcgaacgagcgcaatgnatacgtcgtagtactctatcgatgtagagtngncattcgtctcgacgctcgacgatcatcgcctgtgccttatcaacgacgacgcgccgcagtctctgcgcagtgatattctgcttatcgtgacgtcatagtacagaagtcgatcgacgcgattatcgcctagccgtctgactatcgatacgattatcgcgcgttttgntnttcgncgatccgcccgtatcgccgcgcgctcgnnnccgcgcgcgctntgcgcccgcgcgccgcggcgtcgcgccgcggactgttggcgcgcgngggtggggcggtgacttccaaanctcttacccacacatcatcaactccttcaagatcagatgatgaggattgttgacatgtatatcacgcaccagaatcggtaaagctaaggaccgcagcgcgacgggaacacctgagatatctctcactcactgatatatgctgaacgtnactccnctccctatcacttacaggactgatcatacgagtacatcagacttttcaaattattgctcttgcaagtcacgcgtgtctgcgtgcgtagctgggcgtcctgctagagcgtgcgttgtagcgacatacacaccctctcttgtgattcaccagatagcgacgctgattataatgataaggatattgtaattgtgaagtgatacatatatcacatatattttatcatcgtccgctgcatttgctctctgttngtgnttgtgtgactttgtagtctctcgtgcgttatatgctgcattttaggtaagtgatagattgagtagnttatcccgacatgatcgatgtnntcttattgttatgtttcattatccctntnntgnctggnttgntggtattatgcgcgnntggtgtccagtatatgtgagatctccgcatacnnnnntcctatgtatgagtgnctagnggttngtggttaaatatatagnnatatcaagacacacgcattcgctgtgttcttcctagcttccccgggtgngtttgcatgttatgtanagactgtgatntnttatcgcggggtgattcttcaataanatggnnnaaaaaggnagtgnttgggaagaagnaaataannnaaanaacacacnnncctctttgntttcntnntgtgttgtggtgtgtgtgtgatagttnntggtagtgggaatnnnnnnnaaaaannatananaaangcacaccaaaacacaccac

SEQ ID NO: 1041 - DNA, 1453 bp, Glycine max
  misc_feature (167)..(167): n is a, c, g, or t
  misc_feature (503)..(503): n is a, c, g, or t
  misc_feature (698)..(698): n is a, c, g, or t
  misc_feature (732)..(732): n is a, c, g, or t
  misc_feature (792)..(792): n is a, c, g, or t
  misc_feature (821)..(821): n is a, c, g, or t
  misc_feature (862)..(862): n is a, c, g, or t
  misc_feature (889)..(889): n is a, c, g, or t
  misc_feature (895)..(895): n is a, c, g, or t
  misc_feature (905)..(905): n is a, c, g, or t
  misc_feature (911)..(911): n is a, c, g, or t
  misc_feature (920)..(920): n is a, c, g, or t
  misc_feature (928)..(928): n is a, c, g, or t
  misc_feature (974)..(974): n is a, c, g, or t
  misc_feature (978)..(978): n is a, c, g, or t
  misc_feature (1016)..(1016): n is a, c, g, or t
  misc_feature (1085)..(1085): n is a, c, g, or t
  misc_feature (1120)..(1120): n is a, c, g, or t
  misc_feature (1137)..(1138): n is a, c, g, or t
  misc_feature (1144)..(1144): n is a, c, g, or t
  misc_feature (1167)..(1167): n is a, c, g, or t
  misc_feature (1206)..(1206): n is a, c, g, or t
  misc_feature (1218)..(1218): n is a, c, g, or t
  misc_feature (1222)..(1222): n is a, c, g, or t
  misc_feature (1255)..(1255): n is a, c, g, or t
  misc_feature (1275)..(1275): n is a, c, g, or t
  misc_feature (1297)..(1297): n is a, c, g, or t
  misc_feature (1308)..(1308): n is a, c, g, or t
  misc_feature (1340)..(1340): n is a, c, g, or t
  misc_feature (1342)..(1342): n is a, c, g, or t
  misc_feature (1391)..(1391): n is a, c, g, or t
  Probeset Number=SeqID_10820
tggggcgccccccctgcactcctacgaatttagaggtatgattctagacggtggggagggcaccccaccctccgcctgacaccactacgaataataccaccacatgaatgacgctaggagcggcggcgtgttaccagatatgccgtataccacacacaaggacagtnagccagtagtatatagaatcataataaccacaacaacgctaatgataactatgatatacagagagtagatatatcttgtgcggcagagctgtgatatacaatggctcatgtagatcttgattcacaacattgtgtatataaaagatcagcgtaccctagatatacactatctgaagctggagtgcggctgcgacgcgggcatgccatacgccataccctctcgcatctaatcaatgacaagtattataggtaagtactgggtgcgttccattcgcatctagtaatcaatggcacgatggcgcgctatggatgataggtgatgtaatgtgtggtatntctatatatatcttaatatactatatagactcgtgctgcgtgactgtatatcttgcgtcaagtactgtacggagtgcgcgaatcggaatcagtaagagcgtggtcgggaagagtggatatgcttatcataggtgcagatattacagctagttgcgtgtcgcgcgcgcgccgacgacgacgtgcgccattgggggngagtgttgtatagcatagtatgatgatgaataancgtacggcgcacgagtggtgtagtcgcaagatgtgatggctatcagttgtcaggtgaggngtgggtggtggcgcggcgacacgcgccgngtcgtgtctgtgtagtgggtggaatgtatacaccccccctnattattgacaaatgtgaatgattctcncgcgcngctgactggntgttgntgtatattnatcaaacncgcgtactcttagtgcggtgctgatagcctaagaatacatcgcggntgtngtatacaacatatatagtcgtggtcatagctctgttgnttatattcgtgatttttgacaatgatggagcggtgtaatagacgcactgaacgagattctatctatagncattccccctctgacatcccgtccgggtgatacgncgtccgctagctatacnnccgagncgagatgaagtcatattattatntgagaacacggtacgcgtatacgtagtagtaacgatatnatgagcgccggnggcngggcgcggaaatgtagccggtatagtttaatanatagtgagcgcggttatttnctagcaacaagggacgacgccngagacgcgagncggatgacgccggcgcatcgacgtcggctatnantacgctcggacattactaacatctacaccagacaccaacgtatatattntatagtcctacgctgatccgcactatacacccgcagctatgattataagcgacgcggcgtgg

SEQ ID NO: 1042 - DNA, 1524 bp, Glycine max
  misc_feature (1)..(24): n is a, c, g, or t
  misc_feature (1479)..(1524): n is a, c, g, or t
  Peptide Sequence Number=SeqID_9233
  Probeset Number=SeqID_10821
nnnnnnnnnnnnnnnnnnnnnnnnccacgcataaacttattttttctttctcttttgcacttgtttcataaaatgccggaccaagatattttcagttgcattagtgaacctcgtcttgtagccagaaagttcttggccagacctcagcatgagggtgttggagccgttgttagaagaagcatagggagatttgaactcaagtactttgatcctttccttgtcttggatgaattctcagtgactgctcctgctgggtttcctgatcatccacatagaggatttgagacggtcacatacgtaggccccccccccagtatttggttttctgatttgaagtataaccatatattatcaggtcatacatggttgcaaattttgtgcggatggaatggctacaaataagttaaaagtcaatgccctgttgccaaatcaagcaatattagtaattgacatttaaacacaacgacgaatgaattaatcctaaaaggtggttttataagcaagaagtctagtattttcacactcgttaaaatgtcttgtatcagcttgtattataccaattaagctacttaacaacttggacttaaagttgtgagggtcatatgtcagtgaattcttttgtgcatgggcatttattttttattaatagtgtacaatcttttgtatcattcagggaagctttaatgcatgaagattttgaaggacataaggggacaatagaagctggtgacttgcaatggatgactgcagggaaagggattgttcactcagaaatgcctgcggctcaaggcacccgaaagggtctacaactatggatcaacttggcttccaaatataaaatgattgagacaaggtatcaagaaatgttgagtaaggacatagccagacgctgaggatgatggtatcaagttttgagttttagctggggaagcactaggtatcatgtaaccaatttacaccaagatactaaacatgttctgggtattctctctcaggagaggatgtttcttgaaaccaaatatcccaacctgtgggaattcttcatactatatattgtggtgagggggtatacttggaaacatggaacctaagctttcaaactcttaccatatttttgttcttggtcctggggatggcttaaaggcatggaacaaatgttctaagctccttaggttcattttggttggagcagaacccttgggggaacctttagtgcaatttggaccctttgtcatgaattcacaagaagagattgatcaaaccattgatgattttgagaactttgccaacggatttgaaaaggcaagacattggacatttgaaagccaaattaattaatcaagacttcatttttccttgttgttcctccttttagagcgaatttggaaaaaagtaattgaagaactaattaataaatatgaaatgacgtaaaagtatatgttgatatcattctttcatataaattatatggttagtttnnnnnnnnnnnnnnnnnnnnnnnnnnnnnnnnnnnnnnnnnnnnnn

SEQ ID NO: 1043 - DNA, 1629 bp, Glycine max
  misc_feature (1)..(1): n is a, c, g, or t
  misc_feature (21)..(21): n is a, c, g, or t
  misc_feature (73)..(73): n is a, c, g, or t
  misc_feature (114)..(114): n is a, c, g, or t
  misc_feature (129)..(129): n is a, c, g, or t
  misc_feature (229)..(229): n is a, c, g, or t
  misc_feature (242)..(242): n is a, c, g, or t
  misc_feature (266)..(266): n is a, c, g, or t
  misc_feature (389)..(389): n is a, c, g, or t
  misc_feature (400)..(400): n is a, c, g, or t
  misc_feature (552)..(552): n is a, c, g, or t
  misc_feature (559)..(559): n is a, c, g, or t
  misc_feature (568)..(568): n is a, c, g, or t
  misc_feature (580)..(580): n is a, c, g, or t
  misc_feature (615)..(615): n is a, c, g, or t
  misc_feature (617)..(617): n is a, c, g, or t
  misc_feature (657)..(657): n is a, c, g, or t
  misc_feature (711)..(711): n is a, c, g, or t
  misc_feature (841)..(841): n is a, c, g, or t
  misc_feature (1026)..(1026): n is a, c, g, or t
  misc_feature (1029)..(1029): n is a, c, g, or t
  misc_feature (1037)..(1037): n is a, c, g, or t
  misc_feature (1169)..(1169): n is a, c, g, or t
  misc_feature (1193)..(1193): n is a, c, g, or t
  misc_feature (1269)..(1269): n is a, c, g, or t
  misc_feature (1284)..(1284): n is a, c, g, or t
  misc_feature (1300)..(1300): n is a, c, g, or t
  misc_feature (1372)..(1374): n is a, c, g, or t
  misc_feature (1377)..(1377): n is a, c, g, or t
  misc_feature (1379)..(1380): n is a, c, g, or t
  misc_feature (1382)..(1382): n is a, c, g, or t
  misc_feature (1393)..(1393): n is a, c, g, or t
  misc_feature (1409)..(1409): n is a, c, g, or t
  misc_feature (1420)..(1420): n is a, c, g, or t
  misc_feature (1448)..(1449): n is a, c, g, or t
  misc_feature (1453)..(1453): n is a, c, g, or t
  misc_feature (1455)..(1455): n is a, c, g, or t
  misc_feature (1457)..(1457): n is a, c, g, or t
  misc_feature (1500)..(1501): n is a, c, g, or t
  misc_feature (1503)..(1504): n is a, c, g, or t
  misc_feature (1508)..(1510): n is a, c, g, or t
  misc_feature (1523)..(1523): n is a, c, g, or t
  misc_feature (1525)..(1525): n is a, c, g, or t
  misc_feature (1549)..(1550): n is a, c, g, or t
  misc_feature (1553)..(1553): n is a, c, g, or t
  misc_feature (1590)..(1590): n is a, c, g, or t
  misc_feature (1617)..(1617): n is a, c, g, or t
  Peptide Sequence Number=SeqID_9234
  Probeset Number=SeqID_10822
ngcgcgaggagatagagatanaacgcgtgcagtatgcaggtcatagtccctgcttcatgtcgtgtccgaattntctcagtctacagcgccgctacagcacccaccatcgcaccncgcgccatcttgcangagacgtgcagaatgctgcgcccgtctctgcgctcatcatctctccactacagtctccagtacctcgtcgccgctacacaacactggcagcgatgcgccnagcgccatacgtnagctctacgtctcactcccgaacnctaactcaacgacctgctgcatcagcgaacatagcacgcctcgctccggaatctctcgcgcgcctccggctcgcgcacggcaccgtgcgccgtgtcgcagaccatacgcagagatcacgtgtncgcgacgagtnccgtgagcgtaaagcggtcattgagtcaaatagccgcagagaaactacacgatcgtcgtgataagtgagatagcgagcgcacgctacgcctcgcgcagccacgcacgatactgacgacaccacgacatcgaaccgcaatgcaagagacacanaggacangcagcgtangcacacagccanctgacacctacacactgtcctactgccgccaccantntcgtcgacgccatcacacgaggcaatgacacagacactcnacgcgagcgcgtgtgtgtgttgcagacgcacactcacgaccctgtaagacagantgcagcaccgagaccgcgtcggactgagggagcgcggcgaaggaaggatagatcggagagtgagggagagtcctgagcacagtccgcataaaagaggcagcgagcaggaatcatatatgaagacgaccangcagacacagtacgcacgcaccacacacagtaagaactggcacacacaacatagtgtggtccgaccggtgcaccctattactaagtcacattcaatatacctaatcagcactgacagataaccacacagccagaaagactgcaaaaacaggccacagcgaaacacacccacactacgcgataatntanaccaaccncgacgcgggccgcaggcgatgtacagattattgcggcgtgaggaggcacatgacacatatacatagcctacgcacaatcatgactcagctgttcgagacgtctaacttcgtgccaactagactcgccgcgcnccgtctgcccccccgcccacctcntccgtcacgcacaccccacggcggcccgacgcacaccgtggacctcgcggcaccgcgtccagctgtatagccacanttctcccactcgctngagagagcacacctcngccgaacacagcctctcgcaccactaccctcaccatcacctcccgcgtccgcgcacgcgcacgctcgaatcnnnacncnnanggaggagagtnagaagaagaataccgnccacacgcgangcgccgtcgcgcgttaacaacatcccannaacncngngtctaaggcgccacgcaccaacaccgcacacatcgcaaaaaannannacannnactcacgtaacgnantagtacttataatcccattataannatncacattaaacaccatattataataagggcgcacggcnaccacgaccaggcccgaccggcgctcncacgagcacccc

SEQ ID NO: 1044 - DNA, 650 bp, Glycine max
  Probeset Number=SeqID_10823
aaactcttcgcagaagaaaacagagaagaagatggggttgaagaacaacatgggggtgctaaaggtgtgtttggggctacttttccttgaggggggtactactagtgccagcttgaggctgagtgagcttggcctgctcatgaaaagtgatcatcatcaatactcgaatgctgaggagtcttcataaccatgctgtgatcaatgaaaatgcgcaaagacaaaccctccctcaatgccgcatgatcacactatgaggctgaattcgtggcaattcaggcttgggaacgtttccatttgcgcattcaccatatcctggcacagcgggtttggcgcaggacctaacccgatgtcctgctatggaccctttccaagcccccggggggggttgacaagggaaaacctacctaatcgaaccaagggctaatgcacggaaaagcccccccccccccaatggacaaacgccacccctttaaagcccttgtttggccatggaaagggagaggaccaaaactaaacctgtggaataccaacattccctcctccttttccagggccaaacaaaaaacagagaaaaagtttatccgaaaacccgtgcaacccccgccgggggggggcccggcaaccccccttcagtcctctaaaggtgcggg

SEQ ID NO: 1045 - DNA, 1550 bp, Glycine max
  misc_feature (34)..(35): n is a, c, g, or t
  misc_feature (98)..(98): n is a, c, g, or t
  misc_feature (214)..(214): n is a, c, g, or t
  misc_feature (252)..(252): n is a, c, g, or t
  misc_feature (262)..(262): n is a, c, g, or t
  misc_feature (294)..(294): n is a, c, g, or t
  misc_feature (317)..(317): n is a, c, g, or t
  misc_feature (362)..(362): n is a, c, g, or t
  misc_feature (1501)..(1501): n is a, c, g, or t
  misc_feature (1525)..(1525): n is a, c, g, or t
  Peptide Sequence Number=SeqID_9235
  Probeset Number=SeqID_10824
ctacgtacgagagtcacgtcggcatctctatgannatgatacacgcctgagtcgacgagagtggcaacgctccctctagaacgagacgccaggcatanagtatacacagaaccacgcgatcgcgtgcgcgtctacacgaatgttcagggaacgcagcagacatcaagagagaggtatctgtatcggacgcgcggctaggcgaagcactatatanatgcagagagagtcgaatcgccacgaagtcgcgaatangggtgggacngggcagtactctactcgactaaatgactatangagtatcagtggagatatagtgncgtgcgactccccattataacactccggcgtacatcagcgactanatctgtcaatctatcatctcgatatgaagtgcaacggacttacatatacgttcgccacatcgcagaatggtcaacgagaggggtaacgtcggcggtcatatcacagttcacaacagacagacgcgggcgcccggggctggtgtgtgtagaagtcctacactacgcgttctactcaatggtgtgttaaataatggcggtgtaaacacggaaagataagtaaaattggcgcggtgtcaagcagagacattgagcccgccggggagccctcccgacactatatctatcgatgaatgaatacgagaagcgagggcgtcatggcggtatctcataaccctcttggcacagcgagcgtcacaaacatagaacccggcgacggcgatcaacagagcaagcagaggatgacgagcatctaagaatgggcggcctaattcgctggtgagaaaagagggtctatggagcgcggagcgcaatgtatcgccaggtttgactgtcctatagataagtcatacatagaatcgtctattggaaggagatacgaggcccttagctacatgagaagaattaggggcttcacaaagaatctcccttcggcgaggagaactctcgacctcccatgtggaaccgaaaacatgcgggcgggggcttccccagctacatcgcgaggaagcgcacaccacgggtatgcgtgggagactatactcttatgagatccaaggagaagcatatgagctaactactaccgcgtcttgtgagtccttaagcattaagcgatgcccaggcggccacgtttatcatatagactctcgttatctacccccactcgcatctgtcctcttataaaaatatagccagtaggcgatgaaatatgagtactctcgtccccttaccacagcaatgttatgagttatgaagttacgctgtgtctactccaggtcagtctagaaaatatcacctaagttcccagtagacaaacacctccttctgctgtaagagagcataggcgcgcatataagtgacgaagcctgctgttgactgcatttcgcaataaagaataaagaaaagataagtcttgatcgattaccgtagcgaccctcgaagagggagggccgctgggtcccccaattcggcagtacacatgntgtctcactacgtagctatggttnataaacaagggggataagaaggccg

SEQ ID NO: 1046 - DNA, 1502 bp, Glycine max
  misc_feature (9)..(13): n is a, c, g, or t
  misc_feature (26)..(26): n is a, c, g, or t
  misc_feature (32)..(32): n is a, c, g, or t
  misc_feature (57)..(57): n is a, c, g, or t
  misc_feature (308)..(308): n is a, c, g, or t
  misc_feature (403)..(403): n is a, c, g, or t
  misc_feature (462)..(462): n is a, c, g, or t
  misc_feature (689)..(689): n is a, c, g, or t
  misc_feature (763)..(763): n is a, c, g, or t
  misc_feature (810)..(810): n is a, c, g, or t
  misc_feature (829)..(829): n is a, c, g, or t
  misc_feature (1158)..(1158): n is a, c, g, or t
  misc_feature (1244)..(1244): n is a, c, g, or t
  misc_feature (1297)..(1297): n is a, c, g, or t
  misc_feature (1332)..(1332): n is a, c, g, or t
  misc_feature (1372)..(1372): n is a, c, g, or t
  misc_feature (1404)..(1404): n is a, c, g, or t
  misc_feature (1442)..(1442): n is a, c, g, or t
  Probeset Number=SeqID_10825
ttattggtnnnnntattattaattcncttagncgagggagagagaacggccagagtnatatactctaaataaattatgatatatagcaagggggatgtctacctcttccgctggcggggacgcgccgcctccgccaatctacgcagaggagactacaccaccgcctcgcgggaggaaagaagtaggaacatcctatagtgtatgtcttctctatctactatgttcaagatattctcatcttgattgatgctttctgtgtttggctttactactcctatccgcgtcattcttcacgtctatcataacgngtctcgctcgtattggttggattcagtcgaagagcatactatagcacgcacagccgtctgcagtatcatctcacgtcaggagtactatatcaagnctactgtagtgcgtatgcgacgaacaaaacgaacagagtgcaccttacatagtatcccntgcacactctcgcatatccctctactggtatatctgacaagctacgcaactcatgacgtgcggctgtgagctaacactccacaaagtgcattctttgtgcgtagactgagcagtagagagtttagctaatcatctaagagaggtcaaatgatgtaggctctgccgtgagcactcactcgtctagctatgggacgctacattccatagaggtctcatctggatgatanactctcgttattgcacatgtcatggacaatagatatgaagctactagtacactcatcataactgatactaacancatagaatacacttaaagaatataaatagatatctacagacactacncctcactctatcatcttcntcctctctacctctactacattggtggcttgaggcggagtgtctagataggctctccatgcggagcgcgccgcgccataccggtactagcatgttatggtgtactgtctgagacgtgagaggtatggtgcgcatactaacactccactcacttcgctctctgctcctgtatgtgctccttctgccaacaacacatcatgagcgccatatccattcatactactaggtacctctgggagaaataatatgagaggtactctagctggatgccagcgccgcgcaccccccagctcgcctctctcatcatatcgtgacagcgtgtatctggtnctcttctgttgtagtggagtataagctccctcacatacactgttgttcggctctagaaggagccactgcgaataaggtatagacgnatgagctattaggtgttgtagagagataccgttatgtctattggctggctatntctctgatgcgcgacgccgcattcccgtacttctnactccagtacatctggcgtcatggagtgtatcctctcctntctatcgcacgtgtatgatctcgatgcacaangctacacaccgtgcgtgcgcgctcgtatctgctgtcgnggactatctgctacggtagtgcgcaatgtgtatatatcactcgctcgacatcactctccg

SEQ ID NO: 1047 - DNA, 1368 bp, Glycine max
  misc_feature (55)..(55): n is a, c, g, or t
  misc_feature (77)..(78): n is a, c, g, or t
  misc_feature (80)..(80): n is a, c, g, or t
  misc_feature (128)..(128): n is a, c, g, or t
  misc_feature (145)..(145): n is a, c, g, or t
  misc_feature (151)..(151): n is a, c, g, or t
  misc_feature (237)..(237): n is a, c, g, or t
  misc_feature (324)..(324): n is a, c, g, or t
  misc_feature (461)..(461): n is a, c, g, or t
  misc_feature (463)..(463): n is a, c, g, or t
  misc_feature (469)..(469): n is a, c, g, or t
  misc_feature (733)..(733): n is a, c, g, or t
  misc_feature (735)..(735): n is a, c, g, or t
  misc_feature (809)..(809): n is a, c, g, or t
  misc_feature (812)..(812): n is a, c, g, or t
  misc_feature (818)..(818): n is a, c, g, or t
  misc_feature (820)..(820): n is a, c, g, or t
  misc_feature (827)..(827): n is a, c, g, or t
  misc_feature (833)..(833): n is a, c, g, or t
  misc_feature (839)..(839): n is a, c, g, or t
  misc_feature (842)..(842): n is a, c, g, or t
  misc_feature (870)..(870): n is a, c, g, or t
  misc_feature (1002)..(1002): n is a, c, g, or t
  misc_feature (1010)..(1010): n is a, c, g, or t
  misc_feature (1034)..(1034): n is a, c, g, or t
  misc_feature (1078)..(1078): n is a, c, g, or t
  misc_feature (1080)..(1080): n is a, c, g, or t
  misc_feature (1099)..(1099): n is a, c, g, or t
  misc_feature (1101)..(1101): n is a, c, g, or t
  misc_feature (1134)..(1134): n is a, c, g, or t
  misc_feature (1141)..(1141): n is a, c, g, or t
  misc_feature (1143)..(1143): n is a, c, g, or t
  misc_feature (1146)..(1146): n is a, c, g, or t
  misc_feature (1148)..(1148): n is a, c, g, or t
  misc_feature (1150)..(1150): n is a, c, g, or t
  misc_feature (1169)..(1169): n is a, c, g, or t
  misc_feature (1183)..(1183): n is a, c, g, or t
  misc_feature (1197)..(1197): n is a, c, g, or t
  misc_feature (1214)..(1214): n is a, c, g, or t
  misc_feature (1231)..(1231): n is a, c, g, or t
  misc_feature (1235)..(1235): n is a, c, g, or t
  misc_feature (1238)..(1238): n is a, c, g, or t
  misc_feature (1281)..(1281): n is a, c, g, or t
  misc_feature (1313)..(1313): n is a, c, g, or t
  misc_feature (1331)..(1331): n is a, c, g, or t
  misc_feature (1338)..(1338): n is a, c, g, or t
  Peptide Sequence Number=SeqID_9236
  Probeset Number=SeqID_10826
ttggggtggtgttcctgctcgcgcctcggtgcccgcgcgggcgtatattattcangcggcgacaaggggatgtaagnngnggacgactatatgggtagcgagagcgcgcgccccctcgtaggaggggnactttcccctcacatancaaagntatgatcattcaatcttatcatgttttcccccccaatacacagtcatagtcgcggtagacgcatcgactatgtttcaagtgaatcncgagcatgcagagatcgagcattgttgttatctccacgcgtagaaccttaggtacctcgggtcctgttgtcctatcgccaggcatgngctctgatgcgtctagacgtattaggatatcgtgaggaacctcgcactatctctcggttggcaacaaatagaagacaaaagtcctccagaatcggtaacgtatctcttcagtggccgaaacgatcgacgatgatgtnancacgcntcttccgctgtcggtctatctgagggcaacgtacgacacacacaattacctacatacgtgtctatactacagagaccggtgaatgcgtcgcgttcctctacacccaggagtaaggtgggatctggagagaaccactggccgctttcagaagaccatacaaggtatttcttatcataaggccttgaggaagcgatatagagagtgggcagtgtagattttatttgtagggtatgaaataaaaagaaggtatcccttgtaatttananttataaaaaaccaacacccaggcacagtcacgttctggagtggggtgaagttgtattgatgttatgcggggaanaanccccgnangaggacncacaanacgaancanaaatctccgcaagaatgatacctttgantgcgtacactcaatatggaatcggacacgtgaagggaaaaagagaggagtcagtgatatactaaaacattgcactctgtgcgcatgtatacgagctcatagtggaatctgcccgatcgctatcaaccaactntagtgcantgagaaccacacccctcttgaganagtcgcgcggcagctatctctgcccacaatataaagcgacgtgngngtggaccgtacaccatatnanatatgtcgggtcgtcacggcgtggagatatagnatcgtcncntgntngngtgtcgggtcactccgcgnaagacgtctacgtnacccacagcgacgncgacatctatacgtagngtcacgcgaccgacgcntgancgnccaccgcgaccacgacggcaaaagtaccagtaaatagaccacnttgatagcggctagctcgtcgattatcagcangaaagacgaagtcgcttnacacctnctatctcacgacatatcgctcagtctacag

SEQ ID NO: 1048 - DNA, 634 bp, Glycine max
  misc_feature (627)..(627): n is a, c, g, or t
  misc_feature (634)..(634): n is a, c, g, or t
  Probeset Number=SeqID_10827
tcgagtcagctacgtaggcccccccccccccaaaatcaaaagatcaaaaaagaaatttcgaactttcacaaaaaaacttatggatgaaccaactttattgaaaacaacagctgaagaacgtgaatatggagttgactatgaaaaaatcgaacaacaatatcattttgtcccaatcacaaaatcagtcccaaatatggaattagaggatcttcagtcggctttagataaagatgatcgtactgtaacaaatgactttacctctaacaatatcagcagtaatgataaaatagacgccatctacttaccctatgattttattactccctctcaaaaccatgcgatccctgctgctgatgaacttagacttcgtactattgctggtgaaatgatcaccgaagctggctattcccttcgtcttccttggtatgctaccatcaccgctcaagccatcttccaacgcttctattatagagtttcatttgttgattatgatattaaagaaagtataatggcttgtctctttatagccacaaaaatcgaagaagctccaagaaaactcagagatattgtcacagtctgctatcatgtattcaaggtcaaggaaggagcccaatctcctgttcctgncttgagn

SEQ ID NO: 1049 - DNA, 416 bp, Glycine max
  Peptide Sequence Number=SeqID_9237
  Probeset Number=SeqID_10828
tttgattttgggaagacaaaggtctgacaaggatgagaatgggataccagattacaacggtggaggctcggacatggatctgctcatgctctcaacgggaatactggatgttctcgaagctttgccatacacacgtgctacttttggcacttgcgtgggctccagtttgtgtcaatgcaatttgcatctgtcagcggattatggcgagcttggttattggcctacagggtgctccaccgatggtgaaaatacctcacaggatgatgttggatattattctgcaaactttgggcctaccggtggctgagtatcgaagcaaaatgtgacagtggcatgatgtggatgactataatttccatacaccaacattatcttttggagataaaatagccgtatggctattacatgagaccatg

SEQ ID NO: 1050 - DNA, 322 bp, Glycine max
  Probeset Number=SeqID_10829
gcttcccttactttttaggcatgacttcaatcatataagtgtttaggctgtaactgggttggtgcacacatcaatagctcacctaagtatgtcttaaaaggttttcaggttgttaatatcagtggggatactcaagagcctactagtacttcgtcataccattgcaatattatgaggcacatacccctagattcaattgatccatccttagctattggattttactgccgagacaaagatgattttcgatgatttactgctcaccaagcttgcaaagctcgcagaagaatcaaatggtgcaccattgcttcctgtatctcag

SEQ ID NO: 1051 - DNA, 369 bp, Glycine max
  misc_feature (95)..(96): n is a, c, g, or t
  misc_feature (177)..(177): n is a, c, g, or t
  misc_feature (221)..(221): n is a, c, g, or t
  misc_feature (313)..(313): n is a, c, g, or t
  Peptide Sequence Number=SeqID_9238
  Probeset Number=SeqID_10830
agattttcagatctcggcgtttcttccaagttgactcagtgggagtcctcctccttagtcggtgtgactttcggcggagattggtaggtttctcnngttctccggaagcatcgttttcatcctgggccctacatcccagcgccggcgatggatctccggtctcgtccggtgtttgcngttccggttatcgttgctgtcatcgggtccgctttcagtgtatnttggcgttggagcgagtatcgagtccggtggtggcggtttgtttacatccgccgcctaccacattgaagctgtgcctttccacttcaatgtnatctcttcttctcctctgtcctctgtgaacctgagttgcgatgccttggcctgctc

SEQ ID NO: 1052 - DNA, 490 bp, Glycine max
  Probeset Number=SeqID_10831
attgatcgatgaagaccacaatgcgcgtgttgccgactttggtctatctataatgggccctgtagatagcggcacaccactctcagagctgccggcagggacacttgggtaccttgaccctgagtactaccgtctccactacttgacgacaaagtcggatgtctacagctttggagttgttcttctagaaatcctaagtggcaggaaagccattgacatgcagcttgaggagggcaatattgttgaatgggcagccccgttgatcaaagctggggacatttctggcatccttgatccagctttgtctcctccctctgacctggaggctctgaagaagattgcagctgtggcatgcaagtgtgtgagaatgcgaggcaaagaccggccttccatggacaaggtgacaacatctctagagcgcgcacttgcgctgctgatgggcagcccatgcctggagcaaacccattctgccaactgaagttgttctccg

SEQ ID NO: 1053 - DNA, 1600 bp, Glycine max
  misc_feature (197)..(248): n is a, c, g, or t
  misc_feature (1559)..(1600): n is a, c, g, or t
  Peptide Sequence Number=SeqID_9239
  Probeset Number=SeqID_10832
cttacaagattttattgtgtaaggtggtggtgggagaggtattttggttagatatatctattagcaaagattattcaatttttttatacttctcttctttacatcattttcacccctacatcatcacgtcccggagtctcacccatggctgcctcatccacaatcaacaacttcttctctttcttcttacccacaannnnnnnnnnnnnnnnnnnnnnnnnnnnnnnnnnnnnnnnnnnnnnnnnnnntcctatgaacccttcttctcagacccacaaaccctcctcgcagcccgctaattgcccaatacacattgtttccgtgctcatcctcatcactctcattcttggttgccacatccaccatcaacaacttcctctctttcttcttacgcacaaaaccaccaccaccaccctctccaccgcagttcagccccaccactactcagaaccagaaaccctcctcctcacagcccctaattgcccaatacaacaccccctcgccttcaccgctcttgcgcgttcttcttctgagttgtcctctgttatatgcccatccatggcgtactccaacactgctcttcttccggtcgccgtacaacgtgcaggtggtggtggccgaggacgagtccgaggagaagctcctgggcaggttccgcagagaggtgatcaaggccggcatcgttcaggagtgtaggaggagacggtatttcgagaacaaacatgaagagaaaaaacgcaagtcgcgcgaggctgccagatgtaaccgcaaaaggcggcccatgtcaaaaactgtaggacagaagaagcaggatgtctcagcaaccaaaagagaagacgatgaggataactgggatctacctgaaggagacactctgaattaacccttcgattttcataagttgtagtgaactttgcatttactgatcatattgataattaagtaagatcagttccaacgaactttcaatttcaactaaggccagatgaaatgaaaccaacttatttcctgtagatcctgcttgtgatgtggcacttgccatcaaagccgtagcctccaattctccaattgtacccacagagccctccttacttcctcgtaataaacttatccagtgatcctttttcgcgggagagttgtcacttgtgtagagatgtattgggggaatgtctattgttcatgccattgcttgcattttctacaattctatttatgaagtagcaaatttttctattgagcttcccagttataactttgacatcaatgtccatttggcctcccatatctagttagtaaagatctcaaatattacatttctctggttaagacagactccatttgaacctatcctgaaggagacactctgtattaacccttcgattccctaagttctggttttctttgatttcactgcatataagttttgttaagtaagttgtgttccttacttggtgcattttcaactgtgtagaatttaatatgatgtaatttgcttgtttgtacatccatattttgttatgcccttggttctatgaaatcttgcattaacttcttttttnnnnnnnnnnnnnnnnnnnnnnnnnnnnnnnnnnnnnnnnnn

SEQ ID NO: 1054 - DNA, 644 bp, Glycine max
  misc_feature (644)..(644): n is a, c, g, or t
  Peptide Sequence Number=SeqID_9240
  Probeset Number=SeqID_10833
tcgagtcagctacgtaggccccccccccatcatataatataaaaaacattactctttacaacaaactattcttactcaaaatggatcctgaattacaaggcgaccaaaacaaagaattcaagccttcttatgatgttgaagtcacaagagaggaagctcctgaattaagagaaactcatcaagattttagccaattggcaaaagaagaagctgaatttgacaagcaagacatgcaagaaggaggcttcgaaaatgattatgcctcaacaggggaacatttgactaaatcaggagaacctgataagagattcaaggaaaatcaatctggagaatcatatcaagaacaaaaccaaggacaatccagaggaaataatcaaagtgataacagaaactatgatagaaatgagcaagataacaggaataatcaacaaagtgagcatttaactaaagctggagaacctgatatgagatttaaagagaaccaagaagcttatggacaatcataaagacgtttttgaaagtgttttatgcctttattttgatagtactagattattcatatagtaaaataaacagaagatatatacatatgttactctgtgttttgtagataaaataaaaagcaaaaaaaaaaaaaaaaaaan

SEQ ID NO: 1055 - DNA, 1636 bp, Glycine max
  misc_feature (1)..(1): n is a, c, g, or t
  misc_feature (22)..(22): n is a, c, g, or t
  misc_feature (25)..(25): n is a, c, g, or t
  misc_feature (27)..(27): n is a, c, g, or t
  misc_feature (29)..(29): n is a, c, g, or t
  misc_feature (32)..(32): n is a, c, g, or t
  misc_feature (34)..(34): n is a, c, g, or t
  misc_feature (44)..(44): n is a, c, g, or t
  misc_feature (46)..(46): n is a, c, g, or t
  misc_feature (50)..(50): n is a, c, g, or t
  misc_feature (54)..(54): n is a, c, g, or t
  misc_feature (90)..(90): n is a, c, g, or t
  misc_feature (92)..(92): n is a, c, g, or t
  misc_feature (94)..(94): n is a, c, g, or t
  misc_feature (104)..(105): n is a, c, g, or t
  misc_feature (108)..(108): n is a, c, g, or t
  misc_feature (112)..(112): n is a, c, g, or t
  misc_feature (121)..(121): n is a, c, g, or t
  misc_feature (124)..(124): n is a, c, g, or t
  misc_feature (126)..(126): n is a, c, g, or t
  misc_feature (131)..(131): n is a, c, g, or t
  misc_feature (143)..(144): n is a, c, g, or t
  misc_feature (147)..(147): n is a, c, g, or t
  misc_feature (152)..(152): n is a, c, g, or t
  misc_feature (183)..(183): n is a, c, g, or t
  misc_feature (192)..(192): n is a, c, g, or t
  misc_feature (278)..(278): n is a, c, g, or t
  misc_feature (331)..(331): n is a, c, g, or t
  misc_feature (334)..(334): n is a, c, g, or t
  misc_feature (357)..(357): n is a, c, g, or t
  misc_feature (368)..(368): n is a, c, g, or t
  misc_feature (415)..(415): n is a, c, g, or t
  misc_feature (482)..(482): n is a, c, g, or t
  misc_feature (488)..(488): n is a, c, g, or t
  misc_feature (494)..(494): n is a, c, g, or t
  misc_feature (517)..(517): n is a, c, g, or t
  misc_feature (537)..(537): n is a, c, g, or t
  misc_feature (586)..(586): n is a, c, g, or t
  misc_feature (653)..(653): n is a, c, g, or t
  misc_feature (660)..(660): n is a, c, g, or t
  misc_feature (668)..(668): n is a, c, g, or t
  misc_feature (722)..(722): n is a, c, g, or t
  misc_feature (763)..(763): n is a, c, g, or t
  misc_feature (804)..(804): n is a, c, g, or t
  misc_feature (871)..(871): n is a, c, g, or t
  misc_feature (877)..(877): n is a, c, g, or t
  misc_feature (882)..(882): n is a, c, g, or t
  misc_feature (989)..(989): n is a, c, g, or t
  misc_feature (1084)..(1084): n is a, c, g, or t
  misc_feature (1086)..(1086): n is a, c, g, or t
  misc_feature (1092)..(1092): n is a, c, g, or t
  misc_feature (1098)..(1098): n is a, c, g, or t
  misc_feature (1149)..(1149): n is a, c, g, or t
  misc_feature (1169)..(1169): n is a, c, g, or t
  misc_feature (1207)..(1207): n is a, c, g, or t
  misc_feature (1281)..(1281): n is a, c, g, or t
  misc_feature (1305)..(1305): n is a, c, g, or t
  misc_feature (1399)..(1399): n is a, c, g, or t
  misc_feature (1416)..(1416): n is a, c, g, or t
  misc_feature (1418)..(1418): n is a, c, g, or t
  misc_feature (1420)..(1420): n is a, c, g, or t
  misc_feature (1422)..(1422): n is a, c, g, or t
  misc_feature (1431)..(1431): n is a, c, g, or t
  misc_feature (1441)..(1441): n is a, c, g, or t
  misc_feature (1448)..(1448): n is a, c, g, or t
  misc_feature (1460)..(1460): n is a, c, g, or t
  misc_feature (1481)..(1481): n is a, c, g, or t
  misc_feature (1546)..(1546): n is a, c, g, or t
  misc_feature (1561)..(1561): n is a, c, g, or t
  misc_feature (1622)..(1622): n is a, c, g, or t
  misc_feature (1628)..(1628): n is a, c, g, or t
  misc_feature (1636)..(1636): n is a, c, g, or t
  Probeset Number=SeqID_10834
ntttgggatgtttgtggtgggngtnantngtngnacgaacaagnangagngcgngcgaggtggtatatagagcacgattacgtaatagantnancacatcacgnngancgcngggtcgctnccngncggcncgcggacctgannagntatanctctctaatacggatacagctatgcatactnaggagcacnacggcgtctgctgatccacgtcacgagagagatgcatgcactagccacacactcaaccaacgcgcgtctgcgactgtgtgttcgtnctgtcgacactgacgcgcgtactgtcgtcgcgtcgcgacggtcgctgcgactntantacacgacatctctaatatatangcagatgtatntgtatagacgcttcgtctgtcgtctatgagtcgttctactatcctgntcacactacgaattaggatcacagatgagtatgacgacagatagtgatgcgtcgtaaatgatggatnctatcntcatcnctcacatcacgacgcatctactngcgacatgcgtccgcaatgncacacgtcagcgccgcctctcgcccatcgtgtcactcgtacagctgatnatgatgatactgtctgtgcacatatgtgacgcctgtcgacgcttgtattcctatgctgtcattgtgncactgtngtatctgnttatgatgttctgcatgaaaatgagtactcgtctcgactatgtcgtcggtgtgntacgtctgcgtctcatctgacacaactaacgatccagtgcntgtgcgtgcctgacgtctgtacatgtgtactctgtgttacngtggtccgacattccatgttatataccaatcgagagcgagctcattgcatcgctcgtctatataagnaggganctgtnggtgtcgatgtgtatcgacgatcattcgactactcgacatagcgctccatctctcgactccactcttccagcgctaccatcagatacagagttgatgatcatactcnatgagtatcactatccacatctgatccacgtagagtgaagatactgcacgttgataggacggggtatcagagacgagatgagtaaagtagacaananccaccncgcacntcatccgcactccgctgtgcacgagtgatcgactgatcctctacatcctcnccacatactcactcactgcnatgactctcatgcgtagtgagtgctagagtatgttagntgttcctacgacgcgacagtcgtaccctatacgtaatactctgtactcgatcgcgtctctcgtgtcacgtcganttgatagctcagtcatcgcgttcncgctgcgtacgtgactcgtagatacgacatctatacacatcactagacatctatgtgacgcatagtatcatgtcatgactcgtcgatcgtcttnctacgcgatgactgacncntncncatctcgcntagctattcntgacgtnctcgtagcatangctatagacgtgtatcgtgtngacagtgctgatgtagctagcggtcgctgatgagcacggcaagcaccgtgatgtctcgtcatgtngctactcactctccnattctcgtctctcgtagtgaagctagcactgtacgcaacagccgtcgtatctctacggtgntgtcgngctacagn

SEQ ID NO: 1056 - DNA, 491 bp, Glycine max
  Peptide Sequence Number=SeqID_9241
  Probeset Number=SeqID_10835
aagaccgatcgcagtcaaaggacaggttgtcattcgtccaatgatgtacattgctctcacttatgaccatcgtttggttgatggacgagaagctgttatgttcctacgcaaaattaaagcagccgtcgaagatccacgaatcgttttagctggtctctaagccaattttctcgtcttattttctttttctttcgattgtgtcaaacagctggaaatcaatacacacattcatatccaaaatgtggcttcttcccacgataacataaacacaaaaaacagcaacaacaacaaaaatgaataacgcgtcgttttagaaatattaaatcaaattgcaccaggacaacaaacgaatacaactctcattatagaggcgaatttggattgtaaaacatctactcactttcattgtttgcgtaatattcggaaataattttatttgcaagagtcttgtaataaatgtttaaaaaaaattaaataaaaaagaatgtctt

SEQ ID NO: 1057 - DNA, 1506 bp, Glycine max
  misc_feature (103)..(103): n is a, c, g, or t
  misc_feature (246)..(246): n is a, c, g, or t
  misc_feature (271)..(271): n is a, c, g, or t
  misc_feature (273)..(273): n is a, c, g, or t
  misc_feature (453)..(453): n is a, c, g, or t
  misc_feature (562)..(562): n is a, c, g, or t
  misc_feature (592)..(594): n is a, c, g, or t
  misc_feature (945)..(945): n is a, c, g, or t
  misc_feature (974)..(974): n is a, c, g, or t
  misc_feature (1134)..(1134): n is a, c, g, or t
  misc_feature (1280)..(1280): n is a, c, g, or t
  misc_feature (1285)..(1285): n is a, c, g, or t
  misc_feature (1317)..(1317): n is a, c, g, or t
  misc_feature (1320)..(1320): n is a, c, g, or t
  misc_feature (1362)..(1362): n is a, c, g, or t
  misc_feature (1402)..(1402): n is a, c, g, or t
  misc_feature (1410)..(1410): n is a, c, g, or t
  misc_feature (1412)..(1412): n is a, c, g, or t
  misc_feature (1418)..(1420): n is a, c, g, or t
  misc_feature (1434)..(1434): n is a, c, g, or t
  misc_feature (1473)..(1473): n is a, c, g, or t
  misc_feature (1478)..(1478): n is a, c, g, or t
  misc_feature (1485)..(1486): n is a, c, g, or t
  Peptide Sequence Number=SeqID_9242
  Probeset Number=SeqID_10836
ggcgatgagagcgcagtgggagatggtatgtgcgagagtaccgagacgcgccgcgcgagcgtctagtacgatattacttagcgcgatgcatggtatgagacancgactttcatagctacatagaagtgtgtgagtgtgtgtattcatacgtctgagtagattacattctagtcgtatcaatactatcgccacgagtctcatgcagacgtagattagtgtataacgtggatgaagatagacgagtanggagaagtgtgaatatagcgatgcntntagtgagtgtcggagagcaaccgtacggcgcacgtctctgtaatattctcgtatatgtggaagtatgatgaatggcgtatattgaatgtatcataatgttacgctggctgactgagatgcgggtaggcgagtatagcgatgatgatgtgaagtagagatgtgccgtgtgacgagagtgangggcagtctggttggtgtgtgacgatattaggtgatgtggtgtggtgttcgcgaggtgcgtcttttgcatatctcctatatatattcttcataagtatcataatgttanctacgtgttgaagtgttgttgatgattatnnnattcaagagtacgtcctctaattcaccacgagtaattacataggtgcgctctcggcgcgatgactatagctgagttattgtctcgtcgcgtgtggtgtgggtgtggtaggtggtggtttgttctcataatatttttcattatatgtgtaatatagaccatcactcaatctaccttcatacattccacgcgagtcactcgtccgtctcagtgtctatcatgaactcgagcacgacgcacatagagatacttgtcaccgaattgggagaagtagcgggaggtgagtgctgtggggcggtgggtgcgcgcgcagctacgcggtgagtgggtggagggcagcgagagcgtgatgnagagaggagagtggaacgcgagcgaaganagagaggagtgtgggagagacagacggcaggccgcggacgtcagtgggagataggtggtggttgtccaacgaggaggaggaacgtacagaacgcattggctgtggaggtgtgtgggtgagaatcgatgtttgcgacgtgttagtacgttagtggtttgtnggggtgactgtgaggcgattatgggttagtgttattgtggcatggcactagatggttgtgtagacatacagattacacatacttaggcgtgtgcacagagagatatagttgtagtgttgcgcgtgtgctgatgggtggtgcgtagnatagnatgcagggcgctaactatgtcgttgagagggnggnttatatttgtagatggtgtgtgggagcgctgagtcgagcgangaagaactcgtgttggagaggtgggggaccgatacccccncaccatcncnccctcnnnggaggagaagggangttgtgtgtgtgtgctttgtcgttgttggagcggtgtanttttnttttttnntttactcatacaaatctcta

SEQ ID NO: 1058 - DNA, 632 bp, Glycine max
  misc_feature (603)..(603): n is a, c, g, or t
  misc_feature (632)..(632): n is a, c, g, or t
  Probeset Number=SeqID_10837
agttaaacctctggacttcagcatgaacgaaaacctgttcgaacgaatgttgtgctccttcaaggtttctagtgatcttccaatttcgctccttcaacactccggacccaatgcttgttagtggcccgtctcctggcgttcaaccattctctcctctcctcgctcctatgaattagcacggaatttcggttctcgagttcccaggggatcccccgtaaccctttttttttttcttttttgtttttgccccccgctgggcaaggctcaaggcccccgttacgggtaatgccaagttgaagcccggaccaattgttggagtgtcgcgccaaaccccccggtttcttttaaaagggccctgttgccaggccacgttgccgaaatgctctggccccttccccgaaaaaaaaaaaggtttttaaaaaaaaatcacctcgcgtggcgaggcggattctaaaccgaatggtttaattcacccccctgtccccgcttggcacaaaatatgtcatattattgagacggacactccgcgcaagctcacaacccgccttcggagtggtacgtcttagaggggagggcacacatgcgaccttcttttacagcaangcggggctggaacccccccggtgtcggan

SEQ ID NO: 1059 - DNA, 622 bp, Glycine max
  misc_feature (606)..(606): n is a, c, g, or t
  misc_feature (622)..(622): n is a, c, g, or t
  Peptide Sequence Number=SeqID_9243
  Probeset Number=SeqID_10838
tcagctacgtaggccccccccccaaagtgacaccggaagtctggaaaatttgaatgaaatcgacgagaaaaatgcggattcgaattatattggacaacgtttggccaaagtaccagcagcaaacaataaggattataacactacgtccgtgtatgaatcgccaaaattgcgatacgcaaacaattactcgaatcagccatctgatgaatatgagaataatgatgttgaattgtatttggattcgaatagtcgtagcagcggcgaattggccgacacggaattggaattgaatcagcaaaggcgttattcacggcattttacgctgtcgcccgaaacaacggattacgattcaaattgtggtgatttagatagtttatcaaatgatttgaatggttgcattggcatgaacagccattgcctatccggatcgggtttgaatagttccaatgcgattataccagactattcgcgactgtacacaagcatgccagtgcttgaagatggtttgtctagtggccatgcatctgacacggagaataacaatccagttccatattcgttgaatagtgtatcagcagtggcagcagtagcagcagcagcaactgnaccaacgacgacgacn

SEQ ID NO: 1060 - DNA, 470 bp, Glycine max
  misc_feature (105)..(105): n is a, c, g, or t
  Peptide Sequence Number=SeqID_9244
  Probeset Number=SeqID_10839
atccagccactgtgttcaagctaaggagagtcgccatgggaagaagaccggctaggtgttaccgtcagatcaagggcaagccctaccctaaatcacgctactgcngtggtgtcccggatcccaaaataaggatctacgatgtcgggatgaagaagaaaggtgtcgacgagttccctttctgcgtgcacttggtctcgtgggagaaggagaacgtctccagcgaagcgctcgaagctgcgcgtatcgcttgcaacaagtacatggtgaagtccgcggggaaagatgcttttcatttgaggattagggttcacccgttccatgttctgaggatcaacaagatgctttcgtgtgccggagctgataggctccagactggtatgagaggcgctttcggaaaggctttggggacttgtgctagggttgcgattggtcaggtgcttttgtctgtgaggtgtaaggatgctcatggt

SEQ ID NO: 1061 - DNA, 586 bp, Glycine max
  Peptide Sequence Number=SeqID_9245
  Probeset Number=SeqID_10840
ttcgtcccaataaagttctcaaaagtgcaaactagtttatcactaagagaaccaattaatggagaaaatgagagtggtactaattactctattgttgtttataggtggagaagttgcagaaaaagtaggtaatggcaaagttgccaataatcctgaagaagatgctagtgatggcgaagccattaatcttgtagaagaagctgatggtattggagatgccgttactcctgcagaaggcaaagccactaatcttcaagcgtatgagtaagctagatgctgagaggttgtgtcaccttgcaattcacctggggctcagagatgcattggaaatgaggcgttgcatcagcgggagaggaggcgtggaatgaacgggcctcgtgctacgacatgttgcatttttgattctatgaggaaatgcttgggagactctgaaggcagacttgtatagacgcaccgagctcccatgtcggctattggcttcctcacaggaatgttccaaatcctcagtaagactgtaaaatgcagaattgtcttcgaaaccgacgctcgtgttaatgacgagcttacggtgaactgctgctaacgg

SEQ ID NO: 1062 - DNA, 503 bp, Glycine max
  Peptide Sequence Number=SeqID_9246
  Probeset Number=SeqID_10841
taataaaaagtggctcggcggtatgttaacgaattggtatactacaaaaacccgccttcaaaagttcagggacttgagaatccaccaaaagacggggagactcaatagttttccaaaaaaagatccccctatattgaagagccctttagctcttttggaaacatatcttggcggccttaaatatatgccggggttccctgatattgtaataatcgtcgacccccaaaaaaaatatccggcttttcgaaaatgtataactttggaaattccccccatttgtttaatcgatccaaattgtgccccggccctccccgatatttcaattcccgctaatgatgatgctataccccccattcgattaatttttaccaaattagtttttcccatttgtgagggccgttccccccatatacgaaatttttgtttaataataaaataaaaaaatttttggatttagttggaggggttcatagatttagggaatcgattcctatcctagtaat

SEQ ID NO: 1063 - DNA, 1039 bp, Glycine max
  Peptide Sequence Number=SeqID_9247
  Probeset Number=SeqID_10842
tcgagtcagctacgtaggcccccccccctttttttaactatacaatccaggaaggaagtcactgtcacttggtgagatcgatggcccgcgtcgccgccgtcctcgttgctctcctcgccctctttgccgtcgcggccacggcgcaggcccctgccgcgtcgcccaagcgcgccccagcccctgcgccacccaagatggcccctctcccgccgccgccgaccagggcccccatggcctccccgccctcgcctcccacgatgtcgccggcgtccgccccctccgccgacgctccagccatgagccccgccggtgcgcgatctgccgacgcgatggccccggcgggagcctccgctctgactccggccgccgcccccctcacgcacaagaccaccgccgcatctgcctccgccatcaccttcgtcgccatccccccccccctggctcccgccgcccccgccttcctctcatccggccgcggttcggacgcgctccacctgcccctgccacctgaaccccctcctgcatgccgtcctcaaaccgcccctccgctctgcccccggctttaacgaatccattcgcctactcccccttatctcgattcagctcgtcacacttctcacggtcctgtaaacccacaacatctcaagggatccgcgtcaacctcctaactccatctttcctcataactccgctaccatctgttctcctcccaaataacaccctacccctccaccctccactctcctcttcgcaccctccggccccgaacctcccctattctttatcttcacaccgtggactcactaattcgtcgcgccgctacacacacaaccttctttctcgcacccctctttacacggttatggtccactttttcctaccacatctgccagacgaatctcatctagccccacatacccctgctttttcgggtacacacaatccgccaactatcgccttcaacacaatactctcctaccaaaacctccccagcgcaactgcatccacatataaagtcctacaccctctctcttgtcca

SEQ ID NO: 1064 - DNA, 1878 bp, Glycine max
  misc_feature (11)..(11): n is a, c, g, or t
  misc_feature (13)..(19): n is a, c, g, or t
  misc_feature (41)..(41): n is a, c, g, or t
  misc_feature (43)..(43): n is a, c, g, or t
  misc_feature (45)..(45): n is a, c, g, or t
  misc_feature (49)..(49): n is a, c, g, or t
  misc_feature (58)..(58): n is a, c, g, or t
  misc_feature (68)..(68): n is a, c, g, or t
  misc_feature (89)..(89): n is a, c, g, or t
  misc_feature (98)..(99): n is a, c, g, or t
  misc_feature (113)..(113): n is a, c, g, or t
  misc_feature (127)..(127): n is a, c, g, or t
  misc_feature (134)..(134): n is a, c, g, or t
  misc_feature (160)..(160): n is a, c, g, or t
  misc_feature (177)..(177): n is a, c, g, or t
  misc_feature (212)..(212): n is a, c, g, or t
  misc_feature (231)..(231): n is a, c, g, or t
  misc_feature (291)..(291): n is a, c, g, or t
  misc_feature (349)..(350): n is a, c, g, or t
  misc_feature (408)..(408): n is a, c, g, or t
  misc_feature (639)..(639): n is a, c, g, or t
  misc_feature (765)..(765): n is a, c, g, or t
  misc_feature (828)..(828): n is a, c, g, or t
  misc_feature (932)..(932): n is a, c, g, or t
  misc_feature (1013)..(1013): n is a, c, g, or t
  misc_feature (1017)..(1017): n is a, c, g, or t
  misc_feature (1099)..(1099): n is a, c, g, or t
  misc_feature (1143)..(1143): n is a, c, g, or t
  misc_feature (1145)..(1145): n is a, c, g, or t
  misc_feature (1208)..(1208): n is a, c, g, or t
  misc_feature (1263)..(1263): n is a, c, g, or t
  misc_feature (1270)..(1270): n is a, c, g, or t
  misc_feature (1283)..(1283): n is a, c, g, or t
  misc_feature (1294)..(1294): n is a, c, g, or t
  misc_feature (1296)..(1296): n is a, c, g, or t
  misc_feature (1327)..(1327): n is a, c, g, or t
  misc_feature (1350)..(1350): n is a, c, g, or t
  misc_feature (1409)..(1409): n is a, c, g, or t
  misc_feature (1431)..(1431): n is a, c, g, or t
  misc_feature (1489)..(1489): n is a, c, g, or t
  misc_feature (1496)..(1496): n is a, c, g, or t
  misc_feature (1500)..(1500): n is a, c, g, or t
  misc_feature (1502)..(1502): n is a, c, g, or t
  misc_feature (1524)..(1524): n is a, c, g, or t
  misc_feature (1537)..(1537): n is a, c, g, or t
  misc_feature (1548)..(1548): n is a, c, g, or t
  misc_feature (1586)..(1586): n is a, c, g, or t
  misc_feature (1653)..(1653): n is a, c, g, or t
  misc_feature (1667)..(1667): n is a, c, g, or t
  misc_feature (1672)..(1672): n is a, c, g, or t
  misc_feature (1697)..(1697): n is a, c, g, or t
  misc_feature (1713)..(1713): n is a, c, g, or t
  misc_feature (1720)..(1720): n is a, c, g, or t
  misc_feature (1735)..(1735): n is a, c, g, or t
  misc_feature (1746)..(1746): n is a, c, g, or t
  misc_feature (1748)..(1748): n is a, c, g, or t
  misc_feature (1794)..(1794): n is a, c, g, or t
  misc_feature (1800)..(1800): n is a, c, g, or t
  misc_feature (1813)..(1813): n is a, c, g, or t
  misc_feature (1837)..(1837): n is a, c, g, or t
  misc_feature (1840)..(1840): n is a, c, g, or t
  misc_feature (1848)..(1848): n is a, c, g, or t
  misc_feature (1855)..(1855): n is a, c, g, or t
  Probeset Number=SeqID_10843
tggttttgggngnnnnnnnttgtgtgtggtggtggttcgtncntnctcnccgtctaanacgacacgcnccgacccgcgtagtgtgcggntgtggatgnnacgagagcgactanttatgtagagtggntactttnataatgtggcgagacgtcctctcccnctcccttgctctccccngccgcccccgcaccagtccgagtccggtagaggtngagcaggtgggtcgaacancccatacaataaaacgatgagacgcggcgatattctgttgtattcgtatatgtgtatctntatatacttccatatcattactaagacactgtcgtgccgccttgggttgaactagganngggctaaaagctgcctgctgtgctgcttctgtgcgcgcggcagatgcgtgatgggtgntcgatttgcttgtgtgaccgccgcctaccgatctgccacatattggttattgttatatgcgactggtgtgccgcgcgcgtgtgcgcgggatgagtagagggtgtgtgcgtgggctggagttgtagcagatagactcgaatttttgtagctcgctttgatttgtttgcatcttgctatgtactctgctcgcgcacgcgtcatagtcgcagcgcgatctacataggcacggtnatgatgaggcttgatacagttcgaccctgccacatagtgaggtgtagtaggctgtgcgcgtcgcggtgtgctgcgtgttggttgtcctagatggcgatggcgatgtagagaacgccgcgtcgcggngctggggcagacgcgcgtgagagtgcgaaagtagcgagacacacaccgaacacacgtcctacncagtacactgagcaatcgagtctataagtctataaccgttatactcatatcaactagataagttctcgacggacgtgtatctgtgatatagacaccgatagttnaattgagttgatgcggtatgacatgtgatgacatgtgagcatgaagcgagcagatgtacgcggcgagctgtggcagagagntgcnacgtgccgacgcgcgaagatgcacgtcgagtgatggctagtactagcggacgacagtgagatgtcgtctatgtagcgaaganggcggccagcatgacgacgtgcgcgacacctatctagtgtggcncngtgtcgataatgtgttgtgtgttctatgtcgtcagtggcactcacgctcatcactgcagcgcntcgcgtcactgtgtgatatctatgagtactgctacgtaatactgtcctgtactanccgatanacgtgagatggangatgacatacnanagtgagtaacacgcagcgcctgactgtgtgngagactgctacaccacatcgatntacaccactgcgcgcagcgactagatgacgtgagaatctgtgtcgttctgaccagagtntgtagttgtgtgtgtgatgtcngcatgggtatctatagacagtgacacctccacgcgctcacatgggagtgtagcagctnatttaanatcntnactgcgtctacatgccgcagangagtactgacgcngagacgagatngctcgacgagatcgagactatgtggcattcttatcggncgctgatgcagtggcgacgcgcgcgtgacgtgcatgtcggctgctgactatgtcactcggtcgcgcngagagcatcagctnctgtnatgcgtgcgacgatgcgctgccgcnacggtacgactgcagnaggatgngattgcactgatgtngtgggtacgcnantgtgacaactgatgcagccgtgcactgtagtcacatgattgacttnagatgntgctgctgatcgncatctcctggtgtcgtcgagtagnatnagtgctangcgaganatgataagcgacggcgcttgaca

SEQ ID NO: 1065 - DNA, 1651 bp, Glycine max
  misc_feature (21)..(21): n is a, c, g, or t
  misc_feature (24)..(24): n is a, c, g, or t
  misc_feature (267)..(267): n is a, c, g, or t
  misc_feature (686)..(686): n is a, c, g, or t
  misc_feature (1032)..(1032): n is a, c, g, or t
  misc_feature (1063)..(1063): n is a, c, g, or t
  misc_feature (1197)..(1197): n is a, c, g, or t
  misc_feature (1310)..(1310): n is a, c, g, or t
  misc_feature (1358)..(1358): n is a, c, g, or t
  misc_feature (1392)..(1392): n is a, c, g, or t
  misc_feature (1405)..(1405): n is a, c, g, or t
  misc_feature (1478)..(1478): n is a, c, g, or t
  misc_feature (1481)..(1481): n is a, c, g, or t
  misc_feature (1491)..(1491): n is a, c, g, or t
  misc_feature (1505)..(1505): n is a, c, g, or t
  misc_feature (1619)..(1619): n is a, c, g, or t
  Peptide Sequence Number=SeqID_9248
  Probeset Number=SeqID_10844
tgtgcgccctcccccagctanaantaccccaccctcactcacacctgactacacgaactatcaactctgtacctcatcgacatatgtgcgtcacagtcggcctcgcccgcatcgcaagcgtcgccacgcgctatccgctaccaagactgtcttatatctgtttgtcgcggtttgtagtgcgttatgtaaacttatgccccacttatcatatcacacgactgcgtagcacaatactctccatagtgagcgacccaatcacctcatctncagcgcaacacatcgaccttatacctgcactactccgcctcttctccacacttctcgtcttctcatcagcatacatatcacctcgtacccactctccgcgctagcacgctagtattcccttccgtgtacatcttcaccatcgccaccggcgactactctctctctcattataagcgtgatagagatcaccatctagatgcgcgcactatagtgaatctacgttcttcacgtatcctacctccacgtaggcacagtccttatgcttctacctagtcctcttcttactcacctacatcttctccagcacatatttctctgtcgtcgctgtgatcttcctatcccttcttctccatgtcaggcgcacgctacccacattcggaacacccacgcatcgcggcaacacctctcacatcctcgtntctctcctcactgctctgctgattattcacgcaccgctagtagcgcacatgttcctctatcgtcctcgacacatacactcatccacctcgcctattacaccgcctacctcatatgaacacaattcacacatcataccctatgtgctgcattaagacccatcacgttcacacccatctaatactcatcgtgcacctcgattcactcgaatcccactccatatgcgtcgtacccctctcataattcttcaaccacactctctaccatgactcactctccacccctctaccatctacatctatctaaagtacgcacgctcaatccatactgcagcaccacagcgagagncacactcatcgtcacactcaacgacgatcanctgctatctcgctacacatcaactatatcgttcgacatcatacatgcttcgatgtctactgaatcagagcgcacgcgatacagcactacgccgcacgcgatcgacgttacacgcagtagcactcacatcgaganatcgcacgacatccaccatcacgttctatctcgctagaatgtcatatcgcctacgctcacacactcactactcacatactaccacatcacactctctacaatctggtgatgtntactgactctgcactgctattcattcgtaccgacgtctatatcttcantgtctgcgcgcacacatcatgaccatcgcctctntactcacaccatncttcatctacatgcctcatcgatcactacttggctatcgtaactccctgtcgtcgctcgcgactcattccgcntcnttctcagcgntcattacgccgacntctctactgtgatctagtagcggatacaactctgcacccactatgcatcgcgacgtcaatctcccgtataatcagcgcgttctctactactacatcacttttcatgcagtactnatcatactgatcacagactatctcatcttgct

SEQ ID NO: 1066 - DNA, 320 bp, Glycine max
  misc_feature (232)..(232): n is a, c, g, or t
  Probeset Number=SeqID_10845
tcgagtcagctacgtaggcccccccccaataaaaaaaaatccacgaatgcaaacagcattaactctccccaagggtcatttcctcttcaccagtgaagccgtcaccaacggtcaccccgacaagctctgtgactacatttctgactccgttctcgatgcctgtctccaacaggaccctgattccaaagtcgcctgcgaatccgcagctaagtccaacatggtcatggtcttnggtgagattacctccaaagccgagctcaactatgaacaaatcgttcgtgaagcgatcaagaacgttggctacgactctgtagacaagg

SEQ ID NO: 1067 - DNA, 635 bp, Glycine max
  misc_feature (600)..(635): n is a, c, g, or t
  Peptide Sequence Number=SeqID_9249
  Probeset Number=SeqID_10846
aaggcccaaaacacaatggccccttttcttttttaaataacaggtaaccaaatttattttttcccccgggggcgatatttttttttttaccccagggggggtgttggggttcccacccagagggaaaagcgtcagggcaggttgtaagcacgtccttggatggggtggccaacacttactgcatggccgatcgatcgttattacccttgacattagtttttttttcccctgatgccctttttttcggggggtgacatagtgtctaggggggaggacaagggggcctggttttcttcgggagggaatcatattttgcacttaggttgtttttagttttgcactcggttgttcgtattttttcaggtggaatcacattttttttagagtactataattgctaatattaattcgtaaaggtaacgttagtttgacacgaagcacgcattcggtttaagcataccaatccttgtgtttagacaaatgcctctgtcgttagaaaagtcattgtctcacataagccgagtggccgtcatatggtgtcagaggaacagaggaatagaataaaatcagacgcgtaaacataatattccagtggttggnnnnnnnnnnnnnnnnnnnnnnnnnnnnnnnnnnnn

SEQ ID NO: 1068 - DNA, 1911 bp, Glycine max
  misc_feature (1)..(1): n is a, c, g, or t
  misc_feature (44)..(44): n is a, c, g, or t
  misc_feature (48)..(48): n is a, c, g, or t
  misc_feature (69)..(69): n is a, c, g, or t
  misc_feature (73)..(73): n is a, c, g, or t
  misc_feature (85)..(85): n is a, c, g, or t
  misc_feature (118)..(118): n is a, c, g, or t
  misc_feature (161)..(161): n is a, c, g, or t
  misc_feature (174)..(174): n is a, c, g, or t
  misc_feature (214)..(214): n is a, c, g, or t
  misc_feature (248)..(250): n is a, c, g, or t
  misc_feature (254)..(254): n is a, c, g, or t
  misc_feature (294)..(294): n is a, c, g, or t
  misc_feature (306)..(306): n is a, c, g, or t
  misc_feature (324)..(324): n is a, c, g, or t
  misc_feature (358)..(358): n is a, c, g, or t
  misc_feature (530)..(530): n is a, c, g, or t
  misc_feature (532)..(532): n is a, c, g, or t
  misc_feature (609)..(609): n is a, c, g, or t
  misc_feature (673)..(673): n is a, c, g, or t
  misc_feature (687)..(687): n is a, c, g, or t
  misc_feature (733)..(733): n is a, c, g, or t
  misc_feature (934)..(934): n is a, c, g, or t
  misc_feature (996)..(996): n is a, c, g, or t
  misc_feature (1102)..(1102): n is a, c, g, or t
  misc_feature (1528)..(1528): n is a, c, g, or t
  misc_feature (1781)..(1781): n is a, c, g, or t
  misc_feature (1885)..(1886): n is a, c, g, or t
  misc_feature (1888)..(1893): n is a, c, g, or t
  misc_feature (1897)..(1906): n is a, c, g, or t
  Probeset Number=SeqID_10847
nacgctaggcttgcacttcagcgcggacgttgattaactactangtgnagcaatcatgatccactgacntgangcatgtgtcatnatatcgacgtcatcagttatcgttatcgcacgnctggcgtggtaacgagtagtatcgtcaatcatcgcatacgacntagttgcatatantcaatgttgtccttagtgagagtagatcatcgtcgacgtnggtagtatggagttaatatagtctagacagacgnnngcgngtagtcgtagcagcagtatgatatcgtgtgaaaatacagntgtctgtactgnttttcgcgtgtcggcgcngtgccgcgggtcgtacatgcggtcgagtagcagnagagagtgatcgggtctagacatactcgagacagacgatcagcgttatccgtctcatcatatctcgtcagcgcggtgctatctctatgttcgactactgctgtatgttcattagagtctactcgcgtatgtactacaacgcatcgacacacactgtgtcttcacgtcgctcngncagtctgtcgccgactacgacgcgacagcagaagtgattacggttatgtgtggtgagaatatagttaaagtatatantatatagtgatatatagtcgatgcaggagagagtagtgcagtgcgagcgtcaagcacaacaggngatagtgtgacacncgtcgtgtagacgagacacacgtgttgtcgtcttgtgtcaatctcnttctcacacgatgagatgttctggcgcgtgctcagctcgcgctgcgtgtggttgtgatatgcggcgcgagaggacgcgagactcgactacgcggtagagatcgcggatgatatgtacgactacaccgcgcccccgcgcgcacagaccgcgactactgcgcgtcacgtgctggtgatattcagagtgagcgacaggagcacngcggcgacactcagagtctatgtcacgactatctgagtaggtgagagtcgctccgtatctantgacagtacagagctatgtacatacgcagacaacgtcacgacaaacgcagtcagtagcgagatacaaaactacgagtcgtaggggctcgattatctacgcgcggtnagtcttccgagcaataatatgtcgtgcacagagcatagttaggaacactacatgctgggtgaacacgtcgagcagtgagcgagggtacggtgaagtaggacgcggcgaatgatgatgtcatacagcagacgatagcacgcgtcgtctttgcatgcgtgttgctctaccactcgcacctgtttacaatccatatctcaccataattagagttgtgctacatggtatatcaaatatagcctataatctatgtaagatgatatagtaagctagaccactacacgtacagcgattacctgcgcgctgcgcaggtatccacaatgacgcaccgaacgtaccaacacgaggaaggtgatgccggcgcaggagggagaagcagcacaaacacgacagacggcagaggaggaggaggtggaaggtagagtatanttatgcgcagtctcccgtcactctagctgcgtgttttcccttctctcgctttcctttgggttgtatgcgtgcggcgcgcttcgcgcatcttctctctcgccccccaccgacggctcctactgatgtcctctcggcctttctcctcgttatgatcgccatcactctcttgattgtctggctacgcgcgttcagctctggtgtagtaaagatcaacaccaccgcgctgatacaaaaaaaaatttatgcgtgttgntcgccgcgctatggagaggaaaaggagccgcccgcccgcttttgtggctcttaccatacgctcccgttgttctatctgtcatcttgataaagatcatatagaannannnnnnaaannnnnnnnnnaaaaa

SEQ ID NO: 1069 - DNA, 1655 bp, Glycine max
  misc_feature (25)..(25): n is a, c, g, or t
  misc_feature (29)..(30): n is a, c, g, or t
  misc_feature (36)..(36): n is a, c, g, or t
  misc_feature (41)..(44): n is a, c, g, or t
  misc_feature (53)..(53): n is a, c, g, or t
  misc_feature (67)..(67): n is a, c, g, or t
  misc_feature (72)..(72): n is a, c, g, or t
  misc_feature (160)..(161): n is a, c, g, or t
  misc_feature (164)..(164): n is a, c, g, or t
  misc_feature (176)..(176): n is a, c, g, or t
  misc_feature (179)..(179): n is a, c, g, or t
  misc_feature (288)..(288): n is a, c, g, or t
  misc_feature (469)..(469): n is a, c, g, or t
  misc_feature (531)..(531): n is a, c, g, or t
  misc_feature (549)..(549): n is a, c, g, or t
  misc_feature (658)..(658): n is a, c, g, or t
  misc_feature (823)..(823): n is a, c, g, or t
  misc_feature (894)..(894): n is a, c, g, or t
  misc_feature (898)..(898): n is a, c, g, or t
  misc_feature (937)..(937): n is a, c, g, or t
  misc_feature (1006)..(1006): n is a, c, g, or t
  misc_feature (1008)..(1008): n is a, c, g, or t
  misc_feature (1195)..(1195): n is a, c, g, or t
  misc_feature (1206)..(1206): n is a, c, g, or t
  misc_feature (1212)..(1212): n is a, c, g, or t
  misc_feature (1214)..(1214): n is a, c, g, or t
  misc_feature (1230)..(1230): n is a, c, g, or t
  misc_feature (1309)..(1309): n is a, c, g, or t
  misc_feature (1339)..(1339): n is a, c, g, or t
  misc_feature (1341)..(1341): n is a, c, g, or t
  misc_feature (1343)..(1343): n is a, c, g, or t
  misc_feature (1347)..(1347): n is a, c, g, or t
  misc_feature (1424)..(1425): n is a, c, g, or t
  misc_feature (1535)..(1535): n is a, c, g, or t
  misc_feature (1539)..(1539): n is a, c, g, or t
  misc_feature (1561)..(1561): n is a, c, g, or t
  Peptide Sequence Number=SeqID_9265
  Probeset Number=SeqID_10848
ttgtgttgctgccccccccacggcntctnncctctntctannnnagtcactgntactggcacccggntgtgnagcgactgcgtaagtggtggagtagcctgatgacagcacgccacccacgcattcaatgagcgatggaaggttgcgctgattttaacgnncgnagagtgagaggngcngcgcggagggcgggcgagcgcggaccacgacgcgcgcatgtcgcgtatctatgtatatattgtgtgatgagtctttagctacctgccgtcgacgtagtatacagcgtcnctctatcatctaccacgcaacgataatctaacatgaacctctctctgtcgcgatgttattatctatctacaaattatacgcactcataaccaccctcgacgagcgcgtatatactgtgttgctgagaatagggataggagcatcatcacctctcacgatcaacgtcagtcgcgacgatttngtgcatctgtcatttacctatcagtgtctgtctagacagacgatgacgcgcaacaatgatgncgacgcacacacacaganctcgtgaccgagtgtgcgtctcacgatataatcggtgatgtgatgaggcatggaatggtgtatgtaactgaattttgcaagtcactattcatagatattcacgagtggncttcatgatggtatatctgtcttctctctgcgcatcgcgatcctcggttgacgatgtatcgcatgctaaagcggcgtcgcgtacgagtacgcatgtggtggcatgtgcgatgaagcgcacgaacgtcctgtgggctgtcggcagcatcggcgggctgctgtatantgtatatgatgtatgtctggatcatatcacgcgtctcgatacctcgacatcacatcgcgtcgtgctcactntacncatgatgcatgcggcggcgttggtatagtctcttggctnaccgacgaataattgtatctacctaggagtactcgccctatcgtctctctatgttacgatcatgctggngnatcggtagcgcgtggtgtgcatgcccacacacgcccatcaggagacgcagaacggtgtactgcatgtgagatagtcgcacatagatacgcggcgcgcggcacagactgcgacgaaaatgacgcacgttgatgcggagcgacagagcgcgctagacaggagtacctcagcggcgagacagtatgctgnggtgtaccgtnataatngntgactagagtgcgcangtataggtatcgtgcgcacgcattaatagctgacaagatgtgagcggcgacgcgtttggtgcaggcacacacgatgtangagagactgctcattacacgcacaccgatnangntgantaccacacgacctacagtacgaatagtattggtgagatctcgagaatctgagacactacatgactcgtgatccgatnnatgactaatgatcacatagctgtatgatttataatatgtgttgagtgtcacgtgtatcgacgtaagagttacgagtagctacagctgagtacatacatagctacgccgcngaanactatgaatcagtgcgtgattngtagtgtcgatatgagacatgtagcatttgcgcaccagcgtttcgtttgcagtgtcacggactatgtctcagcacgatgctgtagtgatcaagg

SEQ ID NO: 1070 - DNA, 591 bp, Glycine max
  misc_feature (6)..(6): n is a, c, g, or t
  misc_feature (18)..(18): n is a, c, g, or t
  misc_feature (92)..(92): n is a, c, g, or t
  misc_feature (113)..(113): n is a, c, g, or t
  Probeset Number=SeqID_10849
acactnttcttgttgatntctggtcgatcggtatttgcctctacgagttcatgtgtggaagtcttccgtttggagaagattcagaagatccncaagaaatttgcgaagaaatnttaacaaaaccagtgaaattcacttcatactgtcgagacaagaaggctagaagaatgatgaaccaattaattaatagagttcctgaagtaaggctgggaagctcctttgcttctttgaaggcccatccatggtttgaagacttcgactgggataaactcatggataaagagttgaaagcaccctatcctccacctaaacagagaatgatttcggacgaagaaataaagaagatgttggctgtcaataaaaaagtcattgatgagataaaggaggaacaaaagaatgccaaaaagtatcgcaaggaacaggcagcagatcctaattgggataaaaatttttgagaaagttattttgttctatacttatggtaaatttttaatgcctttaaataatagttttcttagtaagtattaaagtttcataatagccttaactcgcgaaaataagcggttgagtactaaaaaaaaaaaaaaaaaa

SEQ ID NO: 1071 - DNA, 911 bp, Glycine max
  misc_feature (1)..(52): n is a, c, g, or t
  Peptide Sequence Number=SeqID_9266
  Probeset Number=SeqID_10850
nnnnnnnnnnnnnnnnnnnnnnnnnnnnnnnnnnnnnnnnnnnnnnnnnnnnttgctgttcagatcatcttcttctggaccccgccgcacttctgggcgctgcgctgttccgcagcgacgactatgcgcgcgccggcatcccgatgctgccggtggtcgccggtcccgacgccacccgcctgcagatcctgctctacaccgtcgtgctggtcgcgatcgcgctggcgccatggccgctcggctatttcgacgcgatctacggcgtcacctcgctggtgctgggcgccggcatgctgtggctcgccatcgaggtttaccgtcgccgcgagggcacggttgccaaccgcgccacgcggcggctgttcgcgttctcgatcctttatctgttcgcgctgttcgccgtcctccttgccgaggtcgtggtccgcgcgatcctgcctgccttcatcggatagggacgccggggggcgagatgggggcacacgggacagcaatggacgacaagaacgaaccagacggcatcgtcctcaccgaggcgcaactcaagagccgccgccagcgttcgatcgcgattgcgctcgcgctcggcgtcatggtggtgctgttcttcgccgtcaccctggtgaaggggccggccgtgctggtgcgaccgctgtgagcgagatggcgaaccagggtgtgcagcaggctccgcaaggcgagggtgccaaggtcacgcgccgcatgctgacccgcgacgccctggtggcgtcgatctgcggcttcgtcgtggtgctgatggtcggcgcgtcctacgcggccgtgccgttctacaactggttctgccgcaccaccggcttcaacggcagcaaacaggtcgcgacgtcggcgccttttgtacaccgctcgagggggggcccggtacccaatcg

SEQ ID NO: 1072 - DNA, 201 bp, Glycine max
  misc_feature (73)..(77): n is a, c, g, or t
  Peptide Sequence Number=SeqID_9267
  Probeset Number=SeqID_10851
tatataccggtgccttggtgatagttaaacaggtgccgtggaacaatgtctgtttaccaaagcaatatttccnnnnntaaggttgatcttaagcaggctcaatacaaggacatagataagcgatactttgaccaacttatccagcttaagacaactgaaatggccaacagggatctagacagatactacagtgcacttgat

SEQ ID NO: 1073 - DNA, 1351 bp, Glycine max
  misc_feature (16)..(16): n is a, c, g, or t
  misc_feature (22)..(25): n is a, c, g, or t
  misc_feature (45)..(45): n is a, c, g, or t
  misc_feature (70)..(71): n is a, c, g, or t
  misc_feature (73)..(73): n is a, c, g, or t
  misc_feature (96)..(96): n is a, c, g, or t
  misc_feature (104)..(104): n is a, c, g, or t
  misc_feature (301)..(301): n is a, c, g, or t
  misc_feature (1120)..(1120): n is a, c, g, or t
  misc_feature (1229)..(1229): n is a, c, g, or t
  misc_feature (1309)..(1309): n is a, c, g, or t
  Peptide Sequence Number=SeqID_9268
  Probeset Number=SeqID_10852
ttttttttttcccccncccccnnnnccccccccgcctcgcggcangacccctcaggcagagaagggaganngngctaaataagagggagaggaggnagccgcgnccctcggagcgtggttttggaaagggacacaaacgaccagactatttctctgtgggtattgtcgcgacagaaggtgcagaaaaaaaagaagaaacatcgaccgaacacgcagcgcggaccctggaataaccgcagagcacggcgttttttctccccctcgaacagtataaagtccagagcgcaggaagcgcacagcnaagccacacagagcaccaacccgcacataacgtacagggtgtcgaaaacgagtaggctaggtcgataaaatagaaatctcggcacacgattgcgtggcgctatgcgtaggcaggggcgacgagagggaaccggagaaagatcacaaccacatacagcgtgacatgctaaaaaggacgtcctacgacgcgcgcataggcgcacgctctcgcgtgagggagcgggggcggcgccgggcggacgcggggagcaccaccaaagacacgagtccgcggcgaacacgagaaacgaacaccaaccgagataaagaaagggtcgtgaggccgtgatggggtcgccggtaacaggatgagatgatgagccagagagggcgacaacagacggaacagagtcatcaagaaggaaggaggatgggtgtggtggaggaaagggaaccgaaccagcgcagccagactacacacatcagcacatggagtacaacatgagaggagaccgaagcaagacaaccgcacgcgcacagaggagagatggcgagaggcgaacgctcctggcgagaaagagaaaagagccgaagcagacgacgagcgaatcagagacaacgaaattacagaccaacagagagaccgaagcaacacgaatacatatggagaacagacagacaaagaggtaagcgcgctgcggggcgaacgacgaagggagacaagcacaaatagcaagcgaggctacaggaagcacgccggtgtgaagcggcgcggcggatcgcaaccgaggtgagggagagcgcgcgcagttactaacaaacaccatgagcactacgcggngagacactaatacacaaggaactatgaggacgaacctcgtataccacgaatgggagatatgaaaagtcaggtgaaggagaagatacgagaaatgagacgcgaaggaganagtgaagtgacagaaggaagagcgtaggtagtaataccacgatcagcgcgcgtaccacgcaggatgacagacggaggcanacgtcatagacactctgcggatacgccctcgcagcgcacaag

SEQ ID NO: 1074 - DNA, 524 bp, Glycine max
  Probeset Number=SeqID_10853
actcactcgagactccaggaaataagaaagaagaaagaagaaaaaatggagaatctattgggtcttctcagaattcatgtgaagagaggtgtgaatctcgccatccgagatatcgcaagcagcgatccatacatcgtttttcacttcggaaacaagaagctgaaaacccacgtggtcaaacaaagtgtaaacccagagtggaacgatgatttgactctttctgttactgatccaaatctccctgttaaacttacggtttacgataaggacttgctctcggcggatgataagatgggagaagcagagtttagcattgctccatatcttgaagccattaagtttcgccataagatccaaggaggacttcccaatggaaccataataatgaagatacagccgaacagacaaaactgtctgtctgaagagagccacattgtgtggaaccacggcaagcttgttcagaatatgttcattaggctccagaacgtagaaaccggagaggttgagctacagctcgagtggat

SEQ ID NO: 1075 - DNA, 2166 bp, Glycine max
  misc_feature (66)..(66): n is a, c, g, or t
  misc_feature (74)..(74): n is a, c, g, or t
  misc_feature (94)..(94): n is a, c, g, or t
  misc_feature (123)..(123): n is a, c, g, or t
  misc_feature (137)..(138): n is a, c, g, or t
  misc_feature (141)..(141): n is a, c, g, or t
  misc_feature (147)..(147): n is a, c, g, or t
  misc_feature (158)..(158): n is a, c, g, or t
  misc_feature (188)..(188): n is a, c, g, or t
  misc_feature (190)..(190): n is a, c, g, or t
  misc_feature (206)..(206): n is a, c, g, or t
  misc_feature (211)..(211): n is a, c, g, or t
  misc_feature (223)..(223): n is a, c, g, or t
  misc_feature (225)..(225): n is a, c, g, or t
  misc_feature (234)..(234): n is a, c, g, or t
  misc_feature (261)..(261): n is a, c, g, or t
  misc_feature (278)..(278): n is a, c, g, or t
  misc_feature (281)..(281): n is a, c, g, or t
  misc_feature (296)..(296): n is a, c, g, or t
  misc_feature (299)..(299): n is a, c, g, or t
  misc_feature (302)..(302): n is a, c, g, or t
  misc_feature (308)..(308): n is a, c, g, or t
  misc_feature (312)..(312): n is a, c, g, or t
  misc_feature (322)..(322): n is a, c, g, or t
  misc_feature (336)..(336): n is a, c, g, or t
  misc_feature (353)..(353): n is a, c, g, or t
  misc_feature (377)..(377): n is a, c, g, or t
  misc_feature (386)..(386): n is a, c, g, or t
  misc_feature (422)..(422): n is a, c, g, or t
  misc_feature (424)..(425): n is a, c, g, or t
  misc_feature (440)..(440): n is a, c, g, or t
  misc_feature (481)..(481): n is a, c, g, or t
  misc_feature (492)..(492): n is a, c, g, or t
  misc_feature (501)..(501): n is a, c, g, or t
  misc_feature (526)..(526): n is a, c, g, or t
  misc_feature (528)..(528): n is a, c, g, or t
  misc_feature (530)..(531): n is a, c, g, or t
  misc_feature (538)..(539): n is a, c, g, or t
  misc_feature (551)..(551): n is a, c, g, or t
  misc_feature (558)..(558): n is a, c, g, or t
  misc_feature (567)..(567): n is a, c, g, or t
  misc_feature (570)..(570): n is a, c, g, or t
  misc_feature (626)..(627): n is a, c, g, or t
  misc_feature (632)..(632): n is a, c, g, or t
  misc_feature (652)..(652): n is a, c, g, or t
  misc_feature (682)..(682): n is a, c, g, or t
  misc_feature (708)..(708): n is a, c, g, or t
  misc_feature (748)..(748): n is a, c, g, or t
  misc_feature (766)..(766): n is a, c, g, or t
  misc_feature (774)..(774): n is a, c, g, or t
  misc_feature (777)..(777): n is a, c, g, or t
  misc_feature (808)..(808): n is a, c, g, or t
  misc_feature (815)..(815): n is a, c, g, or t
  misc_feature (857)..(857): n is a, c, g, or t
  misc_feature (861)..(861): n is a, c, g, or t
  misc_feature (878)..(878): n is a, c, g, or t
  misc_feature (881)..(881): n is a, c, g, or t
  misc_feature (883)..(885): n is a, c, g, or t
  misc_feature (887)..(888): n is a, c, g, or t
  misc_feature (890)..(890): n is a, c, g, or t
  misc_feature (954)..(954): n is a, c, g, or t
  misc_feature (961)..(961): n is a, c, g, or t
  misc_feature (1003)..(1003): n is a, c, g, or t
  misc_feature (1112)..(1112): n is a, c, g, or t
  misc_feature (1159)..(1159): n is a, c, g, or t
  misc_feature (1172)..(1172): n is a, c, g, or t
  misc_feature (1224)..(1224): n is a, c, g, or t
  misc_feature (1264)..(1264): n is a, c, g, or t
  misc_feature (1317)..(1317): n is a, c, g, or t
  misc_feature (1325)..(1325): n is a, c, g, or t
  misc_feature (1429)..(1429): n is a, c, g, or t
  misc_feature (1448)..(1448): n is a, c, g, or t
  misc_feature (1559)..(1559): n is a, c, g, or t
  misc_feature (1574)..(1574): n is a, c, g, or t
  misc_feature (1722)..(1722): n is a, c, g, or t
  misc_feature (1725)..(1725): n is a, c, g, or t
  misc_feature (1760)..(1760): n is a, c, g, or t
  misc_feature (1804)..(1804): n is a, c, g, or t
  misc_feature (2142)..(2142): n is a, c, g, or t
  misc_feature (2152)..(2152): n is a, c, g, or t
  misc_feature (2155)..(2155): n is a, c, g, or t
  Peptide Sequence Number=SeqID_9269
  Probeset Number=SeqID_10854
ccgtctttactgagagtaacgatcacacgactgcgacgggatgtcgtcagctcgcagataaatcanttacggantatatccagatgatatcggngtgtgatcatgacgctgtcgattcgatcnatcattagatatanngangatcgnagtcgtactgntgtgcttcgtgtagtcagtagtgactcatntnacatgcagcagtgtantatgntgatgctacgcngnagatacgancggcacagcagatcgactgacatcgancgaaagtcatcatatgncgnacagtgtcaggatcnacngcnaatgcnctgncgcatcatantcgaattgatgatngcgcatggactggcagntcgtcggaatacgagtagttcatntcatggacngtacacgtagcgggacgtttatgcaacgtatcgtantnngcagcatgtgcacgnagatgatctcatgatagggatagtgtagatgatgatacatnctatcatcgantaatgcagntcaagtgaggttagtatatagtatnantnngcatatnngtagggatgacnacgatantgtacgtgnacnaggtcgaccagctgaactagcgcgcatcgcaaacagatacgctgcacgatgatcgnngacgntcgagctacagtgcgctacntaccctatacgagacgtgcggtaggtgtanacaagcagtaactacatagcagtgangtacaaactacgtcgtatacgagagctatagacagattgntcgacgcagactctactnaatgtcangcngactcagactatatgacgtatagacgcggtngtaacanggtgagtagtcggtgaatgagtcgatgagatcgtgagtgcgngcgngtgcagactgacgcacnaanannnannancgctgtcgcagcagatgcatgtagcacgctagatagctcgtcgatatgtgatgtgtagatcacngagtcantaattatgactagcgtctagcgatatctgaccgactgcgtanagtgatgcgacgtgtgtacatcgtagcagtagtgtagtgatagtgactactgctgagaatattacatgagcacatatggaatagaatatcgtgtacgtgataggtgacnatgattatgagatctgcatcgtggtgtatataatcatgttgcttcgncgcgcagtcgacncacgcagcaggtgtaggcgctgcgcgagtcgagtacgcggagacgctgtagnactacgtagtctgatatcgtgagagctgtaatgaatctgnatattgaagatcagagtgtcatgcgcagataggcatagtggcaataagatganagtcttcnttcagcgtgtgtgtaagatggtgcagtaatgtctagtagagcgacgatatcaatgtacagtagtgtacagctagtagatgagtgagcgtgagacaacactcatnaactatagtcattattganagagtgaagagttgagaatgatgtgagagtaccctagcgaagagcagagtagtagatagatgagcgcgtacaggacatagccgtacagatgacacgcatctgacgatgggnaagccgagcactganacctactaacaacatgtatggcactgtgctatgtgcttcactgtatgtacgtcatgagacagaagcatcagtagtagtacttacggatcagatatgactggtgatagatgtgtagataatagtaagtcagtgtctcactcctgttatnatnctgtctctagagagtcgttgccacgaggtacgacnactagcacatcttgcgtgcctgtctcatcaatggtgtagatgtngagcatgacttgcacgcacgtatcaggagatagagatgagagacacaatcatcacatggacgtgagctacatagcgcgctgacgacagctcacatccgagcaggacgagtggtctgatttctatgatatgtgagtatatgagccgtgcttgagtgcgagaatgaggtcatatcgcaagagggttattacagttactaggtttgtgcgtactaagatacaagtatagtaagaggagagagttggggtaggaatatgaatatggatgaggagggaggatgtggggagcggtagacgcaagtaagatatatatggataagtagatagttgagagagggagnggggtagtgnggnggtggaataaa

SEQ ID NO: 1076 - DNA, 490 bp, Glycine max
  Probeset Number=SeqID_10855
ggctccagagaagaaactttacgacccaatgacggagattaaggtgcagatactcctcctcaatatctccgttggcgagagtggagatcgtctcaccagagccgctcacgtgttggaacagcttaatggccaaacccctgtgctttccaaagcatggtacaccggccgctcctttgggattagaagagatgagaagattgcgtgctatgtcactgtctgaggtgacatcgcactgcaactattggagagtggtgtgaaggtgaatgattatgaactgctcagacagagctttagtgatactggttgctttggcttgggcattcctgagcctatagatatacgaatcaagtatgatccttcaactggtctttatggaatggacttctctgttgttcttgatcgtacaggctatcgtgtcgcacgtcgtcctaagtgcatgtctcggtgtggattccagcactgcgtcattatagatgatgctatgatgtgg

SEQ ID NO: 1077 - DNA, 932 bp, Glycine max
  misc_feature (1)..(1): n is a, c, g, or t
  misc_feature (73)..(75): n is a, c, g, or t
  misc_feature (78)..(78): n is a, c, g, or t
  misc_feature (601)..(932): n is a, c, g, or t
  Peptide Sequence Number=SeqID_9270
  Probeset Number=SeqID_10856
ntggtggggggggggtgtggggtggccgacccctacagctttatccacctttttcacttattttatttttttnnnaancggggggggggcgaagagggtgacgggttatacctcgagtcagctacgtagcccccccccccccccaaaaaacagaaaaaagggagagaaagaataaggcggagaaacaaactaacacagaatcgccaatcatcttcagaggctctgttgtgtggttcatagaacaagtacagcaaccaatagaatgtccccatcagtgaaatcaaaatccaagtcccaggaaaaggcccctgcaagggctggtcaggaacaacataagacttctccaaagacttccaagtctccaactcatgggagtgggactcctgtttagtgcacgggaagctctggtcgggaaactttcaaaaaccccaaaaaacctctatcggctgggttctctcttactactgagttgacaggataatgtggacaaatttttttaaaacacaggattgacggttatgaagaatatactattgactgaggtcttctacaagggaactgggttggatataggaagtgtgtgaacctttagggtgtttcnnnnnnnnnnnnnnnnnnnnnnnnnnnnnnnnnnnnnnnnnnnnnnnnnnnnnnnnnnnnnnnnnnnnnnnnnnnnnnnnnnnnnnnnnnnnnnnnnnnnnnnnnnnnnnnnnnnnnnnnnnnnnnnnnnnnnnnnnnnnnnnnnnnnnnnnnnnnnnnnnnnnnnnnnnnnnnnnnnnnnnnnnnnnnnnnnnnnnnnnnnnnnnnnnnnnnnnnnnnnnnnnnnnnnnnnnnnnnnnnnnnnnnnnnnnnnnnnnnnnnnnnnnnnnnnnnnnnnnnnnnnnnnnnnnnnnnnnnnnnnnnnnnnnnnnnnnnnnnnnnnnnnnnnnnnn

SEQ ID NO: 1078 - DNA, 1351 bp, Glycine max
  misc_feature (5)..(5): n is a, c, g, or t
  misc_feature (41)..(41): n is a, c, g, or t
  misc_feature (125)..(125): n is a, c, g, or t
  misc_feature (128)..(128): n is a, c, g, or t
  misc_feature (218)..(218): n is a, c, g, or t
  misc_feature (329)..(329): n is a, c, g, or t
  misc_feature (406)..(406): n is a, c, g, or t
  misc_feature (467)..(467): n is a, c, g, or t
  misc_feature (572)..(572): n is a, c, g, or t
  misc_feature (607)..(607): n is a, c, g, or t
  misc_feature (1307)..(1307): n is a, c, g, or t
  Probeset Number=SeqID_10857
ctctngtcagagtgtatagacgccgtgagtagctatgtacntatagcgagagttgcatattataattagacatcttctccgagacgtacggacgtcacgtcggcagcacgcgacaggtgagcagncgntggcagtcgacacacctgctgccgtatctagttcgagtatatgtcgatgttaattgccgctagctgcgtgtagcgcggggtgtggatgtnatataagtgaggggcggagtagaggagggcaatcatgtgttactacgtagaagaggataacggtaataacgtcttgcgtgcgcagcgtcagtgcacacaggaaccgtatangcgtgtggcgcggttggttgtgtgcgcgtgttatatctttacataatgaggatagatatgaggggatgagctgcggnctgtaacagcgcggtaacgtggtgctgatatacatgttatgtgcctgcggcgacgcgcgangcagagagcgtgtggtagaatgtaatacacaccgtgtcggcgggtatattaagacgggatatagcgccagaacaccgcgttctatctgtattgttctatacaatntatcattcagccatacgggagggtggggggtgatnctctcccgtcggcatacacataacaatataaaacacgagtgcaagacatcaggcgattgccgctaccgtaataagcggccgcatacaatcgacggagtgagtattataaaatgatatgagggggcagaccgcggataagtcaatatgggtacatattaaaatcttcaacgataaatataacacgcggagccgggcccgacaacgtcgtgatatctatagtgagtggttggtctgcaccgcgcggtatggtcgctatattatattagtgtacgatcacgctttgtgggtgccgatttacgagagtgggcggcacgcatattagactataataaaaagcatatcagcgcggggcgctggggtggcggctaatgcgggagaattgtgtaaggaggaacgactaattaaattgaatacacgctgtgtgcgaaggacgatgatagtcgacaaagaaatccagatcattgcggtcgcattcgattctacattgatgtatactactgatatacactacacgtcacagtaacacaataagggatgcgatatgcacgaggggtgtgaaagtgagcgagggtatatattaacgacggaatacggcgcgcgagatgaggcaggcgtgcgtaattcgtatgttatcctctacgcgtatataggcggggcctcgccccatccgaccttctgatgagtggacaagtgctgcggntcgatgcggcggtgagcggggcgactggcgattaggatgtgcgc

SEQ ID NO: 1079 - DNA, 1834 bp, Glycine max
  misc_feature (316)..(316): n is a, c, g, or t
  misc_feature (402)..(402): n is a, c, g, or t
  misc_feature (459)..(459): n is a, c, g, or t
  misc_feature (541)..(541): n is a, c, g, or t
  misc_feature (544)..(544): n is a, c, g, or t
  misc_feature (552)..(552): n is a, c, g, or t
  misc_feature (557)..(558): n is a, c, g, or t
  misc_feature (651)..(651): n is a, c, g, or t
  misc_feature (708)..(708): n is a, c, g, or t
  misc_feature (781)..(781): n is a, c, g, or t
  misc_feature (812)..(812): n is a, c, g, or t
  misc_feature (867)..(867): n is a, c, g, or t
  misc_feature (869)..(869): n is a, c, g, or t
  misc_feature (897)..(897): n is a, c, g, or t
  misc_feature (1027)..(1027): n is a, c, g, or t
  misc_feature (1042)..(1042): n is a, c, g, or t
  misc_feature (1044)..(1044): n is a, c, g, or t
  misc_feature (1109)..(1109): n is a, c, g, or t
  misc_feature (1156)..(1156): n is a, c, g, or t
  misc_feature (1265)..(1266): n is a, c, g, or t
  misc_feature (1300)..(1300): n is a, c, g, or t
  misc_feature (1319)..(1319): n is a, c, g, or t
  misc_feature (1404)..(1404): n is a, c, g, or t
  misc_feature (1413)..(1413): n is a, c, g, or t
  misc_feature (1426)..(1426): n is a, c, g, or t
  misc_feature (1439)..(1439): n is a, c, g, or t
  misc_feature (1446)..(1446): n is a, c, g, or t
  misc_feature (1457)..(1457): n is a, c, g, or t
  misc_feature (1470)..(1470): n is a, c, g, or t
  misc_feature (1479)..(1479): n is a, c, g, or t
  misc_feature (1484)..(1484): n is a, c, g, or t
  misc_feature (1504)..(1504): n is a, c, g, or t
  misc_feature (1530)..(1530): n is a, c, g, or t
  misc_feature (1535)..(1535): n is a, c, g, or t
  misc_feature (1556)..(1556): n is a, c, g, or t
  misc_feature (1595)..(1595): n is a, c, g, or t
  misc_feature (1599)..(1599): n is a, c, g, or t
  misc_feature (1620)..(1620): n is a, c, g, or t
  misc_feature (1628)..(1628): n is a, c, g, or t
  misc_feature (1634)..(1634): n is a, c, g, or t
  misc_feature (1644)..(1644): n is a, c, g, or t
  misc_feature (1652)..(1652): n is a, c, g, or t
  misc_feature (1655)..(1656): n is a, c, g, or t
  misc_feature (1681)..(1681): n is a, c, g, or t
  misc_feature (1683)..(1684): n is a, c, g, or t
  misc_feature (1687)..(1688): n is a, c, g, or t
  misc_feature (1690)..(1691): n is a, c, g, or t
  misc_feature (1781)..(1781): n is a, c, g, or t
  misc_feature (1790)..(1790): n is a, c, g, or t
  misc_feature (1792)..(1792): n is a, c, g, or t
  misc_feature (1806)..(1806): n is a, c, g, or t
  misc_feature (1808)..(1809): n is a, c, g, or t
  misc_feature (1814)..(1814): n is a, c, g, or t
  Peptide Sequence Number=SeqID_9271
  Probeset Number=SeqID_10858
gggtgagtggtgcttggtatagcgtatgtgtgtctcaatggtgcgtgttgtgagtaatggagtctcgtgttagtgtcgacgaagcgtacgcgcatctacgtatgttcaattcgtcatcttctagttgatgatatgtccgttgtgcacccgcgcacacatattgcgtctattcgggtctcagagacatagttgcaacttcaaatgtgtcgtgttatctatctcatactatactacatcctttcgtccttatgtgcgtgtgtagcgtaggacaggcgatagatgatacaggacatcgtcagtacgatgcatatatagncgtggtgcgataatataaggcgagagtcgtgaatgtatgtcggattgacttcgatgttatatgcgagcgagtgcatgtgtgtctanatacgcttatcttcgatataatacgacaatatatcggcagggtatgtagtgcagctntatactgcgcgcgcagtcgatgcgtacgttaagttgatggcatgcgtctcggtgcgatctatatgtgatatgatcttttgtncangttgtctngttgnngtgtgtaataatataatcagacgagcgctcggagagctcatgttcgtgtgtgatcagtgcatgtcgacatgatttgcatctcatctctcatcnttatgagatcgcgtcaataggtcacacattcctcgtcactactataagactcttcgnttgcatgataagtatcggtggagatgatttgtcatagtcagttcaaatactattgtattcgcgtcagagagantgtctagacattatgcgttgacgtgtgatangtgagtgatagtcgtgtgagctgttctggtcaatatggtagtggtagcgtacacntngatcagtctctgtgtgcactctatagtncgcgttgtgtgtgatagtagagtatcagtaagtgtagcttaatccacttcttggactttatgaagtgtgtagcggtcacggggttcactcgattcactctgtacttgcatgttcgtcgtgtctatatatntcagtatgcatcgtngnatgatatatatcatttgtctgtgagtattctgtagtagtctgtggtctatgataatcgtgtgtcnctaccgcactcttatttgctcattattcttgtagtatctacataatnatatactaattgtgtacattgttagagttgtgtggtctgcgctcttggttgtatatgtgtagtgtgcgtcgtgtctgatcgctatacagtaaatagcgcgtgagtcagnnagagcgcaggctgcgacacagcgcagtgagcatncgtcacgacgcgagcagtngcacgcaagcagggcgagattagcagctattgtagacagccatgtgagatcagacagacagtgactgtatgtgtcatgctatatnattctatanatacatcatatantactattctctgnaataacnaggagcagagnaacacataaaaantaactatcnccctnattccatataattactacangaggagggagcgacactcattcttcntgcgntggtgttggtgttggcgtgcnatgcacatgtcatagtgagctgatgagagcataaatggnttantgttattagtgctgatgtatntaatctanactctntcactgggtnagaagatnatnnaaaacaatacacatacagggacggngnnccnntnngggggtgggtgttctctcttacgtcctcttctcctcgactgtgcgcgatgatagtgtcgcagagttgagtacttgttgtggtagtatatngagtatgtntntccccacccgaaantnncacangtaggtttatttttggtttt

SEQ ID NO: 1080 - DNA, 428 bp, Glycine max
  Probeset Number=SeqID_10859
attttaatttatctttccttggatcatcgtcttcctccaggttctcagatcctcaaatcgagaagaacaattcagtgaggttgttgttggagaaggaggagtaaggctaagatggtgaagatgacattgatagctcgtgtcactgacgggttgcctctagctgagggacttgacgatgggcgtgacttgccagattccgacatgtataagcaacaggtcaaggctctctttaagaatctctccagaggtcataacgaagcttcgagaatgtctgttgagactggcccctatattttccattacataatagaaggacgtgtttgctacttgacaatgtgtgaccgctcttaccctaagaaactggcgttccagtacctggaagaccttaaaaatgagtttgaacgtgtcaatggacctaacattgaaac

SEQ ID NO: 1081 - DNA, 1401 bp, Glycine max
  misc_feature (206)..(206): n is a, c, g, or t
  misc_feature (257)..(257): n is a, c, g, or t
  misc_feature (840)..(840): n is a, c, g, or t
  misc_feature (992)..(992): n is a, c, g, or t
  misc_feature (1030)..(1030): n is a, c, g, or t
  misc_feature (1041)..(1041): n is a, c, g, or t
  misc_feature (1045)..(1045): n is a, c, g, or t
  misc_feature (1054)..(1054): n is a, c, g, or t
  misc_feature (1066)..(1066): n is a, c, g, or t
  misc_feature (1087)..(1087): n is a, c, g, or t
  misc_feature (1089)..(1089): n is a, c, g, or t
  misc_feature (1119)..(1120): n is a, c, g, or t
  misc_feature (1185)..(1189): n is a, c, g, or t
  misc_feature (1317)..(1317): n is a, c, g, or t
  misc_feature (1319)..(1319): n is a, c, g, or t
  misc_feature (1321)..(1328): n is a, c, g, or t
  misc_feature (1339)..(1340): n is a, c, g, or t
  misc_feature (1342)..(1344): n is a, c, g, or t
  misc_feature (1362)..(1364): n is a, c, g, or t
  misc_feature (1367)..(1374): n is a, c, g, or t
  misc_feature (1378)..(1380): n is a, c, g, or t
  misc_feature (1382)..(1384): n is a, c, g, or t
  Peptide Sequence Number=SeqID_9272
  Probeset Number=SeqID_10860
cgcgcatggaagagagcggagtacgccacatggtgcgcgcgtgaaccgccgcgcgacgagtcacgatcgtagaccatgcacgcgaggtcgtatactatatctataaattagaaggcgctcacaacacaagagcgcgcatggtcgagtgtggtagactgaattcttaattatacaccaactcacgcaagacgcagcacactcgcagngcgcgagctcagcagagatagtgtgtgatgtgtgttgagaggagtaacgangccgccacaccacaggttataatgccatgtcgaggccaccgcaatagattatctcagttagttacctcgtaagaggtagcgtgacgattcggcgccccgcgtgctggtgggtgggtgggcgtgagatacgcattgcccaacgtcgggtgagtggcgatagtagattggagatcgagagagtggcgggaccgcagagaactagattatacgaggcggaggaacgcgcacagcgcgaggcgctgcgcggtcatcacctcccggatatatacataacacaactctcacaccaattaatatacagtagtgtcacatacgatagaatagtatacgagaacattaagtgacctatgcgtcctagattatctaaacccccactctctccctacacaactgagagagaatgtgtagagtgtgtcgacgggctggggaacgtgatatgtgtgctctagtggcctatccactcacgcagcagccgcgcgacagcctctcaccacctcccatgaatccttcatatccgtaccaaacgagagaaagaaccgcgcaggtatgaccacatatctggtacctcgctcttaccaggacncgcggcggaaacacgatacaaggagaacagggggcgtgcgagcgagatagattgaaatcagtgtggtcagcaacgtggcgcaacattcctgcataccctcacagactagatgtgggagggtaacaacgagcgacggaacgcccacccaacangagggatggggggagtgggagtaagggcagcgtggggnggccgggcgtnggtnacgtggtcnactgggcgcggngaggcagacgtcgcgccgcgngnctataacgagagacgagaatagtgcacatnntccagatatatgaggagaaaggtgcagagacgacacatagaacgcaaaaaccaaatcaaataaannnnnggtgagccgtgcgtgggtgtcgccctccgcctcgcgcgcgcgaggggagagagcaacaaccccaacaaaacaagaggaggtggggaggggacggacaagggaggataagaggctggcacacgaacagncncnnnnnnnncctccgcgtgnnannngagctggtggggggaggnnnggnnnnnnnngggnnngnnnccacacccaccacccac

SEQ ID NO: 1082 - DNA, 346 bp, Glycine max
  Probeset Number=SeqID_10861
ggaagcggctcgccccgagcctgctcaagcggcgcgccgcgagcgtgctcatgggccccagtggagtcgtcgggctcgcccccgccgatgccctcgtcatcgcctcggcccctcctcggtcgctctccgcctccgcgtgtttatttgcatttccattcgcgtgcttgtgccactgctttccgtcgcgggttcaggggggctgtacctcctcggtgccctccagcgtccgcgcgcgctcacgggctcgccgacgcgagctagcctacgcgtagtttgcgaatccgatatcactgaactttatctgttactgtcaattgttattgtttttcttttcttccaatggttg

SEQ ID NO: 1083 - DNA, 1616 bp, Glycine max
  misc_feature (122)..(122): n is a, c, g, or t
  misc_feature (171)..(171): n is a, c, g, or t
  misc_feature (401)..(401): n is a, c, g, or t
  misc_feature (451)..(451): n is a, c, g, or t
  misc_feature (476)..(476): n is a, c, g, or t
  misc_feature (533)..(533): n is a, c, g, or t
  misc_feature (546)..(546): n is a, c, g, or t
  misc_feature (1067)..(1067): n is a, c, g, or t
  misc_feature (1368)..(1368): n is a, c, g, or t
  misc_feature (1425)..(1425): n is a, c, g, or t
  misc_feature (1503)..(1503): n is a, c, g, or t
  misc_feature (1582)..(1582): n is a, c, g, or t
  Peptide Sequence Number=SeqID_9273
  Probeset Number=SeqID_10862
cgcgcgaggcagtgagcgatagtacatcgagagtgagtcgtagaagtagaagtagatatgatcgtgagaggtatagatgacagcgctagtgactgccgtatgtgtgagtgagcgtatctganaatgtagcgttctgtatactgatgtgtgctacaagactgccgtgtctgngatgatgacgactagtggagaagtatggccatggtgagcgatacgatgtatgcgagatctacactccctgtgcagacgcgcgtcactcgatgagtgatacagatgtagagcgagtatcgagacgatccagtagaagcgatgtttgtactatgcacgatgagttcctaggtatagatcgcacaagatagatagactcactccacgtcgacagtctccgtgtagcaatgcangccgcatcgacgaattgtcgtatacagcgatactcggcgcggagagtcgnacatatgtacatacgcgactgagcnacgtaccatgacacaccgctacgtgtagagtatcgcaatatgatgtacagatgtacnacgtagcgcgcanctaatatagagtatgcactgacgagcgagcacacacgacgtgtcgcgtatgtgtcgcaatatgaaggcgcgcgtctgtacccatcatcataataggagatcatttctctagtggtgtggtctgctgacaacctgagagtgctgccacagtataagagagatcatatgttgattctgctacgacgattatgagcagaggactgttcgtcacgtataagtggctcattgtgatgagttgtctcgttgtagtaagtatatagataactacaaagtctagtctactcctctctggaagtgagtagtcagttcgtgtgtacagcgcgcgtcgtcgttcgtagtagggcgtgcgagcatataatgtgtgttagtaggtggtactcgcgcatatgctatacatatagaaatgaggaggagatggtggggggaggtcgatgtacactgcgatgtgatctccatcctgactagtcgtgcttgcgacagagtaataatatagagcattacattataaaagacgacatacgnctgaatggtcttcggcacgttattgttgatcatcaggtgtatatcagtctagtagatatagtcggccatgtggtcgagcttaggcagttcgcttatttgcgtactggataacttgtatattccgtacatatagatatagagagcagacaagcgagcgtgggatacagtcattgtagtgcgattgtatctagtgcctagtctctatgagattacgtgagacgacagacctatgctatggatgaggagcagcgaggctcgctcgtctcgcggtgagagactgtggtttatatcgagagtcggncagaatacgaagagtacagggatagttgcaacatatggtgatgatacgactgccgtntgtcttgctgtgtgtcgcaacacacactacagagagaagatatagaagtgctgtaatccgaagtaacactgtgcgcantcttcgagtgcgggtggcacaccacgattcctaccaaatatcgtagtctagcaagatgttaagtaaatatgacggtaantacaagacgagagggagagcaggagggagcggct

SEQ ID NO: 1084 - DNA, 596 bp, Glycine max
  misc_feature (501)..(501): n is a, c, g, or t
  misc_feature (508)..(508): n is a, c, g, or t
  misc_feature (546)..(546): n is a, c, g, or t
  misc_feature (551)..(551): n is a, c, g, or t
  misc_feature (564)..(564): n is a, c, g, or t
  misc_feature (566)..(566): n is a, c, g, or t
  misc_feature (580)..(581): n is a, c, g, or t
  Probeset Number=SeqID_10863
aaaaaaactcgaaaagaaagaagaggaaagagatggcttctacctccgccgtgtcattgttcatgccactcacccaaaaccgatcgccgtcgtcgacaaaaactgtagccttacgcaagccactattgcctttgaagccatctaaggcgtcatcctcctccttagccatgccttcacggaggtttcaagtgaatgcatctaacctgaagatggagaaggctgtgagcggcttagcagcagcagctctcaccgtttcaatggtgatccctgaggtggctgaagccgcaggctccggagtctctccctctctcaagaacttcttgcttagcattgccgcgggaggggtggtgctcacggtcatcatcggtgtggttgttggtgtctccaactttgatcctgttaagagaggctaaggacgagagatatctgtgtgtcattatattatggtaatgatttgtcaatttatgttataattaactcttgcattcttcttgaccctcnagggggnggccccgggtaccccaagttccccccttaaaagtggangcccntattaacgccccncncccctggatcctcnnattttcaaaaacggg

SEQ ID NO: 1085 - DNA, 564 bp, Glycine max
  Peptide Sequence Number=SeqID_9274
  Probeset Number=SeqID_10864
ctaactactgggtcccccggcctgctagaattcggcacgaggagccggtgttgaacctagaagtggagattctcctttcgtacttggatcaaagggagaagatgttgcgaaagcccgttaatccttttgactttaggctgtgctatgttttgggtgccttggcagcgacatggtttgtgttggttcctatttacatgtggctgaaagatcaagttgttcccaaaggtcagccaatctaagagatattgataattagtaatccttttgatacttataattcggctcgagaaagtttcatcaaatgtacgcgcaattaagagaaatttgatcaaatgtcaaatagtttattacgtaattgagtttaaattttctgggtgctttagcaagctatgataatttgggcgggaggggctaatgcaacgtcattttgttctgtccatcagcagtcttagaggtcaattattccaacattgttttatgcaatgattatataaggacgttaatgtttgtttaaaaaaaaaaaaaaaaaaaaaaaaaaatataaaaaaaaaataaaaaaaaata

SEQ ID NO: 1086 - DNA, 705 bp, Glycine max
  misc_feature (157)..(157): n is a, c, g, or t
  Peptide Sequence Number=SeqID_9275
  Probeset Number=SeqID_10865
agttttccgatttataaaacccctcggcctccgtccatccatttccacctcaaatctcaaagtcgcacaacgccacaagcaaaagcacaagggcgcacccacctttcaccgttcttctccggagccgaccatggtcgttgaactcatgggttgcggntacaccacacacggccacgcggccgatgccaataaactatttccaagaaggcgctgtcgctggggttcctcgaccctcaaggtcatcatctcccccatcccctcccgaggcggcctgggcagccccccctgggaaaagatgggccaacccagggggggcccaaggttcccccgggggaattaaaaatcttttaaccgaaaacggccaaagccccgtttttcccccgagccccccttttgggggcttaaacccaaaataccttaaaaccccccccccgggggggccaccgggcccccctccctcccaatgcggggccccaaagacccaaaaccccgtgataatcccccccacaagggggcccccccaaaaaaagagaaaaaacccggatatcccaaaaacccttaaaaacccccaccggggggggcaccctttctcccccaaaaaagaaaagaaaaaaacccttttctctcccccacacgaggagggggggggggggagggggcccccccccccccccaacaaaaacatgttttttggtgctccagaaa

SEQ ID NO: 1087 - DNA, 1408 bp, Glycine max
  misc_feature (130)..(130): n is a, c, g, or t
  misc_feature (1065)..(1065): n is a, c, g, or t
  Probeset Number=SeqID_10866
tcatagaccaactcacagcgggcgttgcgtcgatactcaagctgcacgacccacagatagtgctacaccgtcgcacacatctcgtcgtctatacggttggctgtgtcagaagcgtgcgtagggttcgcanacagaatagtctgcgcgtcaacgctgtgttgtcacaaaggccgtgttcaactcactgggtgcgctggtgaataagcgtggtgtgtggtcgtaaccgtagcgtggtcaaacacataacaaaaacatgtggcgcaaaccagcgtacaggggtgcggagaaaaaacagagagagtggacacacaaagatggcgggagtaaaacaggtgggaggaaagagaaagagtggtggcaataacaggggtggggatcaaacaaggatgagctcattgcacgtgcggagaaaaaggggcgcgcggcgtacatcgcgtcaaagtcgaggtcaatatcctgtctccgcgtcttacttatcaaattccggtggagcgcgggggggtcaacagatgtgcgaaaacggctgtgccactttgtgtggtgttacctccttgttccaacatgttgcgaagcctgttatcaccgacactcacgtgacgtcgcacccagaccatccttacttattagacgacatggcgcgacgccgtgctccacaggctcgcggaagcggtggctgtcctctaaccggtccatatttgtatcggtgcaaacactcgaccccgtgcctcgcaaccccgccgatcctgtctcccgcaacccctctataactctctctcaaattagcctttacaggttacgcgccggcgcgtggggcggctgcccacctacaacagtggacacggtccaacccatcggcggcaagcactcgcgccctgccacacagggaggggccgaataaagcggaaacacgggccaataccacttattttctcccttctatccctcccgcccacctgcgcatgcgttaccaccacggtccacgggcaccctgcggcggccaacgttggtgatattcggattcctaacacgagccgacaccggaatcttcaaagggtcaaaatgggngggaaacattaggtgttcactatccggcttcgaacacggtggtactagggcataaaattgccaacggcaacatggtctaaatatggttggcttaatctgcgcacaataggccttaacacggtgcaaagataaagcgccggcagaacaatggggaaaagcggggaaaaatggggttataatgtgtacctctcgcgccgcagtttaagtaatcaggtaaatgagggaagggggtggcgagagagggctacgaacggtagtccgcgcttcactccttacgcgcaaaggtggacacctccacaaggggcaggtggcaaagggggaagggcaaaagcaggtgaagggg

SEQ ID NO: 1088 - DNA, 1666 bp, Glycine max
  misc_feature (1)..(1): n is a, c, g, or t
  misc_feature (12)..(12): n is a, c, g, or t
  misc_feature (44)..(44): n is a, c, g, or t
  misc_feature (85)..(85): n is a, c, g, or t
  misc_feature (103)..(103): n is a, c, g, or t
  misc_feature (132)..(132): n is a, c, g, or t
  misc_feature (160)..(160): n is a, c, g, or t
  misc_feature (443)..(443): n is a, c, g, or t
  misc_feature (498)..(498): n is a, c, g, or t
  misc_feature (581)..(581): n is a, c, g, or t
  misc_feature (640)..(640): n is a, c, g, or t
  misc_feature (826)..(826): n is a, c, g, or t
  misc_feature (1174)..(1174): n is a, c, g, or t
  misc_feature (1360)..(1360): n is a, c, g, or t
  misc_feature (1380)..(1380): n is a, c, g, or t
  misc_feature (1490)..(1490): n is a, c, g, or t
  Peptide Sequence Number=SeqID_9276
  Probeset Number=SeqID_10867
ntgtgcgtagtngcacgatgacgcgtgcgcatatacatctcatntatacagggagcgcacgtatatgatcgtagtcacttatctngtctccttgttctgtcgnttagaatagataccgagagcatgtgaccncgcgcgtcccacgccagagtcgcgagcntactttgatatacattacatttcacctcctaatctgtcgcgcgttagtaaacgaaacatgtcggaatcggttataactcgcgcgcagcggatgcgctagatatgtacgtgacatgatattatctctcacgataatacggtattactaggattacgtgcgctctctagacctccacacatcatcagacatagattatattacagcgatcgcacacgtatgcgtattcatattgttgatgataaatacagaactatagtgggatggctcgcgtggcggaccacanctcgcgcagcatgacggtatggatcgctgtgtctatcagatgtcccgccgcgcgnctgcgtgtgaggacacccacatcggcttagattacagatgacaaccgttaactgcgtagttagcacactcactgcagacactnttgctacagtcacgcgatttcgtcgtcagcgccatcgcttgtatacaatacactgaaantataccgcagccgagaactgcgtgacggacgagactattatcgtgataggggtcctgagcagatactatatatatacacagcggtacagcgtaccacacaatacgtactctggtgtatagctggcctcgtgacagctatctgtgggtgccatatcaatataattataataatacgctcgaataagncgggtgctcaatatcaaggcgcactcaccccacgtcatcccatgacaataaaataatatggggacgccacggcgtcgactcagtgagtccgttagatattctgttgagaagacactgttagctccccagggcacgcgaagcaaactaagagacattaagctggtgatcgaccacatatgatgcgacgtctcataaccacggtctgggtgaacagcgaatagcgtcatacaaactatcatttataggatgagcgacggatgcggcggcgtcgtaaggagacagagtcagaataatagtataagagacggtgtcgatatatagcaaatacaaaagtaatatactaatatngagcggtcacagagtcagtataacgtctacagcgtcgcgtgcagtagacccgctgcggcgagggatgagagtagactatcatagctcaatctagtcagatggatacgatgtagctacattatcgccacggggcggcacgtggtgactgagatatttttagtgttggtgcacatatttgacgatacngagtgttgctaatctgtatncttgcgtacgcagtagtgtcatcatacttatggtcctacgtcctgtatccctctaggcggggagttgtgtggtgtaggcgagtgagtcgcgctcttctctgttatgtatnattatctcttatacagaacacgatgtctggccacccgcgaatgtcctctctctattatttggagcatgttataatgtacgcgctggtgacgcgccgctctcgtgctgatctgaacatcgcctgcggtgtagatgtgcagcagttatctgcggcactataaggtgaagtgtgggtgt

SEQ ID NO: 1089 - DNA, 632 bp, Glycine max
  misc_feature (632)..(632): n is a, c, g, or t
  Probeset Number=SeqID_10868
cgaattgggtaccgggccccccctcgagtcagctacgtaggcccccccccctttttttaataaatcattcaataattcaaaaaactaaactttttaacagcccaatttccctatccacaacatggactcaaaaaccatcaagcgtaagcctacaaaatgcctcgtccccagctgcctctacaacaagcccaaccctcccgctaactccaaaacccttcccccaaaccctcccaactggcgtgaaatcaccggtgaaactaaactcttctataatcctgttctccagcgtcaatacggttcaaataaggaccaagtcaaacttatgatctgtgaaagtcattatttataccatgaacacattaagaatctagaactccagttagaacgcgctcctgcaacggcggacctgacttttcaaatcaaggaagcgatagaggagactggaaagcattatgagattatgaccgtgctgacagtgctttttgagcctttgataaatagactgacgaaaacaagcaagaaacatatcgatagattatccgaagatgaatctgatattattattaagcaactggagtttttaaagcttataacgaggtccctagataataggaaagctttgctagaacatn

SEQ ID NO: 1090 - DNA, 1683 bp, Glycine max
  misc_feature (28)..(28): n is a, c, g, or t
  misc_feature (35)..(35): n is a, c, g, or t
  misc_feature (110)..(110): n is a, c, g, or t
  misc_feature (166)..(166): n is a, c, g, or t
  misc_feature (177)..(177): n is a, c, g, or t
  misc_feature (204)..(204): n is a, c, g, or t
  misc_feature (254)..(254): n is a, c, g, or t
  misc_feature (282)..(282): n is a, c, g, or t
  misc_feature (286)..(286): n is a, c, g, or t
  misc_feature (311)..(311): n is a, c, g, or t
  misc_feature (314)..(314): n is a, c, g, or t
  misc_feature (319)..(319): n is a, c, g, or t
  misc_feature (400)..(400): n is a, c, g, or t
  misc_feature (487)..(487): n is a, c, g, or t
  misc_feature (706)..(706): n is a, c, g, or t
  misc_feature (725)..(725): n is a, c, g, or t
  misc_feature (731)..(731): n is a, c, g, or t
  misc_feature (747)..(747): n is a, c, g, or t
  misc_feature (800)..(800): n is a, c, g, or t
  misc_feature (802)..(802): n is a, c, g, or t
  misc_feature (808)..(808): n is a, c, g, or t
  misc_feature (858)..(858): n is a, c, g, or t
  misc_feature (883)..(884): n is a, c, g, or t
  misc_feature (902)..(902): n is a, c, g, or t
  misc_feature (905)..(905): n is a, c, g, or t
  misc_feature (913)..(913): n is a, c, g, or t
  misc_feature (933)..(933): n is a, c, g, or t
  misc_feature (962)..(962): n is a, c, g, or t
  misc_feature (997)..(997): n is a, c, g, or t
  misc_feature (1007)..(1007): n is a, c, g, or t
  misc_feature (1029)..(1029): n is a, c, g, or t
  misc_feature (1045)..(1045): n is a, c, g, or t
  misc_feature (1247)..(1247): n is a, c, g, or t
  misc_feature (1491)..(1491): n is a, c, g, or t
  misc_feature (1548)..(1548): n is a, c, g, or t
  misc_feature (1659)..(1660): n is a, c, g, or t
  Peptide Sequence Number=SeqID_9277
  Probeset Number=SeqID_10869
aacggataatacatggatagtgagtgangctgagntagagagaaccactaccacccgctgtcttgtatattagttggtttgcttcgcgcccgccagacagtgtgatgtgncgtataatttggcacaccgtctcgtcagtattagtgtatgtgtgttcgtgtgcacncacgtacggtntgtgaatgtgttatgtgtgtcgctccnctatcgtatgtgtctgtgtagcagtgtatgtatcgacgcgcagaagtatnactatacagtcacataatatgatgacangcancattagctgtaataaggacacagancantatgngtgatagacgatatatatacacgtatctcatcatgatgcatcactatagtacgtcagatcctgcgtgagatgagtcgctgntgtgtgtacgtcgtgattgtgcagcgcccacagtagatgtagagcagcggtggcgtggctgttggtgtgtcacatcattaactatcnctcaccacctctatatgcaccttagtagctatgttcttctcaccgacgagctgcatatgagaggtgtatgagagtcgcagcagattgaagacgcgataagattatacacacgacagcgcagaatattgttatatgtagtcacgaagaactaggatagaatgatgagtcacacagcgttgtgacagcgtgagtagacggcgcgatttgtatagagtatgnggtcgcgggggcgtgccgnggagantataatgtcactaatnatatcacacaatccacaggatgatgagccgacacggcgtatatctacgtgggntncggttnctgcgcacactcttgtattgatacgccgacgcacgcgtagcactgactanctccgagagggactgtgcgtggtgnnatgtcctcaccctcttcnccncgcttcgntctcactcagataaacccanaacacataagacacaccgcgactatctanaagtctgtgtcacgagccgtatatgcgcacgattntgtagagtgnagtctgataatagattataganataccgacgtatagantgagtaatggagcagcgagctacgatcatacagccctgcaccagtgagtgtcagttctgcgtgacggaggtgtgtgttgtatgtggtgctgcgtggtgtttgccgccggacgacggaggtaagagacgaagagcgacatagcgaatagtgtgtaagcaccgatatataactggcgctactcgagcatcagcgactatctacntatacacctctccaccggtatagtcttctcaccacgcactacaatataattatgaaagaagagttgttgggccggtgaatccgcacccgccagtagatttagtcgctctgctgcggagaatgtctctcacggcctcgaagcattcagccggagtgtttttgtgtccgtccgattctattggccctccagaagttaatcaccactcaattatatccaagacaacacgtgatgtttccacatgcangtggtgatcgaggagtaccggcccccacacccgtatataatagcacgggcggtgctngtgtttgtttatgagacgcggtatttgggagcggggtggtcccccggtttgccgatatgggatggaggaaggtgtgtgagtgcccggcgggtctcggcgtagtcgcccggnntggggggaagggcgacgacaaaa

SEQ ID NO: 1091 - DNA, 421 bp, Glycine max
  Probeset Number=SeqID_10870
ggaacaggacttactttcggatatcttgtggggaggatgattttggcacactaaccagatgaactataagcgtctgaaatttgggatgcgcacgtacatcaagtttctcacatttggccatgaacaatgtactaccatacaggctgaaagaaggggttccttgagtagatgagagataacttattattggttcatggacattttcagagacattataaagcatgagttcctcatcagtcattcaagagatgatcaatgccgctgggaatatatagttccaggatatctaggaaggaagctcgaatccacgcaaaatttcgtccagcttgcaagtcgagcaaaatattggcaagggtcagtagtaggttgtatttcattgtctagcagcgatgtcgtagtgatatattgattctgtatcgtt

SEQ ID NO: 1092 - DNA, 1479 bp, Glycine max
  misc_feature (20)..(25): n is a, c, g, or t
  misc_feature (30)..(30): n is a, c, g, or t
  misc_feature (34)..(34): n is a, c, g, or t
  misc_feature (36)..(37): n is a, c, g, or t
  misc_feature (50)..(50): n is a, c, g, or t
  misc_feature (54)..(54): n is a, c, g, or t
  misc_feature (90)..(90): n is a, c, g, or t
  misc_feature (95)..(96): n is a, c, g, or t
  misc_feature (98)..(98): n is a, c, g, or t
  misc_feature (151)..(151): n is a, c, g, or t
  misc_feature (186)..(186): n is a, c, g, or t
  misc_feature (193)..(193): n is a, c, g, or t
  misc_feature (228)..(228): n is a, c, g, or t
  misc_feature (240)..(240): n is a, c, g, or t
  misc_feature (288)..(288): n is a, c, g, or t
  misc_feature (339)..(339): n is a, c, g, or t
  misc_feature (389)..(389): n is a, c, g, or t
  misc_feature (620)..(620): n is a, c, g, or t
  misc_feature (799)..(799): n is a, c, g, or t
  misc_feature (890)..(890): n is a, c, g, or t
  misc_feature (1033)..(1033): n is a, c, g, or t
  misc_feature (1214)..(1214): n is a, c, g, or t
  misc_feature (1291)..(1291): n is a, c, g, or t
  misc_feature (1293)..(1293): n is a, c, g, or t
  misc_feature (1335)..(1335): n is a, c, g, or t
  misc_feature (1403)..(1403): n is a, c, g, or t
  misc_feature (1407)..(1407): n is a, c, g, or t
  misc_feature (1413)..(1413): n is a, c, g, or t
  misc_feature (1417)..(1417): n is a, c, g, or t
  misc_feature (1420)..(1420): n is a, c, g, or t
  misc_feature (1438)..(1438): n is a, c, g, or t
  Peptide Sequence Number=SeqID_9278
  Probeset Number=SeqID_10871
gttatgtgggtggcgcccgnnnnnntgctnggtncnntggtgtgggtttnctcnctatttctctgtccttttacccccccccccccgccnacccnncnctacccacctatcattagtcatgtaacacggcgcgtcctccctctctctgccncagcgtacggtgcgagaccaacatagagatatgcntcatctntctcctctctacgaggtctccctccatacgcgccncgacagccccgnagacacgagagggtagcatgagtgcgcacgatatagcctacagtgcgngcgccgagtcgccgcacgcgccagcagcccgccggaagtcgcagtcagccnacacagcgtgtgactgtgtatttacgcagctgcgattataatatatattntgttaaacaagttcattctctatgtagacgcacggccacataagtgatgcctctccgggcgcagcccgagcctgtgcggagagatccgagcaaacaggcgaagcaggctggctggaacagcgaggagagaagaagatggtggcaggggccgcacgaagggaggtagtacgtgccgcgtcggccgtcccggtcccgcctccgcacaccgccttggcagcggtgtgagccccngtgcgcgcggccgctcccgaagcgcggacgggcccgcgggtggggaggcgtgccgctcgtcacttctctgtcagcgcgtggagctcgggactgtcccagtacacgactcacgcgtggctcctcgtctgactacgcacacctcgagtgtagtgcataagccattccggtgctgcccgtanatagtgttctgtatcggctcgctccaccagagaatcgagtatctagagtgtcacatcactcgcacgatattctgtccgccccactgctctncgaagctgagacgtggcagtacaaactacactcgcgcgctacccgtactcatcatactgtggtatcttctctccccctaccccgtcatgcaatcatattacctctgtcgttatacgacactaggtatgaatatcgctgaggangaacagcacgcgccacccgcccgcacagggcgtcgcgtgtggatggcgcccacgccccccctcgactcgtatctgtccatgagcgggacgtagaccctctacgtgggtcgtcgccgctcgacccacacgtcgcactcgcgccgtatcaccgagcctgcacacttcctccactcacattgtntaggacgcgcgcgcgctatactgtcgcacgacacagaagctacagtcatgataattgtctctatactcgtcatcctncncacgcatgctctcatctcgctcgcgctctcctgtgtctcatntctctcatccctctctctcatctgtgtgtatgctgtctactactagtgacatctggcacagctcccgnccgntctacngatnggnagctctctcacttcagantcgagccctatacgcagcgcacgcacccgcacacgcacacg

SEQ ID NO: 1093 - DNA, 579 bp, Glycine max
  misc_feature (114)..(114): n is a, c, g, or t
  misc_feature (128)..(128): n is a, c, g, or t
  misc_feature (160)..(160): n is a, c, g, or t
  misc_feature (195)..(195): n is a, c, g, or t
  misc_feature (334)..(334): n is a, c, g, or t
  Peptide Sequence Number=SeqID_9279
  Probeset Number=SeqID_10872
aaaataaaaaaatttgctagggtccggtctttgcgtttggcacaggctgcgcagtgtttgaacgttgaaggagagcgtagaggcagtggttttctttttttgatttctctttgnagaatcgaatcgangtaatttttgatcgtgtgagtgtccgatcttngaatccacaacaaacatggtgagaggattgctcancaagctcgtctctcgctccctctcggtcgcgggaaatggcagcacaatcaactccgccccgctcacatccacgagtaccagggtgctgaattgatgagcaaacacgagtcacgtcccgagaggcgtgctgtttctctgntggagagcagaaagtcatcaggaccttttccctatgaaatgagtgggggtaaaatccaattttagccgccgacgagggtgggaactttcaaaacgggttaaaggaagagggcccttggttaaactggccagttaaaaactactgggaaaaagctgggaaaaactaattaacaaaaaatgggccccgggaaaaaatttaaaaggtttcttggggaaaacccccccttgaaaagaaaggccttgtta

SEQ ID NO: 1094 - DNA, 1404 bp, Glycine max
  Probeset Number=SeqID_10873
aacaatgtcagatctgccgccggaaaaccccaatctgccgctcacttcatcgtcttcctctttgcaccattcctacagccggaagcagaaatctctgggccttctttgcaccaatttcctagctctgtacaatcgacatggaatcgaaaccattgggcttgatgacgccgcctccaaattaggagttgagagacggagaatctacgatattgttaatgttctggagagtgttggggttttaacaaaaagagcgaagaatcagtatacgtggaaaggattttctgcgattccggcagcgttgaaggagctacaagaagaaggtgctaaggacactttccaccgtttttataccaacgagaatgtcaaagtatctgatgatgaagatgatgaggaagagtcttcttctcagcctctttctagtagccagactgatacctccaaacctggctcccttgattcctctaaaatagataatcgacgagagaaatctttaggactgcttactcagaactttatcaagctctttgtttgctctgaagctaggatcatctcccttgacgaggctgcaaaattactacttggagatgcccacaatacatcaataatgagaacaaaagtgaggcggctttatgatattgcgaatgtcttgtcatcaatgaatctcattgagaagactcacaccttagattctagaaaaccagctttcaaatggttaggatacaatggtgagcctactttcacactcagcagcgatttgatgcaagccgaatcaacgaagagagtttttggaactgatctcactaacgtcagtgtcaagagaagcagaacccatgaaaatgctaccgagaggaggataaagatgaaacaacacgcaatagcagatagttcttataatcaaagctctgatgatgctcatgaatcaagacgctacaagtttggtctttttgcaccagccgctggtggtacatatccagctgctcgtttggaggacaactccaagagagcttttgatgttgagaatctagtttcggattatcgtcctacttaccaaaatcaagttttgaaagacctctttgcgcattacatggacgcttggaagtcatggtacagcgaagtcacgcagaagaatccattaccagatacatcaaaacgccattagagatattcttaatcttctcttactagtgaacatttcgttttgaccaatgtgggtttagtttctccacacaaattttaacggcaggaatccgacattttaagatgcagactgcaccatctctgtgccttcactgtaggctgtttagaaatcatcttttgcttgattccaatgccagttgtatgtaacttatatataatccccatcttttatttttaaagaatctcaaaagtgaaaacctaggttct

SEQ ID NO: 1095 - DNA, 551 bp, Glycine max
  misc_feature (268)..(268): n is a, c, g, or t
  misc_feature (298)..(298): n is a, c, g, or t
  misc_feature (311)..(311): n is a, c, g, or t
  misc_feature (316)..(316): n is a, c, g, or t
  misc_feature (363)..(363): n is a, c, g, or t
  misc_feature (367)..(367): n is a, c, g, or t
  misc_feature (378)..(378): n is a, c, g, or t
  misc_feature (422)..(422): n is a, c, g, or t
  misc_feature (433)..(434): n is a, c, g, or t
  misc_feature (441)..(442): n is a, c, g, or t
  misc_feature (444)..(444): n is a, c, g, or t
  misc_feature (447)..(447): n is a, c, g, or t
  misc_feature (450)..(450): n is a, c, g, or t
  misc_feature (453)..(453): n is a, c, g, or t
  misc_feature (458)..(458): n is a, c, g, or t
  misc_feature (461)..(461): n is a, c, g, or t
  misc_feature (463)..(463): n is a, c, g, or t
  misc_feature (470)..(470): n is a, c, g, or t
  misc_feature (476)..(476): n is a, c, g, or t
  misc_feature (478)..(478): n is a, c, g, or t
  misc_feature (488)..(488): n is a, c, g, or t
  misc_feature (494)..(494): n is a, c, g, or t
  misc_feature (500)..(500): n is a, c, g, or t
  misc_feature (511)..(511): n is a, c, g, or t
  misc_feature (518)..(520): n is a, c, g, or t
  misc_feature (525)..(526): n is a, c, g, or t
  misc_feature (528)..(528): n is a, c, g, or t
  misc_feature (536)..(536): n is a, c, g, or t
  misc_feature (540)..(540): n is a, c, g, or t
  misc_feature (551)..(551): n is a, c, g, or t
  Peptide Sequence Number=SeqID_9280
  Probeset Number=SeqID_10874
gagttgatgcgattctgtgatttcatgctataaaaagtaactagaaatacaaataaacatataactgtcttgaaaatatatttcaattgtttagctagagaaggccaattagaggatggatagaactgttgatgccgatattgtgatcgtgggaggtggtatttgtggccttgcaacagcccttgcccttcacaggaagagaattaaaagtctggtgttagaaagatcagagaatttgcgagccacaggagcacctataatagtgcangcaaatggctggcgtgcacttgatcagctnggcattggctcancactnagacaaactgctattcaaatagaagggggaagatttatatctctcancganggctgatccantggaatttccttcggggttaatcaggaccttcgttgttaaagcntactgtttggnnaaagccnngncgntanttnccggnggngnccatccngtccancngtcaggtgtncccttngattantcctttacacntcgtccnnnttttnntntcaccgancctnttcttctatgn

SEQ ID NO: 1096 - DNA, 527 bp, Glycine max
  misc_feature (180)..(180): n is a, c, g, or t
  misc_feature (254)..(254): n is a, c, g, or t
  misc_feature (373)..(373): n is a, c, g, or t
  misc_feature (423)..(423): n is a, c, g, or t
  misc_feature (481)..(481): n is a, c, g, or t
  misc_feature (513)..(513): n is a, c, g, or t
  Peptide Sequence Number=SeqID_9281
  Probeset Number=SeqID_10875
ttttttttttttttttttgtaggcaatgagataatattggtattgaattacagtcagaaagaagaggaatgaagaaagtcgactatgtcggacgtaggacaatagagagaaagtggacgcaaagaaaccccactagccgatgcagctcttttcctttgccagacccattccaaacctcanagtgcaaaagaccgtctacccctctcgacatcctcaatccaatccctcaacgcgccagttctctcctcattganagaggcctcctgctgctggcgacccatcattccacttgcggcaaaactaaccttgctcccattttttcgtagccggtgtaaaggatttaaagctttctaagcaggggggtttggcgtantacttcgatccctccttagcaatccccttctctccgacgtcttcggccgnggactgacactatcctgctggctgcctgcatcaataggctggaagctgctgcgtatanataccatgcctttgcctacaccaatgttctgntcggcaccaccacc

SEQ ID NO: 1097 - DNA, 1948 bp, Glycine max
  misc_feature (185)..(185): n is a, c, g, or t
  misc_feature (231)..(231): n is a, c, g, or t
  misc_feature (249)..(249): n is a, c, g, or t
  misc_feature (290)..(290): n is a, c, g, or t
  misc_feature (319)..(319): n is a, c, g, or t
  misc_feature (354)..(354): n is a, c, g, or t
  misc_feature (530)..(530): n is a, c, g, or t
  misc_feature (625)..(625): n is a, c, g, or t
  misc_feature (642)..(642): n is a, c, g, or t
  misc_feature (658)..(658): n is a, c, g, or t
  misc_feature (668)..(668): n is a, c, g, or t
  misc_feature (716)..(716): n is a, c, g, or t
  misc_feature (718)..(718): n is a, c, g, or t
  misc_feature (728)..(728): n is a, c, g, or t
  misc_feature (763)..(763): n is a, c, g, or t
  misc_feature (819)..(819): n is a, c, g, or t
  misc_feature (880)..(880): n is a, c, g, or t
  misc_feature (904)..(904): n is a, c, g, or t
  misc_feature (1002)..(1002): n is a, c, g, or t
  misc_feature (1115)..(1115): n is a, c, g, or t
  misc_feature (1137)..(1137): n is a, c, g, or t
  misc_feature (1146)..(1146): n is a, c, g, or t
  misc_feature (1191)..(1191): n is a, c, g, or t
  misc_feature (1249)..(1249): n is a, c, g, or t
  misc_feature (1348)..(1348): n is a, c, g, or t
  misc_feature (1438)..(1438): n is a, c, g, or t
  misc_feature (1450)..(1450): n is a, c, g, or t
  misc_feature (1516)..(1516): n is a, c, g, or t
  misc_feature (1583)..(1583): n is a, c, g, or t
  misc_feature (1626)..(1626): n is a, c, g, or t
  misc_feature (1664)..(1664): n is a, c, g, or t
  misc_feature (1672)..(1673): n is a, c, g, or t
  misc_feature (1678)..(1678): n is a, c, g, or t
  misc_feature (1680)..(1682): n is a, c, g, or t
  misc_feature (1684)..(1684): n is a, c, g, or t
  misc_feature (1686)..(1686): n is a, c, g, or t
  misc_feature (1695)..(1695): n is a, c, g, or t
  misc_feature (1727)..(1727): n is a, c, g, or t
  misc_feature (1777)..(1777): n is a, c, g, or t
  misc_feature (1794)..(1795): n is a, c, g, or t
  misc_feature (1807)..(1807): n is a, c, g, or t
  misc_feature (1822)..(1822): n is a, c, g, or t
  misc_feature (1843)..(1843): n is a, c, g, or t
  misc_feature (1931)..(1931): n is a, c, g, or t
  misc_feature (1946)..(1946): n is a, c, g, or t
  misc_feature (1948)..(1948): n is a, c, g, or t
  Probeset Number=SeqID_10876
tgctgtgtcttaatatatatcgtcgcctgattctctccgtgaactactgcggccgccgcggtcggatcggccgctgctcacttgataccccagcctcttgtatacgcgtctctcatgtgtcggcgtagtagatcggtgttggctcccttcccgtcgtctcgattagctactttctctcctcatcnatacgtacctcccactctcccgtctccatcacttacgtgtccaggngcggtgaggtctgtcgcncgtgtgaagtatatacaatccgcggccgactcgtacgcctncttacaagctcgcgctcgcatcactaatnagtgagccgctacatatagatatactatgtgagcncgcggctgcagctctgctgataatggacgcactaccgagctctacatatcttgatataggttgaatgagaccgtctcgcgtacgcctcgtcgcgcgatcagtgtctgcgttacgcgcgtggatgtatgacagtacagaagcgcgcgctcctaacgcacacgcagacgacgcatacntcccatatatttaatgtacagtacgtcgacctccgcgcggtattagactagtgttctgcgtggctctgtattacactccacaccccgacccacgncgcgccctacgcacgcngctataatatataaanatatatattnatcaccggactattagctgccgatctcgacaccgccgcacattgtgtnantatacgtacnctcgtcctcatatacactgcggtcgtagacgccgncacgcattatattatatctatactattacggcgctgtgcgagtctctctcgacgtnatggaacgcacattcacgtctatcgtgataaattaattatagtatcgcgatgctcatctantcgtcaacatcgtatgagggttangcgacacagtcgtctgtacatctctcagacacgatcacacacatactcaagatatatccgtcacaagtgcttgtcgtactcgcgacgcactacgaccngcgcgacacatacatagacataagagtattcgcgatggtgacagcgccgtatgtcgaatctacgtcgcagctaaactctgctcctctatgataacgcggcgtggcgtagcatncctcgaccgacgcgttatgatnttatactanactcgtgcgctctgagcacaacgacacacaggaatatttatcccntgccactcaggcgcgtcgacgcgtcgaggatatatatatgcgtgcgatagtagcaganacacgatgagcgtcgacgattgagtgttgcaactatctatacagatcgatacgtgtgtagtagtcgaacggcgcgcagtgtggcgttcgattgatattngcagcacactgctaatgtgttccagcgatacgcgcgtcgatattctatagagagctatggatcatatctgttagaacagcgtgaatatcngtacgcgcgctnacgctctgctaccgtgcatcctaagactgatatgaacgtcatgtagcacttacagaccgtgataantgcgtcgtccgatgcacatctatactcttcgtgatgatacgagcgccgcgccggcacgacatctgancgacatattcatcgcgtatgtgtggtgtcgagagtgatatgancatgatctctcgagtatgaattgtgtcggctcgtccgntaaatttnntatcnannncncncacacagantgcttccctcactctgggccgggtgatgacangtgtatcagagttctatatataatgattatatgcgttctactatcagcgnctgcgtcccgcaacgcnncctgtatagttncgtcgcgtacgtcancgcaacaagacagtatcaggncaatcatattagccaatatctccatacgacatgcgatcgcgcgcgcactatgacgtccagatatcgtatagctcggcgcgtgcgatcncgtagcggatcgatnan

SEQ ID NO: 1098 - DNA, 860 bp, Glycine max
  misc_feature (1)..(1): n is a, c, g, or t
  misc_feature (830)..(860): n is a, c, g, or t
  Peptide Sequence Number=SeqID_9282
  Probeset Number=SeqID_10877
ngattttcgaggccccggaattccattgcttcctgctgtgcaagggaattgatgctttggtcattttttcgagccgacgggcggaaggataaaacctgggttggttcctagcaaaggagagaggcgggaggtctactttgaagaagggagtttatcttgagcaggttgatgggattggtcagaagattcagatagattctgttaaggcagcaggaattaagcagattgttttggtggggtcgatgggaggaacaaacataaacaaccccttgaatagcattggcaatgccaacattctggtttggaagaggaaagctgagcagtacttggctgattccggtattccgtacaccatcatcagggcgggcggtctgcaggacaaagaaggtggcattcgagaattaattgtgggaaaagatgacgagattctagagacagaaatgagaacaattgcaagggctgatgttgctgaagtctgcgttcaggcgttgcagctcgaggaggcaaagtataaagcacttgatctggcctcaaagcctgagggaacaggcaccccaacaaaggatttcaaggcacttttcactcaagttaccgctcggttctgatcttctgttactttgtcttttaagcagagtaataggacaagagactgagagggataataagttcattatgtgagatacacatgtctgaatcggctctttctatatttttcaaggggtctttcccgaagtatctaagtatattttgtatgcaccattcacaaaatcccaaagtcgaaaagatcgggattgatctttgaaagtaaaagaaaaaaaaaaaaaaaaaannnnnnnnnnnnnnnnnnnnnnnnnnnnnnn

SEQ ID NO: 1099 - DNA, 479 bp, Glycine max
  Peptide Sequence Number=SeqID_9283
  Probeset Number=SeqID_10878
ttggttacctgcaatggaaaccaaaataaacaataaatccaatgagataacataacataaaataaaaataaagaaattatgtaacacagatgccatttctagtgtctgacataaataaataataacatcatagagcagtcaaaggacaataaactttgaggcattgtcatggatgggaaagaagagagggggaatgttagtaacttattctatgttcacgcatggcttaacatgagccgcaaatcattgaacctttttatccattgtccaagtccaactatagtcccaaataggaccaatatgcttaactttttatataacaaaaactatagtgtctatttcaatttttgggaatgtctgacacatttataactctcttgtacatgaacaaaacatcaataatttttccttgctttatagataaattattaactttgttagaattggttttactttaaacaactgttcctgtgttctct

SEQ ID NO: 1100 - DNA, 410 bp, Glycine max
  misc_feature (121)..(121): n is a, c, g, or t
  misc_feature (175)..(175): n is a, c, g, or t
  misc_feature (231)..(231): n is a, c, g, or t
  misc_feature (244)..(244): n is a, c, g, or t
  misc_feature (247)..(247): n is a, c, g, or t
  misc_feature (272)..(272): n is a, c, g, or t
  misc_feature (298)..(298): n is a, c, g, or t
  misc_feature (404)..(404): n is a, c, g, or t
  Probeset Number=SeqID_10879
taagtaatagtattagaattttttttttctttatttttaactataatagaaagaatacttgctttttctggtttggatagattatttttagtattatgactttgtgataatgtagtattantattaagacttactctctgctgtaatttattagaagggatattttgatttgtanttttgtttgaagaaactatgtgaaccttttttaagtatattagatgaaaataggtntagtttcattaantanttctatgaatgttttgaatgatggnttgaactttgaacaaacaatgtgtgnttgtggctgtttaaagctggaattgagaccttgaaattggagaagggaaagtgtgagttgagtaaacaaaacaatgtttagttgttgtgttgcagaagatgttgtntatgtt

SEQ ID NO: 1101 - DNA, 1434 bp, Glycine max
  misc_feature (1)..(1): n is a, c, g, or t
  misc_feature (41)..(41): n is a, c, g, or t
  misc_feature (76)..(76): n is a, c, g, or t
  misc_feature (94)..(94): n is a, c, g, or t
  misc_feature (115)..(115): n is a, c, g, or t
  misc_feature (131)..(131): n is a, c, g, or t
  misc_feature (165)..(166): n is a, c, g, or t
  misc_feature (214)..(214): n is a, c, g, or t
  misc_feature (216)..(216): n is a, c, g, or t
  misc_feature (220)..(220): n is a, c, g, or t
  misc_feature (255)..(255): n is a, c, g, or t
  misc_feature (258)..(258): n is a, c, g, or t
  misc_feature (351)..(351): n is a, c, g, or t
  misc_feature (354)..(354): n is a, c, g, or t
  misc_feature (356)..(356): n is a, c, g, or t
  misc_feature (442)..(442): n is a, c, g, or t
  misc_feature (518)..(518): n is a, c, g, or t
  misc_feature (581)..(581): n is a, c, g, or t
  misc_feature (654)..(654): n is a, c, g, or t
  misc_feature (666)..(666): n is a, c, g, or t
  misc_feature (687)..(687): n is a, c, g, or t
  misc_feature (690)..(690): n is a, c, g, or t
  misc_feature (743)..(743): n is a, c, g, or t
  misc_feature (965)..(965): n is a, c, g, or t
  misc_feature (1134)..(1134): n is a, c, g, or t
  misc_feature (1184)..(1184): n is a, c, g, or t
  misc_feature (1186)..(1186): n is a, c, g, or t
  misc_feature (1326)..(1326): n is a, c, g, or t
  misc_feature (1359)..(1360): n is a, c, g, or t
  misc_feature (1372)..(1372): n is a, c, g, or t
  misc_feature (1401)..(1403): n is a, c, g, or t
  misc_feature (1405)..(1405): n is a, c, g, or t
  misc_feature (1407)..(1409): n is a, c, g, or t
  misc_feature (1411)..(1419): n is a, c, g, or t
  misc_feature (1428)..(1428): n is a, c, g, or t
  Peptide Sequence Number=SeqID_9284
  Probeset Number=SeqID_10880
natcggtgagtcgttgaggtagaacgaactcgtgcactatnatgtgtattatgattctgtactgcatgccaacgcncccctgttgttcgctctngcgtgtgtttagtagaatgancatcacacacaccaanccacaccacacacaaacgcgagcgatcacgcagnnggctatgtgagtcagttcgctcctcgagacgacgcgcagtagtcgaantnacancctctattgtcgtgttgtgtttgtttattgtgtcntgntcgttgtattagactacatcctatgtataatcacaaccgccacctaggtatgttactctgattgccaccggggtgttgagtatgttgttcgantcncncacacacgactagtataataatgttatatgttattcgcatcagactctcattattttttgtctgctagctctcctatcctctctantgttctctcacccacgcccgccgacagcacccgatttaatattgtattctataatactcttcgaccatcctaccancatgttagggtgtagatcaacacaaacacatcacacctattttatctcgtaccttcacaatanggatagtgtgaggggtaagcagtgatatactatttttagtatagtagttgtctggtttccctctacatccatntttgtggggagngcgggtgtggaaacacaccanttntagtgggggtgaacaacacacacacatatagattagttgttatagtcagttanttccacctgtgcacccgcgagaatgttaatttaccgtagctcccgaacatctattatacataaaactctctcacacagctcataaactataaccccctcaacaattcatactacaacaagttaacaacccctcacaccacccctcccacgcgtccagagacctcatcgccgttcctacccagagcaacatcatcaatccgcgccagacaaggttggcgccgntcaacccactttctgcagctttcccccaaacaacaatccaaccccttttcacctcacacccttttgtggcaaaaatatataaacaacacacgacaccgtaggatgcagacagaggcacgcaatatatagacaccgcccaccgcacaccaccccccatgcatcttcatgntttaaacacagagataaagtgatagaagagaaaaaacagcgacgctgaananacactcacgcaaaaagacaagtgcgccaccccgaaccaccaacaaaaaaatacaacaaacacgccattctccactcccgagcctccccggcgggctatactctacctaatattttaaagtaatcaccgcccgcctcaaanaagcgagaaaaaacatcccaaggttgttaaggnncgcgctccgggnacaaaaacaaacacaataaagaatacagnnnanannnannnnnnnnnccccccccncccccc

SEQ ID NO: 1102 - DNA, 1432 bp, Glycine max
  misc_feature (9)..(9): n is a, c, g, or t
  misc_feature (14)..(14): n is a, c, g, or t
  misc_feature (802)..(802): n is a, c, g, or t
  misc_feature (1125)..(1125): n is a, c, g, or t
  misc_feature (1174)..(1174): n is a, c, g, or t
  misc_feature (1363)..(1363): n is a, c, g, or t
  Probeset Number=SeqID_10881
aaggggggnaaggngcggaggagagagaggggcgagcagcacaacggacagggccgagtggatacaccgcacccccaacactcaacgctttctttgcatctagctatgaacggggggcggccggggctgcgacggtcgaaagagcaacccgcaccgcttgtgatatttgcctaaggtggatagagtttagtcagtaacgaggcaatatttgtttgatttctatgatcgttgctaatcggcgtgatctattttgtccttattattctctctctcctattttattactttatatcttttagtaagacttgtaggaatgttagaagggagagtacggttccgcgtgagagtcccacagtggcctacttaagccgcgtaatctttgtttatttgtttgcctgcttcaccctataagacgcagcaataaaagctcccgcgccaaaagaggcccagcgtctcggcaaatcgtaagcgcggagaagtgatttggaaggcaaatagagctagctaacttatggcgttagctgcccctgtcctcacctttgcccgcgtattttgctctctctcatgccctgttcttatgtcccgcggagttccacagaaggaacgcgctcctaggtagtgagtagacacctaggggcccaaggtatcacgggcgaacgcactgctgatatgtctatctaccgtttctgcccagcacgccaggggtgaaagtgaatagaaggagggagcttaggtagttatgtacaactgtttagaaatagagatgatttacggtggagtaatcctgagtgcttagaagaanagcaggtcgcagttgtattcgaggccagcagctgtatattggtcggctgtgcatgctccacagattttataatctccaaactatatgctctactactctctatccctcaacttccttctcctcccgcggcgctacctcttcgcttccccatcctcttgtcttcaccgctctgttgacttcacttgattcttatatatagatttatcctgaacaattagtcatctcctcaatgacacactccacctcctttcccctctcttatgctctctctacctacaccacttctcagccatctttcccacctcattcccagctgccatgangcagcgcgcatggacttccagacgataggatgatttatcataatgtctngtacctgatatatctctctacatatacaatagagttgatctatagtgttcgcacatctactatactaagctcgaattcctctccgcttcttcttccttctctcaatctacttataggtctcctcgttatactcactctcatatatgtgtgtgtcatatctcctgtcgtgttatcatctcgagacttacnctatccacaatatgtcagcggttcatcaccccatctacgtgacctcgctcctctctcctcacatccagg

SEQ ID NO: 1103 - DNA, 1353 bp, Glycine max
  misc_feature (96)..(96): n is a, c, g, or t
  misc_feature (184)..(184): n is a, c, g, or t
  misc_feature (283)..(283): n is a, c, g, or t
  misc_feature (384)..(384): n is a, c, g, or t
  misc_feature (387)..(387): n is a, c, g, or t
  misc_feature (390)..(390): n is a, c, g, or t
  misc_feature (798)..(798): n is a, c, g, or t
  misc_feature (845)..(845): n is a, c, g, or t
  misc_feature (1022)..(1022): n is a, c, g, or t
  misc_feature (1027)..(1027): n is a, c, g, or t
  misc_feature (1123)..(1123): n is a, c, g, or t
  misc_feature (1159)..(1159): n is a, c, g, or t
  misc_feature (1199)..(1199): n is a, c, g, or t
  misc_feature (1202)..(1202): n is a, c, g, or t
  misc_feature (1206)..(1206): n is a, c, g, or t
  misc_feature (1208)..(1208): n is a, c, g, or t
  misc_feature (1288)..(1288): n is a, c, g, or t
  misc_feature (1331)..(1331): n is a, c, g, or t
  Peptide Sequence Number=SeqID_9285
  Probeset Number=SeqID_10882
ttatgtcactttgaatatattactgtcagacataatgtagaatgtgtgtatagtaattatattatagatgtatgcggagtgaggacgtatcctatngttttataacttagccacacgccagaggacatacttcctacgacataccacaccactgtgggtactacacacccacaccacaatgcantatacgtgttcgatttagcgtggcgtattgtcctctcatcgcgtcaccccgccggcggcgcgagtgtgagggtgggacagagatcgcgcggagagatangtacgtccacttcggatgaatagatgtttcaagatgagcgcaataaacaatctcatcttattagcaatacacaggtactagtgaagctggcgtgtgtggtntcntcntttctttggattatacggtgcgagttcaggctgagtctggggcgcgacttccatcttcccacgcacaccactactctctccaccactcaatacgtgtgggagcagataccgtagtaagttctcccgtatagccaacaatgttcaatggagttgtgggttgatgagtctctatacagatcaatagtgcacacgtgggcgccaatcttgtctgatagtatggactcgcctcgagaaatagagtgagtgatgcagctttgctgcgccgtgcggacgcatctgtacgcgtcttccgtatccgattactatacaataaatcattgtgtttttatatattttgctgttgtgagtcttgcgatggtttatttgtcgttcgtgtcgtctttgcgagccaccaacatacctcgtgtncacaacacataccacacacattatcttctcataactcttctcactcnattaacaattttataattatagtgtgtatgtgagcattgcatatgaggacggcggggcggagttgggcacagaaaagaaacaaaacaagatgtatatcaaccacaagggcgcatgtgttgtagcgatcacctgttttatccccctacctcatttgtgtgcccgcgtcattttcctcntccgntgactgggggcgccgcatacatgaggctcgtgttatagtagtaggtagaagtggacggtgagttactttgagagtagtgtgtaagtgttgtgatantgtgtgggactaccacaacaggcgacgacataaagnccgcacaaccgctatcgatttcatccttattatactattntgngttntntttcctgtggttgtgtctgcgtgtcgttgtatatgcctccctgcaactagcagctcgcaagtagtgtattgagagttgtntatgtgtggtggtgtgtgatgtacacatcataataaacaccanaaaaaaaaacctacacaccaac

SEQ ID NO: 1104 - DNA, 1532 bp, Glycine max
  misc_feature (26)..(27): n is a, c, g, or t
  misc_feature (30)..(31): n is a, c, g, or t
  misc_feature (33)..(33): n is a, c, g, or t
  misc_feature (56)..(56): n is a, c, g, or t
  misc_feature (64)..(64): n is a, c, g, or t
  misc_feature (97)..(97): n is a, c, g, or t
  misc_feature (101)..(101): n is a, c, g, or t
  misc_feature (114)..(114): n is a, c, g, or t
  misc_feature (153)..(153): n is a, c, g, or t
  misc_feature (155)..(157): n is a, c, g, or t
  misc_feature (190)..(190): n is a, c, g, or t
  misc_feature (194)..(194): n is a, c, g, or t
  misc_feature (197)..(197): n is a, c, g, or t
  misc_feature (210)..(210): n is a, c, g, or t
  misc_feature (240)..(241): n is a, c, g, or t
  misc_feature (270)..(270): n is a, c, g, or t
  misc_feature (275)..(275): n is a, c, g, or t
  misc_feature (281)..(281): n is a, c, g, or t
  misc_feature (283)..(283): n is a, c, g, or t
  misc_feature (285)..(285): n is a, c, g, or t
  misc_feature (287)..(287): n is a, c, g, or t
  misc_feature (304)..(305): n is a, c, g, or t
  misc_feature (308)..(308): n is a, c, g, or t
  misc_feature (338)..(340): n is a, c, g, or t
  misc_feature (342)..(343): n is a, c, g, or t
  misc_feature (345)..(345): n is a, c, g, or t
  misc_feature (347)..(347): n is a, c, g, or t
  misc_feature (351)..(351): n is a, c, g, or t
  misc_feature (353)..(356): n is a, c, g, or t
  misc_feature (392)..(393): n is a, c, g, or t
  misc_feature (395)..(395): n is a, c, g, or t
  misc_feature (398)..(398): n is a, c, g, or t
  misc_feature (420)..(420): n is a, c, g, or t
  misc_feature (434)..(434): n is a, c, g, or t
  misc_feature (436)..(436): n is a, c, g, or t
  misc_feature (440)..(440): n is a, c, g, or t
  misc_feature (445)..(445): n is a, c, g, or t
  misc_feature (447)..(448): n is a, c, g, or t
  misc_feature (450)..(455): n is a, c, g, or t
  misc_feature (460)..(463): n is a, c, g, or t
  misc_feature (476)..(480): n is a, c, g, or t
  misc_feature (502)..(502): n is a, c, g, or t
  misc_feature (504)..(505): n is a, c, g, or t
  misc_feature (507)..(511): n is a, c, g, or t
  misc_feature (513)..(514): n is a, c, g, or t
  misc_feature (532)..(533): n is a, c, g, or t
  misc_feature (536)..(539): n is a, c, g, or t
  misc_feature (541)..(543): n is a, c, g, or t
  misc_feature (546)..(558): n is a, c, g, or t
  misc_feature (564)..(564): n is a, c, g, or t
  misc_feature (572)..(572): n is a, c, g, or t
  misc_feature (574)..(574): n is a, c, g, or t
  misc_feature (620)..(620): n is a, c, g, or t
  misc_feature (637)..(637): n is a, c, g, or t
  misc_feature (641)..(641): n is a, c, g, or t
  misc_feature (659)..(660): n is a, c, g, or t
  misc_feature (667)..(668): n is a, c, g, or t
  misc_feature (670)..(671): n is a, c, g, or t
  misc_feature (673)..(676): n is a, c, g, or t
  misc_feature (690)..(690): n is a, c, g, or t
  misc_feature (695)..(695): n is a, c, g, or t
  misc_feature (738)..(739): n is a, c, g, or t
  misc_feature (741)..(741): n is a, c, g, or t
  misc_feature (763)..(763): n is a, c, g, or t
  misc_feature (777)..(777): n is a, c, g, or t
  misc_feature (791)..(799): n is a, c, g, or t
  misc_feature (802)..(803): n is a, c, g, or t
  misc_feature (805)..(806): n is a, c, g, or t
  misc_feature (808)..(808): n is a, c, g, or t
  misc_feature (816)..(816): n is a, c, g, or t
  misc_feature (852)..(852): n is a, c, g, or t
  misc_feature (872)..(872): n is a, c, g, or t
  misc_feature (874)..(875): n is a, c, g, or t
  misc_feature (881)..(882): n is a, c, g, or t
  misc_feature (907)..(908): n is a, c, g, or t
  misc_feature (960)..(961): n is a, c, g, or t
  misc_feature (1109)..(1109): n is a, c, g, or t
  misc_feature (1290)..(1290): n is a, c, g, or t
  misc_feature (1297)..(1297): n is a, c, g, or t
  misc_feature (1475)..(1475): n is a, c, g, or t
  misc_feature (1509)..(1509): n is a, c, g, or t
  misc_feature (1523)..(1523): n is a, c, g, or t
  misc_feature (1532)..(1532): n is a, c, g, or t
  Probeset Number=SeqID_10883
gcgagtgctctggacttgtagagttnngtnngntgtataagtagaatgagagtgangtcacgtncagacactcttcctacgcttcctctttcactcncctncgctctgtactanatgcgtagattgctactaggtcatgtgtctctctatcanannnccacgatgtgtggcgccgtgtggctcgttggtnctcngtngtctgtgtcgtanagatcgtatatatgccaacaacgtcggtgnncttgatcgtatgttcactatctacttctnatatntcctcnanananaatggaagtatgtgctnncgncacatgctaggcgccttaagtcatcaaccnnncnntntnggantnnnntcatttagaagtagagttagtgtatagtgagcaccnncncancagtgatatgaagtactcatcnccaaacaaggtcgnanctgnttcgngnngnnnnnntttgnnnntgtgggtgttctnnnnnccttgatgatcgttgaggcgcnanncnnnnncnncgatgataggaggtggtnnggnnnngnnnggnnnnnnnnnnnnngagtantttggttntngggtcccccaccactcattcatcaacacacacacacaacaacaccncgagactgtgatccccnctcnttctctcccaccgtaccnncaccccnnanntnnnnttattatctacttnataanaattagataaactccaatacacaacaacaccacagcaaaccanncnccgcgctctgacgtatcctcanacaccaccggacancacgagaagagggnnnnnnnnnccnncnncncctccacngagacgtgtattctagatcttcatatatttatgcantcgcggtagtgttgtagtcntnntgtgtnngtcgctgtgtgtcgtctgcgctccnncgctcagaacgagaggctcatcatataatcgcacgcacatccacctcgccannacctccgcctcgtaggtatgtctgttcattgacaccgcatatatcctcgtcaaccagtaaacgcatgctcagaatagcaataacgctgtgactgggctcgcacgtgggtggtgcggagtatatagcaagggagagacacagagcgacnatataataaaatagcgtcatgatatgtatgcaagagataaaggaacccatcagccgacaccagacggcgagcatcacagtgagcaagaagagtttcttcttataatattaaatatatgttcctattatacacatcgctcgctctatactctggtagatatgcacgcatactccttccgganaagagcntgtgtggagcggcggggccgcgccggacgcgctctgcgatcgcgctcgtgatcaagctagtcgtacactccgcactattcccattgcctagtccaccctatctccgtgcgacgatcgacagtacccgcccacctctctaatgtagagcgtcgtggccatcttgcgcctcttctctccncgcgcacacgagctgcgcactactggagggaggnggggcgggggacgngaaaaaaan

SEQ ID NO: 1105 - DNA, 311 bp, Glycine max
  misc_feature (268)..(272): n is a, c, g, or t
  Peptide Sequence Number=SeqID_9286
  Probeset Number=SeqID_10884
gaactcagattctaaactggaagcagcggtttaacatcattctaggaacggcagaagggcttgcatatcttcatgaaggcactaaaataagaatcatccatagagacatcaaaagcagcaatgttcttctggacgagaatctcactcccaagattgcagatttcggccttgcccggtgttttggtggtgataagtcacatttgagcactggaattgctggaacacttaacattattgtcccagattgttcttattttggttcttattnnnnngaattgtttcattttagtctctaacatcttgttttagtt

SEQ ID NO: 1106 - DNA, 1919 bp, Glycine max
  misc_feature (1)..(18): n is a, c, g, or t
  misc_feature (1911)..(1919): n is a, c, g, or t
  Peptide Sequence Number=SeqID_9287
  Probeset Number=SeqID_10885
nnnnnnnnnnnnnnnnnnataaattcttcaataagctctcacattttgtgaccaaaataatactttaggaaaaaagaaaaaaatgtcatccactgctagcttgggttatggggctccaacctgcttcaacaacgttcatcacacaaagaagcagcaagcaatgaggaacagtttcttgagcaataagcacaacagtgtgagagtgatgaagggttggagaggaagacatggtaacactaacaacacatccaaaagggtaggaattgtgcagtgtagagggttaggggacttcataggtggagacttgataaagtttgatcttggacgttggctttcagatgttgaagagcacaaagcacttgcaatataccctcctcatgaaggaggctatgagggccgctacttgtcgcgtctcaaacgccaagggtactatttcctcgaccttacggctcgtggccttggtgatcctgaaaccaccctcaccaagattcaccctgtttgccctcctcatgttggcaagcagccaatagcaaggtggtatttcccaccagaagttgattacagattagaagcgttgccaccaaatgccaaaggattggtagtgtggataattgaagccaaggttctctctaaggcagaactgcagttcctagctttgctgccaacacttaggcctaatgtgagggtcattgctgaatgtggaaactggagaaagtttatgtggaagccacttaaagaaattgcgggactaacaaccagtgaggaagcttgatgctgctacattgctacttatcatctctgagttccaaccatcaacaatcaagtacaaatattaagtttattttctccaatttaaggcttcaaatagctgcagacaactgagacaagaaaggaagacaaagagatataggaaaaatcaagttccttgtaaataattagatctgccacaatcatgagtggcacattgtcaaggtttaattctgtcaaagcacaaaaatttcctaccaaacatgatattccagaaattccatttcaacaaatttttgcattaggccaatggagttacagaataatggtggtttttatggggtggttttccagcattttttatccgtataaaaccatatgccataaacagatggatcaactactggagatccttccatgtctgccttgtacaacctgtgataattattattagcagcagaactttaccatatattcttatgaaaatgaacttgaaaaataaaaaaaaaaaaaaaaaaaaaaaaaaaaaaaaaaaaaaaaaaaaaaaaaaaaaaaaaaaaaaaaaaaaaaaaaaaaaaaaaaaaaaaaaaaaaaaaaaaaaaagggggggcggccccccaattagttgggtcttcttcgacccgcggaaattaatttccgggcccgggtcacttggaggggcgaaccaatttttttccttataaaggggaggccgttttaagaactcttggcgcgaaaaacatgggcaaataagttggttcccctggggaaaaatatttttatcccgtttcacaaattcccaacacaaaattaaaaagcccgggaaagaattaaagatggaaaaaagcccgggggggggccttaaaagaggggggcgcctaaccccaacatattaatttgggcgttggcgccttaaattggcccctttttatcaagatggggagaaaactttttcgtggccaattttgtatttaaataaattcggccaccacccccccggggaagagggcttgttttgtttttatgtgcccccacgggtggttttttttttttttcccacaggaaaaagggcaccaaagttttgtttgccctttaaccgccttggccccttaaagagaatgtgaaaaaggcggccccccctttttttgtcccccacaagggcannnnnnnnn

SEQ ID NO: 1107 - DNA, 1552 bp, Glycine max
  misc_feature (1)..(1): n is a, c, g, or t
  misc_feature (5)..(5): n is a, c, g, or t
  misc_feature (60)..(60): n is a, c, g, or t
  misc_feature (79)..(79): n is a, c, g, or t
  misc_feature (82)..(82): n is a, c, g, or t
  misc_feature (88)..(88): n is a, c, g, or t
  misc_feature (192)..(192): n is a, c, g, or t
  misc_feature (217)..(217): n is a, c, g, or t
  misc_feature (352)..(352): n is a, c, g, or t
  misc_feature (437)..(437): n is a, c, g, or t
  misc_feature (503)..(503): n is a, c, g, or t
  misc_feature (640)..(640): n is a, c, g, or t
  misc_feature (766)..(766): n is a, c, g, or t
  misc_feature (975)..(975): n is a, c, g, or t
  misc_feature (1186)..(1186): n is a, c, g, or t
  misc_feature (1337)..(1337): n is a, c, g, or t
  misc_feature (1345)..(1345): n is a, c, g, or t
  misc_feature (1387)..(1387): n is a, c, g, or t
  misc_feature (1400)..(1401): n is a, c, g, or t
  misc_feature (1403)..(1403): n is a, c, g, or t
  misc_feature (1406)..(1407): n is a, c, g, or t
  misc_feature (1409)..(1411): n is a, c, g, or t
  misc_feature (1413)..(1414): n is a, c, g, or t
  misc_feature (1416)..(1416): n is a, c, g, or t
  misc_feature (1441)..(1441): n is a, c, g, or t
  misc_feature (1478)..(1478): n is a, c, g, or t
  misc_feature (1480)..(1480): n is a, c, g, or t
  misc_feature (1482)..(1482): n is a, c, g, or t
  misc_feature (1504)..(1505): n is a, c, g, or t
  misc_feature (1509)..(1510): n is a, c, g, or t
  misc_feature (1514)..(1518): n is a, c, g, or t
  misc_feature (1521)..(1521): n is a, c, g, or t
  misc_feature (1529)..(1532): n is a, c, g, or t
  misc_feature (1534)..(1535): n is a, c, g, or t
  Peptide Sequence Number=SeqID_9288
  Probeset Number=SeqID_10886
ntggncgtggcgacactcgcgacgcgcgcgatcgtctctgcgcgtctctcctgcacgcancccgggcgtccgcgtacgnctngtaccntgtccgagcggagatcgcgtcatagtgtcatcgccacgacgcaccgtgtgccgtgagagatggaagatgatcgcgcgcgtcaacatagcgtacgcgacgctcgnttctagcgcacgcacatctattcantctgcatatatgttgcgatcactgtgtagtgcgcacggcgcatgttgacactgcggctcgcttctgtgcggggtgtgtagattatatgtctccttccgctgcgtgctgtctattctgatctatgtcatacatctncctctcgggtactatcgtcatgacgtcgagcgcgtcggctcgagtcgcgctgtcttggttggctttcgtgtgtctttctctactnccactctcacccgcgcagtgcgctcgtccagtggctcgtgtgatcggcggacgacgtcgctacacntttcagtatgacaccacatacacacactcacgtcgtgtctgtgcgtcgtctcgcgtcgcggtgctcattaatttatatcttctctcgccctactccacatcactcatcatcggtcaatgcgccttgaggcagtatcntccgcttatgtagacgtgttagttgcttagtgtcacgctgagtgtagtcactagtaggctggtttaccgttcagtgtcttgtcgagtctgcgttccgcccgcatcgtccgtgctatatcgtgtatntcattacatcacaattgctattctgtataatgcttcgtcgtaccatttctcttctctactcctctgctacatataccatcttatatagtctcgtagaggttatttttcctatgatgttgtgtcactttatcctacactctcattcctcctctcctttccatcctcagtcactctagattgttttctgtttctgcagaccagctcacaangccacacaccataccatcgcgacaccgcgagcacgaccacgccagcactataatatattcatctatacatattgtgtgtgattatttccgtccatgtcaccaggccggcgtgatcagacgcacgacagaggacatttctatctggctctcatacatgtcatctcacacatcctctacactataagctaatcattcgacatatcttatacanaagagaagacgtatacatatatccaccatatccaatacaatatacacaacattacatacacatcacagagactacacatccacacgcactcaccacactcacactctatacaacacataacagacaatacaacaacacagacaacaagganaacaaaanatatacgctgctatccacacatatattctccctgttgtccgngggtttatgtttnntnttnntnnntnntngggtgttgggcgcaccaacttaacnacatcccctccaaccaccactacccccaaaaaagaantntnacccactctttcccaagtgcgnnaaanntgannnnnaanagcggggnnnngnngcaaacccacggaccaa

SEQ ID NO: 1108 - DNA, 1458 bp, Glycine max
  misc_feature (90)..(90): n is a, c, g, or t
  misc_feature (196)..(196): n is a, c, g, or t
  misc_feature (412)..(412): n is a, c, g, or t
  misc_feature (429)..(429): n is a, c, g, or t
  misc_feature (432)..(432): n is a, c, g, or t
  misc_feature (599)..(599): n is a, c, g, or t
  misc_feature (723)..(723): n is a, c, g, or t
  misc_feature (806)..(806): n is a, c, g, or t
  misc_feature (846)..(846): n is a, c, g, or t
  misc_feature (883)..(883): n is a, c, g, or t
  misc_feature (932)..(933): n is a, c, g, or t
  misc_feature (1010)..(1010): n is a, c, g, or t
  misc_feature (1087)..(1087): n is a, c, g, or t
  misc_feature (1222)..(1222): n is a, c, g, or t
  misc_feature (1232)..(1232): n is a, c, g, or t
  misc_feature (1315)..(1315): n is a, c, g, or t
  misc_feature (1343)..(1343): n is a, c, g, or t
  misc_feature (1360)..(1361): n is a, c, g, or t
  misc_feature (1372)..(1373): n is a, c, g, or t
  misc_feature (1394)..(1394): n is a, c, g, or t
  misc_feature (1410)..(1410): n is a, c, g, or t
  misc_feature (1414)..(1414): n is a, c, g, or t
  misc_feature (1427)..(1427): n is a, c, g, or t
  misc_feature (1442)..(1446): n is a, c, g, or t
  misc_feature (1451)..(1458): n is a, c, g, or t
  Probeset Number=SeqID_10887
acgcggcgagcgccactaggctcatattttcgacctccacgcgcgcaacgcacgccgccgacaggtgattgtcccgccacggcgcagacncgccagcacaccgcagagagaggtggttgatagtaatactggaggagagcgcggcgcaagtgtagacaagagaaaggaaacaccagacggtgtagtggcgggtggncttcaccgcaccgagtcggggcgcgcgcggcgcgcttcgtgcgcgccgccgccgctccgcctacgaacgcagattatacgacaccacaccaccgtcttataaacaccgagcgagggtacgatcaaaacaaagtatacgcagcggcgggggcgcacccataaagttaaataaccagcgccgcgcgaccggagcagataacgcgcggctggtgcgtanttgtgtgacctgccgangcngacgagccgcacgccactatacgttgtacataaatgagatagacgccagcgcggccgccgagtgttaagtgtattccgccgcaccagtcgccacagcatcaacggcggggcggtgggtggtataaggacaggccgcagcctgcaatatagtatacacccacaaacantagtagtgatgatacttgccccgcccaccacactaatacaatgaacggaacacagtcaccgcaaagacagaggatagtacagcagaaggcgttattcactccggcgcacccgatatcatatatnattcaacacaaagcaagatcttacgtgtaaccacccggtgtgtattatatgatttatcacagcggcgcgaacgtaggatgttngcgcgcgccgggatggctgtgtgcgcggaggagtaaggtngtaccgcggcgccgcggtgatgtcgggtgttttttcngcgctggcgggggggagagtgaccagccgggcgtgacatgccgacctannaatataacacaccagacgaaatctaacccacaaacacaaaaagaacagtgagagaaagacagaccaccaaccacaanaacacactgcgaggtcggccctccccccacagagcacgcgacttttggctcccctcttctctctaatacatcaatcncaaagcatgaaaaatagcagcacaaacacaaatcacagaagcaaaaagaaagaagtaagacaaagcaaaaagaggatactatcgcagcagatgcatgaggccgacgaggtcagagagcacagagaggttgaaaanagagagaganaaaaacaaataaggttattgtccccggccacccgtcttcgttttttctctacccccccctacacccacatctcgtcttacacnttttttctctcaccacggggggcggtgnagcgttgcggggggcgnnccgcgggggcnnggtctcggacccccggcggtnggtgtgggggtcggtntgtntttttgttggggngggggtggggggggnnnnnggggnnnnnnnn

SEQ ID NO: 1109 - DNA, 1469 bp, Glycine max
  misc_feature (18)..(18): n is a, c, g, or t
  misc_feature (23)..(25): n is a, c, g, or t
  misc_feature (33)..(36): n is a, c, g, or t
  misc_feature (38)..(39): n is a, c, g, or t
  misc_feature (42)..(42): n is a, c, g, or t
  misc_feature (45)..(45): n is a, c, g, or t
  misc_feature (74)..(74): n is a, c, g, or t
  misc_feature (78)..(78): n is a, c, g, or t
  misc_feature (81)..(81): n is a, c, g, or t
  misc_feature (83)..(84): n is a, c, g, or t
  misc_feature (87)..(88): n is a, c, g, or t
  misc_feature (92)..(92): n is a, c, g, or t
  misc_feature (115)..(115): n is a, c, g, or t
  misc_feature (336)..(336): n is a, c, g, or t
  misc_feature (483)..(483): n is a, c, g, or t
  misc_feature (561)..(561): n is a, c, g, or t
  misc_feature (621)..(621): n is a, c, g, or t
  misc_feature (685)..(685): n is a, c, g, or t
  misc_feature (783)..(783): n is a, c, g, or t
  misc_feature (910)..(910): n is a, c, g, or t
  misc_feature (1168)..(1168): n is a, c, g, or t
  misc_feature (1203)..(1203): n is a, c, g, or t
  misc_feature (1349)..(1349): n is a, c, g, or t
  misc_feature (1407)..(1407): n is a, c, g, or t
  misc_feature (1449)..(1449): n is a, c, g, or t
  misc_feature (1459)..(1459): n is a, c, g, or t
  misc_feature (1469)..(1469): n is a, c, g, or t
  Peptide Sequence Number=SeqID_9289
  Probeset Number=SeqID_10888
gtgggtggtgggccccgncgcgnnnggcgccgnnnntnntgnggngcgcgtcgcggtgttcctccctcaccccnaccnagngnnaannaagnatacaacatatagcggtgtacgntaggagcgacgctcacactcgcacggcgccgagcgtgttgatacgagataaaggtcgtttgtgcaccttctgctttctcttcttctgcgcggaaggagagagtgtgataaggatgtgacagacatcatgtacatacagcacctcccgcgacggcagtgggagcggttgcgtagtatctattgttagcgcacagagcggatatgcacatgctcagtggctcntgtcgtgacactcgaagcagaaatcttcgtggtcgcgccgtatgttcgtgcgacggatgaacactgcgcagcgagcgctcacccgagtctatatcagtcgctgagaggcacagactgattatcgctttaatactctagcgtgagacnctacagtgttaaagatacacaggtgatgcatgctcgtggggctcacagagcagagactactcagtataaaccactctncctgtacacctctctcctaatctcgccgaggcgcgcccacggcaacaccgcacgcacccnggcgcggtgaagcgaccgcacaaataatatctaccagaatgataatcgtatcccgtctccagtnactacatcatatctgtgacgagtgctagcgtatcgatcggtccgcaacatcgtccgcttcaagtacgctcgcacatgttgtgctcatgctgtatcggntcatgacgccacaactgtacgtataatcgcactccgggagaccgctcgccgttgccaagcccgcgcactactgtcgcgccctaccacagtcggtgcgtgagcggtccgtaccggtccgcgtgtatanagtgtattgtaaatcagtcaccacgtacggtatgaggtacatcaccctatctctgcacgcggggcgcagctatagcattccgcggcgagtatactgttagtcgcgcagcgcgcagcatcgtagctggtcgcgggcccacctcactactcccctgcacgtgaatagactggcagcggcgctcttcgatgtgagctatgtatattatccagtacgctatctgcatcaccggctgagctacgcaccgtagtgtcgagctcncgcgcacggcgcagtacgctagcgccgtcgcgcgntgcgcctcagctcacggcttcatgactagctccacgctctgatgtcgactcacacctctatgtgatctatctagctgcgtgagctgtcagccgcactatttgctatctcttatcgcaccaagccgacggcccgtgcgactacgagntacatactcacgcgtcgctgagcgcgagcgacacaacgacgccgtgcatcacacacanactcgccacgccgtatccacgaacccagacaaccctcgtgcncgtgtctacngtactcgctn

SEQ ID NO: 1110 - DNA, 286 bp, Glycine max
  Probeset Number=SeqID_10889
tatgccagaaggcctttaataactgtgaaactaacagcaatagtacatgaggagcaggtgctctttattccgcgccttgccgacgagcaaggataaaaaccatttctaacacacatccatctgctgaatatcgcccgacgtatagaaggcccacctttgcatgaacgggcatatcgctgatctataccacttgaggttagaagaacaagaatctgagatgagaccacttcttattcttgtgatcgtgggcacctgcatggtcattggccacaggatctataccccc

SEQ ID NO: 1111 - DNA, 775 bp, Glycine max
  misc_feature (775)..(775): n is a, c, g, or t
  Peptide Sequence Number=SeqID_9290
  Probeset Number=SeqID_10890
gcgggggagaaggggggattttttattgagaatgaaccgccgttatcgcccctacaaaaagggccctttgccatttcgttacgtcatgctgcttgcgatcttattctttgtgctctcaaccgtaattagtttattttttatcaaccgatccattaaaccaacccttattcacattgctgaactagaaacagagcgcatcgccaatcacctcatacaatattcagtacaagactttgcagacgatcaggagaatatgaaggatatggtggtcatgaatacaagtgagaatggaaaagtgacgaccattgattttaatgcgcaagcaacatcgaaagcaatggctgacctctcgcgtcatcttcaaaaaaatttagaggacattgaaaaggggaactttcaaaaagaggcaaaagaagcattaaaggatcaaacagatggacatgacggcattatatataacattccgcttgggcaagcgtccggaaatgcactcattgccaacctcggaccaaaagtgcctgtacgatttagtgtgattggtgatccgcatacggacgttgaaaaaaacattaagccttatggcatcaacaatgccttgattgatattagtgttctgatcgaggtcaaggtaagagtcattatcccatttgcctctgaaacaatcgtagtcaaaaactctgtacctgtctccatacaagccgttcaaggagacgtaccagattattataatggcagcggaacaaactcaggcgctccaccaattgttctcccagan

SEQ ID NO: 1112 - DNA, 954 bp, Glycine max
  misc_feature (954)..(954): n is a, c, g, or t
  Peptide Sequence Number=SeqID_9291
  Probeset Number=SeqID_10891
acaaaactaacaactaatatttgccgataaaaaaaacacattctctcatgttgggggtatcagattggtctatatgtttagtctccatctactcaatttctcagaagctgatatatatgttttcattgatggaaataaaaccatgttatattactgtatttggcagcattgattttaagataagaaccattgaacttgatggcaaacgcattaagttacaaatctgggatacagctggtcaggagcgatttcgaactattaccacagcttattaccgtggagccatgggtatcttgctcgtttatgatgttgctgatgaagcatctttcaacagtaatctcctttcctgatcacattcaaattattctgatatttttctgtacttatttatggactaatgcatgagagtatttatcatatacttttttcagcttcagctgacccttcaaattgtgttttcttctttctcccccctcaccccattctcttgttacctttgactgtctttctgtgtatttaggttgaaatatgtcgacaaatgaatctgttttttatggttaagtttcttttgtccatttttccttcctttcatttttaatatatcttgcttctatctgttaagatattagaaattggattcgcaacattgaacaacatgcttctgacaatgtaaacaagatacttgtgggtaacaaggctgatatggatgaaagtaaaagggctgtgcctacctccaaaggtcaagcccttgctgatgagtatggtatcaagtttttcgaaaccagtgcaaagacaaacatgaatgtggaggaggttatcttttcaatagcacgagatatcaagcaaaggcttgctgacacagattctagagctgaacctcagactatcaagattaaccaacccgaccagacagctacagggggtcttgcggctcaaagatctgcttgctgtggn

SEQ ID NO: 1113 - DNA, 863 bp, Glycine max
  Peptide Sequence Number=SeqID_9292
  Probeset Number=SeqID_10892
cacgagaccattacctagaacatcctaatcgaaaaaagggttaaaccgtgcatgaacaataaaaaaaataatggagtcttggaggattagtctagtggcgatagcaatagcattactaatggctacgttggtgtcagctggtgaggataaggcgaaagataaggaagagtgtactgagcagcttgtgggtatggccacttgtcttccttacgtgcaaggacaggcaaagactccgacgccggactgttgctccggcctgaaacaggtcctcaaatccgacaaaagtgtctttgtgtaatcatccaagacaggaatgatcccgacttgggtctccagatcaatgtgtctctcgctcttgctcttccttctgtttgccatgccgttgctgacgtcactaagtgccctgctttgcttcacatggacccaaaatctcaagaagcccaagtgttctatcagctagcaaatggtttaaacaaaaccggcccagcctctgctcccaccatttcggcccctgcgcccaccagcgtatctccaacccgcaggatccgaggatggtaacaacagtggtcgggcgacctctttgccaagcaagaaccacgctcagagctttcggaaacgatggctagtgcttgaagttgctgcctatctcttcataatatcatttactatcaccttataaaagtaatattgaaaagtaaatttgtgcgcttgcagtgacgttgattttgtgcagttactttcgtttcgtgagaactcttctcaacctttttttgtctaatgcaaaataagacgcgagttacaatttttgtattgtctcgtatgcttttatcaatttttattttaaatcaaaaaaaaaaaaaaaa

SEQ ID NO: 1114 - DNA, 385 bp, Glycine max
  Peptide Sequence Number=SeqID_9293
  Probeset Number=SeqID_10893
tcgaagcaaacaccacaaagaaataaacttttaataactaatcctctcagacaacaatcttcagagtttcatctgtaaaatggcatcaccaaagtcaccaaccagaccgacccaacaaaacccagaacccagtttccacgatttcctccctgccatggccgggaagctaggaggcgagggtctgatcggagagctctgcaacggattcgagctgttgatggaccgagagaaaggtgtcatcacgttcgagagcctccggcgtaacgcggcggcggtgctgggtctcggagatctgacggacgaagacgtaaggtctatgatcaaggaaggggatttcgactgcgacggggcgttgaaccagatggagttctgcgtgttgatgttt

SEQ ID NO: 1115 - DNA, 813 bp, Glycine max
  misc_feature (2)..(2): n is a, c, g, or t
  misc_feature (6)..(6): n is a, c, g, or t
  misc_feature (9)..(11): n is a, c, g, or t
  misc_feature (14)..(14): n is a, c, g, or t
  misc_feature (16)..(16): n is a, c, g, or t
  misc_feature (112)..(112): n is a, c, g, or t
  misc_feature (139)..(139): n is a, c, g, or t
  misc_feature (167)..(167): n is a, c, g, or t
  misc_feature (209)..(209): n is a, c, g, or t
  misc_feature (365)..(365): n is a, c, g, or t
  misc_feature (369)..(369): n is a, c, g, or t
  misc_feature (371)..(371): n is a, c, g, or t
  misc_feature (382)..(383): n is a, c, g, or t
  misc_feature (392)..(392): n is a, c, g, or t
  misc_feature (398)..(398): n is a, c, g, or t
  misc_feature (401)..(401): n is a, c, g, or t
  misc_feature (403)..(403): n is a, c, g, or t
  misc_feature (418)..(418): n is a, c, g, or t
  misc_feature (440)..(440): n is a, c, g, or t
  misc_feature (446)..(446): n is a, c, g, or t
  misc_feature (449)..(449): n is a, c, g, or t
  misc_feature (452)..(452): n is a, c, g, or t
  misc_feature (454)..(454): n is a, c, g, or t
  misc_feature (459)..(459): n is a, c, g, or t
  misc_feature (465)..(465): n is a, c, g, or t
  misc_feature (476)..(476): n is a, c, g, or t
  misc_feature (485)..(488): n is a, c, g, or t
  misc_feature (498)..(498): n is a, c, g, or t
  misc_feature (500)..(500): n is a, c, g, or t
  misc_feature (512)..(512): n is a, c, g, or t
  misc_feature (523)..(523): n is a, c, g, or t
  misc_feature (535)..(535): n is a, c, g, or t
  misc_feature (537)..(537): n is a, c, g, or t
  misc_feature (543)..(543): n is a, c, g, or t
  misc_feature (547)..(547): n is a, c, g, or t
  misc_feature (550)..(550): n is a, c, g, or t
  misc_feature (553)..(553): n is a, c, g, or t
  misc_feature (560)..(560): n is a, c, g, or t
  misc_feature (563)..(563): n is a, c, g, or t
  misc_feature (565)..(565): n is a, c, g, or t
  misc_feature (567)..(567): n is a, c, g, or t
  misc_feature (570)..(570): n is a, c, g, or t
  misc_feature (579)..(579): n is a, c, g, or t
  misc_feature (589)..(589): n is a, c, g, or t
  misc_feature (598)..(598): n is a, c, g, or t
  misc_feature (602)..(602): n is a, c, g, or t
  misc_feature (604)..(604): n is a, c, g, or t
  misc_feature (607)..(608): n is a, c, g, or t
  misc_feature (612)..(613): n is a, c, g, or t
  misc_feature (619)..(620): n is a, c, g, or t
  misc_feature (623)..(623): n is a, c, g, or t
  misc_feature (626)..(626): n is a, c, g, or t
  misc_feature (630)..(630): n is a, c, g, or t
  misc_feature (632)..(632): n is a, c, g, or t
  misc_feature (636)..(636): n is a, c, g, or t
  misc_feature (642)..(642): n is a, c, g, or t
  misc_feature (647)..(647): n is a, c, g, or t
  misc_feature (654)..(655): n is a, c, g, or t
  misc_feature (657)..(657): n is a, c, g, or t
  misc_feature (664)..(666): n is a, c, g, or t
  misc_feature (671)..(672): n is a, c, g, or t
  misc_feature (677)..(677): n is a, c, g, or t
  misc_feature (679)..(679): n is a, c, g, or t
  misc_feature (681)..(681): n is a, c, g, or t
  misc_feature (684)..(685): n is a, c, g, or t
  misc_feature (695)..(696): n is a, c, g, or t
  misc_feature (699)..(699): n is a, c, g, or t
  misc_feature (702)..(702): n is a, c, g, or t
  misc_feature (705)..(705): n is a, c, g, or t
  misc_feature (718)..(719): n is a, c, g, or t
  misc_feature (727)..(728): n is a, c, g, or t
  misc_feature (730)..(732): n is a, c, g, or t
  misc_feature (734)..(734): n is a, c, g, or t
  misc_feature (736)..(736): n is a, c, g, or t
  misc_feature (741)..(741): n is a, c, g, or t
  misc_feature (745)..(745): n is a, c, g, or t
  misc_feature (748)..(748): n is a, c, g, or t
  misc_feature (762)..(763): n is a, c, g, or t
  misc_feature (768)..(768): n is a, c, g, or t
  misc_feature (773)..(775): n is a, c, g, or t
  misc_feature (777)..(777): n is a, c, g, or t
  misc_feature (779)..(780): n is a, c, g, or t
  misc_feature (786)..(786): n is a, c, g, or t
  misc_feature (789)..(789): n is a, c, g, or t
  misc_feature (793)..(793): n is a, c, g, or t
  misc_feature (806)..(806): n is a, c, g, or t
  misc_feature (808)..(808): n is a, c, g, or t
  misc_feature (812)..(812): n is a, c, g, or t
  Peptide Sequence Number=SeqID_9294
  Probeset Number=SeqID_10894
gngggnttnnncgngnaccggcccccctcgagtcagctacgtaggccccccccccccggcctctctgatgatggatttgagaaaatttctggtcttataaacttgaagaggntaagcctggctgttatcaggatctcantatgcttgcttagcttcatctgaaaganttaacaaatttggagtatttgaatctggattcttgcaggatnggtgatggctgggctagctattttgacaggcctcactctcttgaaaagtctcggtgttgtctgacactgacattggtaacagtgggctgcgctatatatcaggaataataaaactaggatgatttaaatgtagctatacaccacataaactgatantggncngaaaaggcagnnaggatatgncacaanatnantcactttatctggangcccgacatattacctatgcangactancanatntnaccantgtgantggattgatancattgaatnnnnttgaagcacncngttatactctgntaatacatttnttccgatcggtntnaacttntagntcnttnaatatgnggngntnganaactgatcnggctaaaaanaatgaaaantatntntcnncacnnttaacnnggnctnatcntnattngctgtntactntgatttnngnagaatgnnnactgnnggccnantnggnnatatctgcgnnganatntgnaatacggataaanntgtataanntnnnantnatggntttnggntatacttggttaannaattnaaggnnnantnnaagttncanaatngagattattttgntntttnt

SEQ ID NO: 1116 - DNA, 1908 bp, Glycine max
  misc_feature (6)..(6): n is a, c, g, or t
  misc_feature (20)..(20): n is a, c, g, or t
  misc_feature (25)..(26): n is a, c, g, or t
  misc_feature (30)..(32): n is a, c, g, or t
  misc_feature (34)..(34): n is a, c, g, or t
  misc_feature (41)..(42): n is a, c, g, or t
  misc_feature (44)..(44): n is a, c, g, or t
  misc_feature (46)..(47): n is a, c, g, or t
  misc_feature (50)..(50): n is a, c, g, or t
  misc_feature (52)..(52): n is a, c, g, or t
  misc_feature (63)..(64): n is a, c, g, or t
  misc_feature (66)..(67): n is a, c, g, or t
  misc_feature (94)..(94): n is a, c, g, or t
  misc_feature (96)..(96): n is a, c, g, or t
  misc_feature (98)..(98): n is a, c, g, or t
  misc_feature (101)..(101): n is a, c, g, or t
  misc_feature (121)..(122): n is a, c, g, or t
  misc_feature (127)..(127): n is a, c, g, or t
  misc_feature (129)..(129): n is a, c, g, or t
  misc_feature (131)..(134): n is a, c, g, or t
  misc_feature (136)..(139): n is a, c, g, or t
  misc_feature (146)..(149): n is a, c, g, or t
  misc_feature (153)..(154): n is a, c, g, or t
  misc_feature (160)..(161): n is a, c, g, or t
  misc_feature (163)..(165): n is a, c, g, or t
  misc_feature (167)..(168): n is a, c, g, or t
  misc_feature (170)..(171): n is a, c, g, or t
  misc_feature (173)..(176): n is a, c, g, or t
  misc_feature (178)..(185): n is a, c, g, or t
  misc_feature (187)..(187): n is a, c, g, or t
  misc_feature (200)..(200): n is a, c, g, or t
  misc_feature (202)..(202): n is a, c, g, or t
  misc_feature (207)..(207): n is a, c, g, or t
  misc_feature (210)..(212): n is a, c, g, or t
  misc_feature (222)..(222): n is a, c, g, or t
  misc_feature (230)..(231): n is a, c, g, or t
  misc_feature (233)..(233): n is a, c, g, or t
  misc_feature (242)..(242): n is a, c, g, or t
  misc_feature (247)..(249): n is a, c, g, or t
  misc_feature (252)..(252): n is a, c, g, or t
  misc_feature (259)..(259): n is a, c, g, or t
  misc_feature (262)..(262): n is a, c, g, or t
  misc_feature (275)..(275): n is a, c, g, or t
  misc_feature (279)..(279): n is a, c, g, or t
  misc_feature (282)..(283): n is a, c, g, or t
  misc_feature (285)..(285): n is a, c, g, or t
  misc_feature (290)..(290): n is a, c, g, or t
  misc_feature (442)..(442): n is a, c, g, or t
  misc_feature (490)..(490): n is a, c, g, or t
  misc_feature (501)..(501): n is a, c, g, or t
  misc_feature (520)..(520): n is a, c, g, or t
  misc_feature (735)..(735): n is a, c, g, or t
  misc_feature (832)..(832): n is a, c, g, or t
  misc_feature (934)..(934): n is a, c, g, or t
  misc_feature (1008)..(1008): n is a, c, g, or t
  misc_feature (1010)..(1010): n is a, c, g, or t
  misc_feature (1055)..(1055): n is a, c, g, or t
  misc_feature (1082)..(1082): n is a, c, g, or t
  misc_feature (1244)..(1244): n is a, c, g, or t
  misc_feature (1308)..(1308): n is a, c, g, or t
  misc_feature (1312)..(1312): n is a, c, g, or t
  misc_feature (1315)..(1315): n is a, c, g, or t
  misc_feature (1332)..(1332): n is a, c, g, or t
  misc_feature (1469)..(1469): n is a, c, g, or t
  misc_feature (1474)..(1474): n is a, c, g, or t
  misc_feature (1506)..(1506): n is a, c, g, or t
  misc_feature (1516)..(1516): n is a, c, g, or t
  misc_feature (1526)..(1526): n is a, c, g, or t
  misc_feature (1551)..(1551): n is a, c, g, or t
  misc_feature (1558)..(1558): n is a, c, g, or t
  misc_feature (1662)..(1662): n is a, c, g, or t
  misc_feature (1681)..(1681): n is a, c, g, or t
  misc_feature (1689)..(1689): n is a, c, g, or t
  misc_feature (1698)..(1698): n is a, c, g, or t
  misc_feature (1711)..(1711): n is a, c, g, or t
  misc_feature (1717)..(1717): n is a, c, g, or t
  misc_feature (1765)..(1765): n is a, c, g, or t
  misc_feature (1846)..(1846): n is a, c, g, or t
  misc_feature (1886)..(1886): n is a, c, g, or t
  misc_feature (1908)..(1908): n is a, c, g, or t
  Probeset Number=SeqID_10895
tttttnggggggggtgttgngttgnntggnnngnggggggnngngnngtntngtgtgggtgtnntnntggtggtgtgtgtggggtggtgtgggngngntgntgtgtgtgtatgttgtgtgnnggtgntntnnnntnnnntcgggtnnnntttnnggttanngnnncnnanncnnnnannnnnnnntncgtcggtgtcgangntgtgnttnnnactagtgttntgttgtgnntnacgttctangttcnnnctnttgcatntanagttggcttgagntcgnatnntnatctncaatattgtggtatagactgtacatcgtataagatacgacagagagcgcggtaggcagagtagtcgagtatacacgtcacgtgccactcacgtacacagtatcagagcgctctgtttaatggcgatgggctgtctgcactgagtgtcactcncaactagacctacgaatgacaatgaatgcacagacgctcaagataacnactaagacaanacggacaaacaacactccngaaacatgacatcacagcgacgagacgaactcagcgtattgtcataatgttcacgtagtacatcactactccgagctattgcctacgtcttctatctcctactattattatggttgagtgtggaagagtaatgcttgtcgatgtatagactaatagagaatagatatgagagaatcgacatgcgacgcagcaacgacaactaatgacacacacanatcgacaggagacacgataggaagatggagaagagcaagcaggcacacaatatcataaatctcacataacactatctcacgtattactatagtgacnttcgatattgctataatcatattcttgtatcatcgaatttcgtatcttatatctctatttaactttattatacgtagagcatagtattcgtggttcgtgtgnatgtctagatgagcgaagctgactagctgtgtgaacacactagactattactctccatataacgaggccaccgntnctcgcgccataggcacgactccgcgtgagtgatgcgcgccgcgantgctcgcgcgacgtacgcgcgctgctntcacggatgtgagacatggatgaacgctgcgggctatgtgtatcacttgacaaaggctgcagcgcaaatcacagtggcggcgcgccgttctgctgttcggctcttccttcctctcctcctctcctcacgctcgggctcgcgagtgtgaattcggtctagctnctcgtagcattgtgatagtgcgtggaagatgatggagacggatgcatacaacacatacgaccangcantcnagtgtagtgatgtgagnatactcgctatgttacagtgagattataattgatatatgacaatatctacatgtctgtatagtgataattatgactgtgatatcatactaatgctcctcttgtcgcatatatacttacatatctatctgacgaacgnccatncgcgtgcctctctcgcgcatctggtgtcgtantcgctcatcnccatagcagncatgtagtgcatgtgcattggcccngctgacngtgtctatgtctcgatcgtctgtcgcgctctatcttctacactgcatcgactcactacggctggcggcgaccacgcctctcacacctcgcggcgctacatcgcntactcgtcttcgtaggtancagaagancataaacancgatgcagagtgngctganagttagataagatgaacatataatagcagcatgcagagctggacatancatatcacgccgtctcactagcagatacaaccgcagagatcgtcgttcagcagctatcgatcgcgtcctcgaccgcgagcnaccatactgctgcgtcgcattcgctctcatgtcagacggnctacagcagtagttctcgacan

SEQ ID NO: 1117 - DNA, 775 bp, Glycine max
  misc_feature (1)..(102): n is a, c, g, or t
  Peptide Sequence Number=SeqID_9295
  Probeset Number=SeqID_10896
nnnnnnnnnnnnnnnnnnnnnnnnnnnnnnnnnnnnnnnnnnnnnnnnnnnnnnnnnnnnnnnnnnnnnnnnnnnnnnnnnnnnnnnnnnnnnnnnnnnnnnttgcgtgtaggtgtgaatcaagaaccgctctgctatggctgctctgcaatacttggaatcgctgcgcaattcgcaccctgagctctccgataggtacaattcgctggcggatctgtaccagaagaagctctggcacccagctcactctcaagctcgagtagtttgtggatctcgccgccttcccagctggtgatgctttaataccattatatcacaatttcttcacagacttttgagacgataatcacccttcctcaagcttgcacattttgctggtcatagtcccccggccggattctgaaaaagaagctgcctgctggtaatcttggagggtgcattccgaaacctccaagaccctagggagcagcgccataaaagaaccttttccttttacgcttaagaaggcaaatagcaatattccagcttgagcaagggggttcaaaaggaatggcaagaaacttcctaaaaaatgggaagagtacacctcgccagcgcttggacaaaatttggaccccatcgggaatttgcctagctattacctgggtaatccttctcaattttataaagaacttgccaaaaaatttgcgcgaagtccttaaaaaaggtgcccctttccttatattgggccaacccattccgtggggattttccttccgagattttttttaaggtt

SEQ ID NO: 1118 - DNA, 685 bp, Glycine max
  misc_feature (1)..(1): n is a, c, g, or t
  misc_feature (623)..(685): n is a, c, g, or t
  Peptide Sequence Number=SeqID_9296
  Probeset Number=SeqID_10897
ntgagctgtacgctcccccgagatgctggccgcgtctagaactacaggatcccccgggcatgcaggaattcccactagaccattacccccctcctcttcctcctttaaggcaaacacgcatttatgcaacacacaccacttgcaagtagctattatactccattaccatggcatgcaattgcaattccaaccaacctcctcctccagttgaaatggagaatttcccccctactcctcctcccactcctaacattgaagagacctgtcctgaaatggatgttatggagatggagtttgaagaagagttttcttttccagttgttgttgttgctacagaggaaaatgctcctaatgcttttactgaagagaagcctgcagaagacaaaaatgcgaacccgaaggaagcaagtcctaacgatgatgattgatggggtctgcaggaagcagaaggcagtttgagatgcttgggtgcatctgccaactataacagacaagaacactcttgtttgatttaagactttgccgttctagttttttctttatttcgttttaaatttatgaattgcctgtaaggaaaattctaattgatggagtgatgagcttctcgtatcgataccgtcgtnnnnnnnnnnnnnnnnnnnnnnnnnnnnnnnnnnnnnnnnnnnnnnnnnnnnnnnnnnnnnnn

SEQ ID NO: 1119 - DNA, 552 bp, Glycine max
  misc_feature (486)..(486): n is a, c, g, or t
  misc_feature (552)..(552): n is a, c, g, or t
  Probeset Number=SeqID_10898
ttttttttttttttttttcttttttttttttttttttttttttttttttttttttttttttttttttttttttttaaccccaaaacaggggaagttttttttgggaggaaaaaattcggaagggggggagttaaaaaaatcgggggggttagccaaattatattttaaaaccccccaaacccggtttcaaaattttcaaaaaaaaaaggggggggaaaagtccccggaccattctattgggaaaaaaaaaaaaaaaaacccccattttttgaaacttttaacaaaaaaagcccaagggttgatccccttgaaaactgacccctaggctatcaatggccttgccgtggaattttccccaaggaacttttaacatttttggaacccaaaattttcttcttcccaaaaaacctttgaacccaaaatcgtgatagttaacgtggttttcctcccccccttcctaaaccttttctttttccctttcccttnccccttcctctttgccccttttgaaggcgggggaaaaaaacccttttatatggaaaaatctccttn

SEQ ID NO: 1120 - DNA, 1922 bp, Glycine max
  misc_feature (156)..(156): n is a, c, g, or t
  misc_feature (283)..(283): n is a, c, g, or t
  misc_feature (460)..(460): n is a, c, g, or t
  misc_feature (528)..(528): n is a, c, g, or t
  misc_feature (613)..(613): n is a, c, g, or t
  misc_feature (869)..(869): n is a, c, g, or t
  misc_feature (1111)..(1111): n is a, c, g, or t
  misc_feature (1173)..(1173): n is a, c, g, or t
  misc_feature (1541)..(1541): n is a, c, g, or t
  misc_feature (1855)..(1855): n is a, c, g, or t
  misc_feature (1881)..(1882): n is a, c, g, or t
  misc_feature (1888)..(1888): n is a, c, g, or t
  misc_feature (1890)..(1890): n is a, c, g, or t
  Peptide Sequence Number=SeqID_9297
  Probeset Number=SeqID_10899
ctggtcactgctctaggattctaatgtagtgtataaccgcgcgcgcgtcgccgcgctccagtcacttgactgcagatacttgcgggcgcgcgctgcgacatatgcatgatatataacagtgcgcaagcggtgactgcgatcgtgatgagaagatantacacataataacggagtcgcgcacatatatagagcgacgtgaggtagaggtagtgcgcgtactgagaatatatcgatcacatgtagttaccgatgttgcgagatccgctcaagattataagtaggnggacgagtaggattgcggacgcgcagctcacgctcgatagttatatattaagtctgacctcagattcttcttctccaccatacacagtgccatggttcctcctaattatgacgtggtacatcatgcgcggcgtcgccgctcgtcgtgagagatgagatcataatatatatataattnatctggacggtgcggtgatgataaataaagtatgcgagtcgcatgtgcgtcagcatactctcgatatnataatatcatgtatcacacgcacgttcacactcgcatgttgcgtgctgtagttgtgcgctggtatgcagttcaatactgcaatcngagtatgatactacagacaactctgagtgctcgcgctgaggacgctggtgcggataaatagagtcacggagagccatataggccggcgcagtctgccggagtacatcatattaataacatattctagagatacatgaagcggtggtgtatgttctagatttctgtagtgctagcgatatcgagtacgagtcgcgacgagtaattacagagataatactagtgagtattgctaatatgcgtgcgctgggataagcancagcgctgtgcggtcgctcagtggtcgacgtgtgcgctctagattcacacacagacgttatataatccgggagatacatacgaacaccgcggtcgggagtcgacatcgcgtcagtcgggcagtctgaacgtccgttgcgagtagtaaatataactattgcaatcataaatactggatgtgcgtgggtgggtattattacgagtagatatagcacagacagtggtactcatacccatctagcngctgttattgtcctactacaccgtcatcgtgcgccacatgttccaagtgtatacatagtcgnacggtactatagaggaagccgagcggcactgatgagtagaagtgcgcatctggctgaagcagagtcagacccgatagagcgggcggctgaactacaactccgcgctactatctgtgtgcaagagtcggtgcgctgcgcgttataataacgatgaggtgcattgtattgatgacaaatgtatacgaagtcattgtacgcgctgaataacacattataagacaatagacacgggtcgaggcggtggtgaatacatgtgcgtgagacgtgaaggaaataatagtaatcacattctgttcggtgactatgggcggtgatagggcgagagatgacgctccgagatcatcatcacagcatagctgatatatatnacaactcgcgagccgccgcgctgagctcggtgtactatacggattggtcttgtatatctgtcatcatcggccgatgggtctaagcgcgccgacgaaatctatatgaactataaaatacaatagtgtgagttatgatagaaataaaacgcgagaaacgatgtcgaggatggtcggtcggaacagagatacgagtgacgatctacatataccgacgaatacatgagtgctcacagaatcagcgcgacaactacgtgtccttctgatcacttcagatgtatatatagaattctatatatcagggcacgactctgcgngggcactagagatatgagttgtgaannaaatananaagtcgtgagaacaccggtgctggtcgcatac

SEQ ID NO: 1121 - DNA, 1894 bp, Glycine max
  misc_feature (804)..(804): n is a, c, g, or t
  misc_feature (1048)..(1048): n is a, c, g, or t
  misc_feature (1078)..(1078): n is a, c, g, or t
  misc_feature (1090)..(1090): n is a, c, g, or t
  misc_feature (1305)..(1305): n is a, c, g, or t
  misc_feature (1382)..(1382): n is a, c, g, or t
  misc_feature (1389)..(1389): n is a, c, g, or t
  misc_feature (1405)..(1405): n is a, c, g, or t
  misc_feature (1440)..(1440): n is a, c, g, or t
  misc_feature (1531)..(1531): n is a, c, g, or t
  misc_feature (1550)..(1550): n is a, c, g, or t
  misc_feature (1586)..(1586): n is a, c, g, or t
  misc_feature (1593)..(1593): n is a, c, g, or t
  misc_feature (1705)..(1705): n is a, c, g, or t
  misc_feature (1757)..(1757): n is a, c, g, or t
  misc_feature (1838)..(1838): n is a, c, g, or t
  Probeset Number=SeqID_10900
tgtcgccgccccgcatcacggccccgtcccctcctttaggagagaggtagtagaggatggacgtaatgatgaggtgggatatggaatttaagaaggatagtcccgggtggagggtgagccgacgggtcgtgcactcacgcaccccagttgatagcacgaacagagcagacgcgacttctatcgccggaatagagcgtggagagacccccacggatacagactttacttacccaatgatacgtataacagcggacgtgtgtgttgtccaccgtcctgcacgatccgtcaacaaatcaacgtcaccctcactcactctacccattatagtcagtacgtcttcagctacagcgcctgtgacgtaagcgctaggcctcgcagatatgcagttgatattagcagtatatgggagttcaaatatcatatcactcctgcagaataataactcacttaactcgatataactcgtagcgacactcgcggcgtataatgcatcaatatatcaatatgcgcccgcgagcgtcggtttctctatatctggtgcgcgacccgtctaggaacgcctgtcaggcagagcttgtcggcctcaacacgtaacagccatcgtagcttcgacactacggcgcatgtgagcactcgtatatccgcatctgcgcgtgagcttctcggttgtcgtcctgaggcggttgtgtgctactcagctgcaagtctaataatatgctcgatgaccgatgacgaatacacggtaagcatcttcggtgagaacgaacgtaatctaatgacgacataacgatctcagcggcaacncactcgttgtcccattatatttcataacgctgtgagcagcgatgtattattcgacgcacagaaagagataaggtagtcagatggcgaggcgtgatagacgtcgcatctacttcgtagcttagccactagtgatgataacagcgcagactgtactcgcatggcacgtcagacgtggtctatgatgttcagcgcagtgtacgtctctgctagatatgaatcgtcagattagatcgcggtaattgtnccatctcacatagagcatacgatgcgactnagcgcgactgtnattgcgtgatattgttgcagcaatcgtgacactgctcgttgacgaaattggcgcacgccgtaaggcgtagttgatgatcacgttgtatgactgacgaatatactgtgcactgcatttattactgtctcgtctcacagcttgtaatgatacttagtatctgcatcgcagcgaactatagaatcaccacgttataggcgataactagttgtcagacnccgcgctggtgtcctgctacaagcttatattatatatcctgtatcatgtcatgctaccgacgattgctacgtcacgnacgctcngtatctcatatcaggntgagccagctgtcacgggtgcgcggacacgagtgncaacgtacgctatcgtgtgatctctgctagataagacgcctgcgtgtacgtacgcagtctgtgctcagacctactacgacgtcaccgatcnacgcctatcacagatcagngacaactgggaacgtggagatgtagtgcgcgcgcantagtaanaatatgcgctgaccgcatagtgtgactactatagacactccatgactgacatgatgatacgatcgtacgtcgtcgacatcgagagtaatcctgtactagtgcgaatggacgnacacatgcatgtacactcccatacgcgacgtgattgcgcgtcgttacacatnactgcgactgttatacatgcgggtcatttgataagatggacatacaggtcgtgtactataccgtcatcgagatgttaggantagtgggagagtgcaaagacatacttgcaagttttactcatgccagcctgcatggg

SEQ ID NO: 1122 - DNA, 1842 bp, Glycine max
  misc_feature (15)..(15): n is a, c, g, or t
  misc_feature (74)..(74): n is a, c, g, or t
  misc_feature (78)..(78): n is a, c, g, or t
  misc_feature (89)..(89): n is a, c, g, or t
  misc_feature (108)..(108): n is a, c, g, or t
  misc_feature (248)..(248): n is a, c, g, or t
  misc_feature (332)..(332): n is a, c, g, or t
  misc_feature (435)..(435): n is a, c, g, or t
  misc_feature (552)..(552): n is a, c, g, or t
  misc_feature (1792)..(1792): n is a, c, g, or t
  misc_feature (1795)..(1795): n is a, c, g, or t
  misc_feature (1804)..(1805): n is a, c, g, or t
  misc_feature (1808)..(1809): n is a, c, g, or t
  misc_feature (1811)..(1813): n is a, c, g, or t
  misc_feature (1817)..(1820): n is a, c, g, or t
  misc_feature (1824)..(1825): n is a, c, g, or t
  misc_feature (1827)..(1829): n is a, c, g, or t
  misc_feature (1842)..(1842): n is a, c, g, or t
  Peptide Sequence Number=SeqID_9298
  Probeset Number=SeqID_10901
tagtcgcacgtgcangatgacgaacttcgggtgcgctcgtgcatccgacatgatgtgcctctccgcgcggcatntcgntacaaggtcgncgcgtgacatacaacatcngacgtccgcctcgactccgtatgcagtcagtcatgtctgtatgtcgtgtcgcacatagcatcgtcgttccatactgtgccgcgttatcaagcgtattaaagagatatgcgcatgcgatgcgtgtcgcgggacgatcgatntaacgtcgaggcgtgcgtgcagtcggctacacacgtatccaccattctcacgtcatagcacgccagccaatagtgacatggagncagtagcatgagtggtgagaaaagccgagcgccgcgagcacataaggtgttggaccaactgagatattctagttcgtcgataccttagatagctacagcgcgntccgccgccgttgatcatcatcacgtcgtactccggcgtgacgcacatccaccacagcccacaaccgtgtaattgtcacatcgtacatcggctgcgcaccgcaacgtcggttgcacntcgttaatgtattagcagtatgtgaagacaggtcggagtaggctcgtcgagaagagtagagacagtaacggacgctcatcatttgtcgtcagtgcgatcgcgcatcatgtgacgcgcgccgcaatccgcgcgttgcgcagataataccatcacggcaatccataccacatgaacagtgagtaatgtggcgcacaaccgagtcggtcgatcagtagacgtcaatcgaggcggagattgtgcgtcgcatctcttacatctgtgtctgcgctctgccagctgtggacttcatcagttaggcgtgctgatatcggttatcctctctagtcggtgtggcagtaagcaaagcgtgaaaccgtgtccggcctccgcgcgcccagtacacatctacgtataacctggcgtcacctgtttcgctctctctccgcgatgcgcaatgggaccggcgcgggagcacgtataactgaccacggtgtcgtagcacccgcctgtggtggcggagttgacggtgcgtctactgctgagcggcatcacacgtcctgctcgcgcgcggcacgccagccggacccagcgacgtccacgacagagacgcgcgcagcggaataggcgcgaaacgtgcaggccgaccggcggtgctcagagccgcagcggcgcgacacggcatatgacatcgccattccccacgagcccatgcacatcgtccgcccgcgctccctcttttctttggcttccacacatccgccgcgctctccctcaaccctccgccacgctcgcgcgccctgccctctcctgtcccgacgacctcgcctctggttgggtagtgtcagacatggcggtacaagagggtggtcgtattatgacgcacgtgatcagacgtgagcagattggagttgcgaaagatatgagctgcgcctccactaccccaccaaccgcgcgcgggtgggaggcgggagggcagcgccgctagagcacagcagaccacagatccgagagcctcaccccgcggtgggcgctgtgtcgtgtaggactggtgctcggccctcatacacaggaacgtagagccgatgcaccgcggcgagcgggaattgcgccaggttatatatgtgtcgtgtcgttatacgctgctatgtattgttctgattatcttctttcacaccgcctctatatctttcgtgggtagtggtcgggtcgcaaagatttattgtgtgtagtgtccctgctctcctccatgactagccgagantgncgactagannagnngnnnaagnnnngaannannnggggaggaaaggn

SEQ ID NO: 1123 - DNA, 1574 bp, Glycine max
  misc_feature (1)..(2): n is a, c, g, or t
  misc_feature (11)..(19): n is a, c, g, or t
  misc_feature (22)..(27): n is a, c, g, or t
  misc_feature (50)..(50): n is a, c, g, or t
  misc_feature (1057)..(1057): n is a, c, g, or t
  misc_feature (1170)..(1170): n is a, c, g, or t
  misc_feature (1180)..(1180): n is a, c, g, or t
  misc_feature (1214)..(1214): n is a, c, g, or t
  misc_feature (1217)..(1217): n is a, c, g, or t
  misc_feature (1282)..(1282): n is a, c, g, or t
  misc_feature (1539)..(1539): n is a, c, g, or t
  Probeset Number=SeqID_10902
nnccctccttnnnnnnnnnccnnnnnnacaccacctcactcaccccacanatcccgtatcttcctacttacatcacgccccgctcccttcttctgtctcgcgctctctcgtctatgccgggtcgcagacccttctcgtaattcagatttataatggctcctgattgatcttctggtgccccatagcccgccctgcctctgctgcttgcgagtctaccacatgacaccccacacacgcacccgctggtcacgcccgcggccagcacctgctacctcgctccacctccccttctgcctatcctttatccctatggattacacacttgtactgcggcgcggacacgcgccacgcctgcgcgaagccacctcaccgcccccgtcactcctccaccactcgcactatacacgcggggccactggcaagcggcactccgcctctcaactacatcgaccacatcactacaccccaaccttcctgtgctctcggcatgcgcggctagcggagtacattattgaccttctcgggttcgactgtcatcgcgcctccgcactctcgtccggtgctcccctctcgttatcagccactatcgtaaacgatactgtccccattccgccgcccagtacgacgatgcgacggctccgctgtggttgccacgtgtcttacagactcgatcacatatccgtgaatcgatgcatctcgacttgtcactctcggcggtggaagacgacatatggctcgtgtgatatatgatatcgccctcgtcgtacatacatagttggctaatcacaatcgtagagataatacttttgcgatccccactacgtatgatgcccaacccccatcgctgcccttcgtcctctcaccgctctccctaccggacgccactctcactactccactgcccccgcttctctgagacagccgcgctactcgtctctgcgcgtctctctcgcacctccgtgcgccgcgcgcggtagcgccaactatcacaccgacactcgccacctcacgatgcatctgctatgagcacactgacacacacctactctgtcacttnacgactctcacgctgccacacactacacgctcgcgatcatgacatatgcgcacgaccacgctcgaccgtacatagtgcgatgctatgactcggtcgctcgcacggcacacganggctactcanctactcgcttctactacaccactctatcactcanacncgtctgtgttcgcgcttcggaccaccctcgctgcgccagcgctctctctcattgttatacgcgcncgctacgctggtcacacacacacgatgcgagctcctcgccgtctgcacgcgcgagacgactactgcctacatacatgctgatgctcgctgtacacgctcttgtctactacactcatctaccacgcaactatgtattatgcaatagcctcgcgcctcactactcttcgtcatcgcccaccacaacctcaacacaacacttcgccactcaccggctctaacgcacaccgcgcacatactccctctctcaccttcactcnatcagtgtcacacgatggctgagtcgctgactccg

SEQ ID NO: 1124 - DNA, 606 bp, Glycine max
  Peptide Sequence Number=SeqID_9299
  Probeset Number=SeqID_10903
ggatattgttgttgttgttggtcggttcagagataaataacaatctctctcttctatcttcttctgcaccttctgcactctcatttccactattttattctttctctcatacccgtcatcatctctctctggtacaaaccctacttccacaccccgttccctgagccctcccatactctgcatcctctcttttctcaccttccccattcttctcctctctttcatggatgtggacatagtgaaaacttccagcaacaacaacaacatggacgtgatggcaatgatgatgcaaatggaaaagttccctgaattattctgcgaccctttttataccacctcttaccaagaaaccgatttgttatcaagtggaagttcctcaacaaccagtgcttccaccctattcaacaacaacagcattgtaacaacaactccaccaccgacgacgactctcgtcgatccaactccgtcaaatgttgtccaattttccaaaatcgatgaccttttccaacaccaacaccaacaacaacctatgtcacagtcccttcaaccctacccttccgagaagaagaactcgatggcggcgatgagggagatgatattccgaat

SEQ ID NO: 1125 - DNA, 522 bp, Glycine max
  Probeset Number=SeqID_10904
ctttcaccgccgttctcaaattcgcagccgaggaattcaaagtgcctccccagaccagcgccatcatcaccaatgataagagattatggactttcaaatattcccacctgttctcttataaatacaaaatgctttgttcagtttataatgtgcgctcctgaccaccatatgttccttcttaacaaccctagttggaagtcaaaagctctctctaaatgttgttgggataaatcctcagcaaagtgcaggtaatatcttccttaagcatggttcagaactacgtctgattcctcgtgatagggtcggtgcagctggggtttaacgggacgtttgattattggctaattaattatcttcttcattatttttctggacgagtgtatctataactattaataaatggaattatcttatttagtgtatatattttctagatagttttatcctttatcaatttatttattttttaacaattatcccactactttttagttaattactttcttttcttaaaaaaaaaaa

SEQ ID NO: 1126 - DNA, 1515 bp, Glycine max
  misc_feature (17)..(18): n is a, c, g, or t
  misc_feature (24)..(24): n is a, c, g, or t
  misc_feature (29)..(29): n is a, c, g, or t
  misc_feature (46)..(48): n is a, c, g, or t
  misc_feature (63)..(64): n is a, c, g, or t
  misc_feature (68)..(69): n is a, c, g, or t
  misc_feature (84)..(85): n is a, c, g, or t
  misc_feature (108)..(108): n is a, c, g, or t
  misc_feature (116)..(116): n is a, c, g, or t
  misc_feature (182)..(183): n is a, c, g, or t
  misc_feature (191)..(191): n is a, c, g, or t
  misc_feature (205)..(205): n is a, c, g, or t
  misc_feature (602)..(602): n is a, c, g, or t
  misc_feature (713)..(713): n is a, c, g, or t
  misc_feature (830)..(830): n is a, c, g, or t
  misc_feature (901)..(901): n is a, c, g, or t
  misc_feature (1048)..(1048): n is a, c, g, or t
  misc_feature (1088)..(1088): n is a, c, g, or t
  misc_feature (1341)..(1341): n is a, c, g, or t
  misc_feature (1352)..(1352): n is a, c, g, or t
  misc_feature (1368)..(1368): n is a, c, g, or t
  misc_feature (1372)..(1372): n is a, c, g, or t
  misc_feature (1515)..(1515): n is a, c, g, or t
  Peptide Sequence Number=SeqID_9300
  Probeset Number=SeqID_10905
tttttgtttaactttanncccacnacaancacacaaaaaaaataannnaaaaaaataaaaaannaaannaaaaaccctacatgnnggcgcggcagacgtgaaaaaganatgatgtntgcgttgttatttactgtatttgtgtgacccccccgtcggcctggtcagccgcaacttcccctccnngattaatnatttatttcttaanaaattaaccggtgatataagagatagcgtgatagaaggatatgctattgggcacgtggtacagagagtgcgcgtctatcttatgttgtgaggctgcagactaagtcggtggcataatctgatagacaatcgccacgcaaacacaacaccacacgagacgcaccacactacggctacgtgaagggaaagtaagatggtgtcgtttgatgcgttgctataactttgttttgttattgatttgtcttgcgcatctggtcgtgtgctttcgtattgtgtgggcagtgatttgcttgctcctctgtccccgctatctcgtcgaagtgcctcggttgatttcgcctcaacattcctgttccgacgcttaccactttatatgcatcgcgcacgcacaatactangatacaacgtgagactacaatttaaattgtacggcagcaaatactatatatcgaggaaatgagatagtatatgatcaataatacgaaaaatagagaacgataacacatggnccgcctcagcaatacatagacatgaatatgatacacttcaaacctacatgccatcaacagcacaactcacaacgcttcatacataaattatcatacaacatcctcactcctcaaaanatcaacaaaatgtatagatacaatacctctcacatacaacactctcctctcttcatctcgccgctccttcntgcgtctgctgcgttgtgactgcggatcgtggcttcgtattctcgatatgtgacggacaccggctacgagcgtcgcggaaaggtgcgtggacggagagcacgtacagtgactctcgatgtctgtcgagtaccgcgtgatgtgagagngcacgagcagcctcaacatcaaaccgcacagcacagcgcntcctgatcctcgccactctatgtcagtgcgcgcgtacgtccgatatctctcctctctaatcctgcatatctgtctatcgcgccagtagatagatacagaagagatcgtaattgccactctcacgatactgcactgcagttctgcgacgcgccgcgtggtaacgatgcgctcgactcgagagtatcagctgcggccgtgcgtataatatgacggaaagataatagagagataaatggagaatatacaaactacnagtatataatnacgtcagcaacgcagnatgnaatataaacggacagtgtataccggaatgagaagcgataattcgactacgtatcacatactgtagaacgctcctcacgcgactcgcgctcacagcgcgcagcaatccgcagtagtgcgtagtgcgatgcctcttcgtcgctcn

SEQ ID NO: 1127 - DNA, 421 bp, Glycine max
  misc_feature (323)..(323): n is a, c, g, or t
  Probeset Number=SeqID_10906
gagcatgtccttgccgctcgccatctggttgtcgagttcttcggcggtgctgcacacctttttctcgaaacgggagcctaatacgggctccttgcggcaaaagactacgtccttgccatgcatttccgtcttgtaaccggccgcccgcagcttcttcagtcgctcgtcggccgcggcgtcaccggcgaccagttttacggttttcgtaccgtcagcggcggcggtcgtggcggccttgtccttgtcagtcgtcgctgacgacgtgccggtagtggcgggagtcgtggatgccggtgccgaggctgctggtgcttgtgccggangatccgtcgccattgcttgtgacagcgcgcagatggaaagaacggtgaaaagaccaattatcatgcgcatgaacggatccatccctaagttatgtagc

SEQ ID NO: 1128 - DNA, 798 bp, Glycine max
  misc_feature (1)..(126): n is a, c, g, or t
  misc_feature (627)..(627): n is a, c, g, or t
  misc_feature (698)..(698): n is a, c, g, or t
  misc_feature (704)..(704): n is a, c, g, or t
  misc_feature (706)..(706): n is a, c, g, or t
  misc_feature (712)..(712): n is a, c, g, or t
  misc_feature (727)..(798): n is a, c, g, or t
  Peptide Sequence Number=SeqID_9301
  Probeset Number=SeqID_10907
nnnnnnnnnnnnnnnnnnnnnnnnnnnnnnnnnnnnnnnnnnnnnnnnnnnnnnnnnnnnnnnnnnnnnnnnnnnnnnnnnnnnnnnnnnnnnnnnnnnnnnnnnnnnnnnnnnnnnnnnnnnnnnctcaatccttggcatctatcttgttgaccgcctgcgtgttctgctctactgcacacatacacggcatcatggatatcataagacgatgagacacgcgtaatgaatacagatgatggagtacgaagcaaatttcttcttcccggcagggatgataccattagaatgtggcaccaatttgtatcgcctctaaattgatacgagctttgagaaagttttggtaaggatctagcaggattgtgaagatcgtgaccgcactagggatgggcacatgagaaggaaatgatactgtaaggtgattgatgcatcctctactgcaactaccgctatgagtaaactgataccagcattaacggaggtaaatgcggcaattgcgggatttgagaaagttgacataagcttaagaagcacggccaagatattagggacagtttgttgcgtcgctggagccttaaccatggctttggtcaaaggacagaagctgttacacacagagttccttcncttctatacatcttactggcagtgaaggtgacgattggctgctgggttgtctaatggctcttagcaagcantgtttncngggtcntggttgggatgatcnnnnnnnnnnnnnnnnnnnnnnnnnnnnnnnnnnnnnnnnnnnnnnnnnnnnnnnnnnnnnnnnnnnnnnnn

SEQ ID NO: 1129 - DNA, 594 bp, Glycine max
  misc_feature (143)..(143): n is a, c, g, or t
  Peptide Sequence Number=SeqID_9302
  Probeset Number=SeqID_10908
cccccccccgggcccccccccccgccccgcgcccccgcacccgcgccacccccgcccgcgcgccccccacgcaccgccccccgccccgccccccccaccccgccacccggccccccgccccaccccgcgcccccacccccccnccccccccccccccccccccacccacggtccccgcccgcccccccaacccgcgcgttgtacacctccgccgtgaccctctcggcagcccaatgcaaagcagtttccccctttatagtattacaccaaaacccaatgttttcccatgatggagcatacacccaccaaccctatccctgtaccccccctgtatagcgccctgcccccccccccacctagttgctcctgggttaactgggaagcatgcgcaattttctctagagttaccccccccccccagaggggattttcccctcccccccctttttcccttgtaaattggatgatgtatttcctatcgctaaaaatagtgaggtgattttgcccattatcgtcaaagttgagttttatttgtggtgttaaaaaaaaaaaaaaaaaaaaaaaccccccaccaagggcggccgctttagagga

SEQ ID NO: 1130 - DNA, 744 bp, Glycine max
  misc_feature (581)..(581): n is a, c, g, or t
  misc_feature (592)..(592): n is a, c, g, or t
  misc_feature (603)..(603): n is a, c, g, or t
  misc_feature (608)..(608): n is a, c, g, or t
  misc_feature (652)..(653): n is a, c, g, or t
  misc_feature (658)..(658): n is a, c, g, or t
  misc_feature (676)..(676): n is a, c, g, or t
  misc_feature (688)..(688): n is a, c, g, or t
  misc_feature (695)..(695): n is a, c, g, or t
  misc_feature (712)..(712): n is a, c, g, or t
  misc_feature (719)..(719): n is a, c, g, or t
  misc_feature (739)..(739): n is a, c, g, or t
  misc_feature (744)..(744): n is a, c, g, or t
  Probeset Number=SeqID_10909
gtattcatgaattgtcttgttacttctaatgttgatcctttttgatataaactaagatcaagatctgtttcttcaatagctaataaggacgtggttgccacttacaaataaaaagtatattgtatttgtgggtaaatattcccttacagagctaaaaaaaatgctggaaatcaattagttcttttggttggccaaactttttgtttaacgttgctggaaaggtttaaccctttgtaagatgctgtttttcgtgaggacaaaacttatatatgcgggctctactgtttgtcaattaaaattgggaattccatctaagtaattcgcattttaacgtttgtattaaaagattatataaattattgagacaaaatttcattttctgattagaaaataggacaagcaactcctaaagcaccctatataagttttttccatttctcatcacccacttcttgttgctttgaattgaggcttgattcttctgtttgaggcggcctcttaattaagtgtcctttgaccttgtgggcaggtggatgaagctccccaagttcgatgagcatgctcttctttgcaacaccttnggacaagccanggtgtgatcanaagtnctgtgagcaggaagtgcaggaaccatctgggggcagactgtgtnnttgtntcaagcaactttgggtgnaatcgggagtgngatgctnccctcccatcagcttgnaaatgancccgtgccgcaaaatcactngcagn

SEQ ID NO: 1131 - DNA, 1433 bp, Glycine max
  misc_feature (27)..(27): n is a, c, g, or t
  misc_feature (106)..(106): n is a, c, g, or t
  misc_feature (113)..(114): n is a, c, g, or t
  misc_feature (121)..(121): n is a, c, g, or t
  misc_feature (129)..(129): n is a, c, g, or t
  misc_feature (131)..(131): n is a, c, g, or t
  misc_feature (461)..(461): n is a, c, g, or t
  misc_feature (610)..(610): n is a, c, g, or t
  misc_feature (819)..(819): n is a, c, g, or t
  misc_feature (929)..(929): n is a, c, g, or t
  misc_feature (1214)..(1214): n is a, c, g, or t
  misc_feature (1328)..(1328): n is a, c, g, or t
  Peptide Sequence Number=SeqID_9303
  Probeset Number=SeqID_10910
gtttgggctgtgttctatgcctctcgngggcgaggcggggagaggagcggaaagagaaaaaggagagtggagcgcgaagagagaggtagagggagatccccccccngccaaannaatattnaggcgcantnaagaagacgttggctgtgggtggctataatctgagatggttgtaagagatttgtttgtatgtagcatcgtagcgtaaagaatttattattatatattataataaagtcactctaatggatgcatttatgttgttagagtggtgtgtgtgtgtggggttgagatagtatgaagcgaatgagttttattagaagtgaggagttgtgcgagagatatgttagctcagtaatcgatccaatcgctgccacgacacatcaccgacagcgaaaataatgcgtacgtcgcggcgcatgcgctatccctgggtgcgggcaggtggctgtagggatagntaggtaattgtgtagatcagtccgtcactgtcggacactataagataataacacggatacttgttctgcgcgagtgatggtatgtgggggtgatgggtgcgcgagatggaagatagaaccacgaagattgcagtgaagtcgacgacacnatctttagaaaagatgcgtgacgcggtacgaaaagtagtgactacacagatcgcgtacggataaataaaagatgaggagatcacacccgatatacatcacaagatagaaatacacaatgctatgccgcgcaagtatgagacaagagcagaacatatacaatatcatagtaagatagagagagatggaaagcagcagctcgcctagacgnagaaacgacacaagaaggtgaagtagagttacctatcatctgctggatagaaacctaatgtaatagatacaatgtatatgacgtattagatacaagttgaagagaccaancaccacctatctacagcacaccgtccactcttatcttagaacacagaattgcacgataaacacactcaccacacatatagacagtgtgagagagcagagataagtgaagtgccgtaccaaatgtagtggtaatactgcgcatctgcacactcacacatctataaacaagcaatcccttgtatggacaacgacttcgacacggagtgaggaggatgagtaagatacgtgcgcgctatatagatgtatatagataacatatacgatcctacacgacactacgcctantatgaacgtacgaataactagataacacatagacgctcacgaacgcgatagataactggcagagagataacaacagtacacaagagtatgagagatccaccgcgatctaacatnatagatacacacccactacacgactgcatgcgacgaagacgagacacacggatgtctcaacctatatcaatccgaagagcatgagagcgctgcgatcagagcgag

SEQ ID NO: 1132 - DNA, 1751 bp, Glycine max
  misc_feature (36)..(36): n is a, c, g, or t
  misc_feature (81)..(81): n is a, c, g, or t
  misc_feature (105)..(105): n is a, c, g, or t
  misc_feature (215)..(215): n is a, c, g, or t
  misc_feature (542)..(542): n is a, c, g, or t
  misc_feature (616)..(616): n is a, c, g, or t
  misc_feature (625)..(625): n is a, c, g, or t
  misc_feature (697)..(697): n is a, c, g, or t
  misc_feature (746)..(746): n is a, c, g, or t
  misc_feature (768)..(768): n is a, c, g, or t
  misc_feature (889)..(889): n is a, c, g, or t
  misc_feature (1018)..(1018): n is a, c, g, or t
  misc_feature (1151)..(1151): n is a, c, g, or t
  misc_feature (1194)..(1194): n is a, c, g, or t
  misc_feature (1308)..(1309): n is a, c, g, or t
  misc_feature (1400)..(1400): n is a, c, g, or t
  misc_feature (1463)..(1463): n is a, c, g, or t
  misc_feature (1584)..(1584): n is a, c, g, or t
  misc_feature (1598)..(1598): n is a, c, g, or t
  misc_feature (1618)..(1619): n is a, c, g, or t
  misc_feature (1624)..(1624): n is a, c, g, or t
  misc_feature (1700)..(1701): n is a, c, g, or t
  misc_feature (1712)..(1713): n is a, c, g, or t
  misc_feature (1729)..(1729): n is a, c, g, or t
  misc_feature (1733)..(1734): n is a, c, g, or t
  misc_feature (1751)..(1751): n is a, c, g, or t
  Probeset Number=SeqID_10911
cgtcgagagcgtggcgcgcacagcgcgacatcatancttctgacctgtataagatggatgtgtgacgatgtcagctaggangtagtagcagcgcatgaagtggtngactggcgcagggcgtgcatgatcgccagtattacacgctacactgctatgcagagatgcagtagcacgcgcaacgatccgacagcaatcacactcgagccttgtagcgnagtcaggtgtgtgcgtagatatatacatataagagataggtgtgtgtattgtgtacgagtgtaatgcagagtagatggattgtgtcttatgtgtcatgtcggttcatgtcgtacgctatcctcagccgatcactgtatacggcgagaatcagtataggagacgacgacacacgagataggcgcgtcagaagtggaagcaatatacagacatagagaatgatagagaggagcatgagaagatggagagagtcgatgaggagagcgagggctcttaagctatgtgtaacgaggcgcgcggtggcgtgtatagagagtgaggccgcacgngacggcgcgcgggatggcacactcacatattgtgagacaggtgcatggagtggtacatatacctctagttgatngtacgaagncacatcaacaatatgaccgcgcgcaagaagaagagggagcgcgcgaacgcaaagctgtacattagctctcantaataatacaacacattgagaggcggtggcgtagagagcagagaagagngaggagtagtgaagaggtgagnggtgtgagagtactggcgttaattctcatactgaggtggtacagatacgcggagatggtgtggcggtcggcgagtgcagcgatgctaacgatgctcatagtatggtctggttttcgatgtnattatattttgattaaagacagaagaatcaattacatcttacataaacatacacgagaccgacgacgaccacgtgcaatatatatatcactgacttctctatatacataaacgtcgacggtgcagcggncgtgtagagcgggcgcgtgtggcttgagcacgatagagtcagagagattagagagtcgtcgcacgatgcggcggacagacatgactcagtcacctagtcacggtagagcggtgcgttgtggtagatctagaanaacggaggtggaggcgagcgagtagacgtgtgctcctcacagnttacaaccatacaaagcgtgtatgagaataatgagacgagtgagggagtagtatcaaacatgcgctgaggatcgtgggcatccagagtagtatatacgtagtaataccagagannttgaaggagagagatagagaggagcggaacggatgatgagaagatgctgacatcgttggcgtatagcagcctctgctgcgtatccagcccnacaacgacaacaacaagaacgagacacacagtgtagtgcgacgcattatacctatttatattntgactatatattctctctgtgatggttggggtgtgtgtagtagagagtttaaaatatagagaaagagaggcggatcgtagaagatggagatgatatatctctaataaccacgcaacactantaggggtgttgagnggcgggcgggggcggggggnnggagnatggtggggtgggataatacaatagataaagagatgaacgtctctgtaagttaatgtaataggtgtgttgttgtanntaaaaagagannaaaaacacaacacaanatannaacaaaaaaaatatttn

SEQ ID NO: 1133 - DNA, 573 bp, Glycine max
  Peptide Sequence Number=SeqID_9304
  Probeset Number=SeqID_10912
aataacataactgttttcctcagactcagaccttattctagcctattattccaaaagagaacaatgagcgtagcggtagtgaacagcttcaccataaccgagttcgtaaatgacaaggctaagtttgatggtttcgtgaacgaatggtttgcgaggatagatgagaatggcgatgggaagctttcgcgtgacaaaatccgagggaggttagggatgcttctgcctttcggttcggaatcgccgccgcagcaagagaacgaagagatattcaagaggttcgatgaagatgggaatggtgcacttgatctgaatgagttcaaggccttaatgactgagattatgaatgccgctgctcgtagcattggtggctctcccgtcattgttgttcttggaaaagatagcttgctcatgaaggctgttcaacatgaattggcaacaccgtcttctcattcttagtctttttttttaatctggttcttttacttagatttcttcctgttattttttgtacgttttattgcatttgctatggctatacacctataaacaattgaattgttgtcgagggagttc

SEQ ID NO: 1134 - DNA, 1342 bp, Glycine max
  misc_feature (5)..(5): n is a, c, g, or t
  misc_feature (51)..(51): n is a, c, g, or t
  misc_feature (102)..(102): n is a, c, g, or t
  misc_feature (104)..(104): n is a, c, g, or t
  misc_feature (112)..(112): n is a, c, g, or t
  misc_feature (171)..(173): n is a, c, g, or t
  misc_feature (184)..(184): n is a, c, g, or t
  misc_feature (197)..(197): n is a, c, g, or t
  misc_feature (220)..(220): n is a, c, g, or t
  misc_feature (238)..(239): n is a, c, g, or t
  misc_feature (265)..(265): n is a, c, g, or t
  misc_feature (276)..(276): n is a, c, g, or t
  misc_feature (278)..(278): n is a, c, g, or t
  misc_feature (309)..(309): n is a, c, g, or t
  misc_feature (315)..(315): n is a, c, g, or t
  misc_feature (348)..(348): n is a, c, g, or t
  misc_feature (358)..(358): n is a, c, g, or t
  misc_feature (370)..(370): n is a, c, g, or t
  misc_feature (400)..(400): n is a, c, g, or t
  misc_feature (414)..(414): n is a, c, g, or t
  misc_feature (443)..(443): n is a, c, g, or t
  misc_feature (461)..(461): n is a, c, g, or t
  misc_feature (482)..(483): n is a, c, g, or t
  misc_feature (507)..(508): n is a, c, g, or t
  misc_feature (510)..(510): n is a, c, g, or t
  misc_feature (536)..(536): n is a, c, g, or t
  misc_feature (540)..(540): n is a, c, g, or t
  misc_feature (618)..(618): n is a, c, g, or t
  misc_feature (630)..(630): n is a, c, g, or t
  misc_feature (637)..(637): n is a, c, g, or t
  misc_feature (639)..(641): n is a, c, g, or t
  misc_feature (643)..(643): n is a, c, g, or t
  misc_feature (653)..(653): n is a, c, g, or t
  misc_feature (668)..(668): n is a, c, g, or t
  misc_feature (711)..(711): n is a, c, g, or t
  misc_feature (729)..(729): n is a, c, g, or t
  misc_feature (736)..(736): n is a, c, g, or t
  misc_feature (738)..(738): n is a, c, g, or t
  misc_feature (760)..(760): n is a, c, g, or t
  misc_feature (808)..(809): n is a, c, g, or t
  misc_feature (831)..(831): n is a, c, g, or t
  misc_feature (868)..(868): n is a, c, g, or t
  misc_feature (905)..(905): n is a, c, g, or t
  misc_feature (926)..(926): n is a, c, g, or t
  misc_feature (1044)..(1044): n is a, c, g, or t
  misc_feature (1285)..(1286): n is a, c, g, or t
  misc_feature (1294)..(1294): n is a, c, g, or t
  misc_feature (1296)..(1296): n is a, c, g, or t
  misc_feature (1315)..(1342): n is a, c, g, or t
  Peptide Sequence Number=SeqID_9305
  Probeset Number=SeqID_10913
ctctncacatgcctctcacgacatatgcagcgtagatcactcgagcggagnggagctgactcgcggagttctctcctgtgttagtatccatatacaaatacntntaagacancacatatagtgagccgcgcgatacatgattatgcgcctttgccgctctcagcgcaggcnnnacctcttcatncgcgcgcctcctnttcacgcgaagcagcggagacangaggacgacggtgtgttnnctgaccggctttcgctcggagagcgncgccactctcncnccgtatatcctccccgatgagaactcgcggnccgaancgattacctgagacgggtgaggatgaaaaatcncctttctagntcggtcgcgagngcgcagcgaagtgcacggcacgagagtctngcgccaaacgaggngctgcttcgcgggcgaggagagggagacncagcaccgatcactcgcnactcgccaggcacgctctacnngaggggacggtaacgcgcttctannancaaccgcatacgcacggaaaccttcntctntgaagaggaaccttcgcggccgtcttcttaggagaccacaccacctctgtcgtctctgggactcacggcaacgtacantagagtcgacantagcgancnnngngcgcgtttcnccctagtcttggctnccgagagccgacatacgcgcgaagcctaggtaagacacgcacnccccaacacatgctctancttctcntntggaagcaagaccaaatgcccnctcaaggcgctgctgtagcgacacggggcaggcgcgaggaatagactnntgaggtgaagtgaggagtatanaggcacagacctccctccctctgcacgaggagctctngcggaggccccactgctaacttcgtgtggataagggnccctgagtagggaagttgcancagctacaaatcaagtctgggtgggccatagcgctggggggtgccggggtacttcttatgactgataagtgcgaataacgcataatgccagaactaatctcctctctgtaacctctgnccgagtagacgtctgccctagccgagctcggagggactaagagaacatcatgatgcaaactaacctttcctactaccatgggggtcctagagagctccctaggcgcaaggatgcactcacgacccacggagtggagaataagaaagagcactccccgcatccccccgggggtatcccctccatctactaggaggcgacaccgtcccccggggggagggctcccctcccctatctaattttnnggaggagntntgtggggggaagaatattnnnnnnnnnnnnnnnnnnnnnnnnnnnn

SEQ ID NO: 1135 - DNA, 556 bp, Glycine max
  Probeset Number=SeqID_10914
ggagctacggcgaggcatggttgaaattagggcaacaaaaggggcaaaacgaatcgtaggagacagagagagagagcggttcagtgtccggattctataattgcaaaaaaaaaaaaaagattaattttagaattagtgagaattaggaatgttctaatgagttatgctcacggtacatagaaataaatggtttgcattatcattctaacttatttcaaatgtatttaacatgtttttaaaatatataaaccaacaaaatcgtcaccattgaaataatttaagtaatttggctaaaaggttttgattggcattattaaatattttaacttattaaaattataaaatcacatgacaactctttcttattttattcataagaataagaatagaaaaaatatataagaaaatttataacaacacacaaactaaaccaattgacttagatcctattcaattaagtgacaatttattatatacaaactacaaagtgacatctataaaaaaatttgtaatttttcataaaagaaggtttccttttaacatttctctttgatta

SEQ ID NO: 1136 - DNA, 589 bp, Glycine max
  misc_feature (488)..(488): n is a, c, g, or t
  misc_feature (546)..(546): n is a, c, g, or t
  Peptide Sequence Number=SeqID_9306
  Probeset Number=SeqID_10915
acgtaataaaatcgtcaattcttccctgcagccgccgccgccgcctaccttctccggacgaaccgccgacagggccaccgcagcgtcgttgccggccgtgccttcggggagcaaccgctctgcctgcgccggcgctcactcgctgcgcctccggtggccacttcttctccgactccggcatagatttagccctcaagtgctgaagccccagcgtctcaccccatggcgaagaagaggaagcgcagctctgatgctcccgcccctgctgccgtagagaagcctgacgactctgcgccagagcgtccggaacgcaccctcttcgggttcaaggactcggctgacgaccctgcttctaaggacgcagggcagttcttccggaacaaggagaaggtgctcattacgtgctcccgccgcatcatttacaggtaccggcatctaatgcagaacgtggtgtcattgctgccgcatgccaagaaggacagcaaggntgagtccaagcagagtaagggcagcgcgctcaacgagctggtcgagctcaggagctgntccagctgcctctttttcgagtgcagaaaacagaaagatcttt

SEQ ID NO: 1137 - DNA, 1558 bp, Glycine max
  misc_feature (17)..(21): n is a, c, g, or t
  misc_feature (24)..(24): n is a, c, g, or t
  misc_feature (27)..(29): n is a, c, g, or t
  misc_feature (32)..(32): n is a, c, g, or t
  misc_feature (37)..(37): n is a, c, g, or t
  misc_feature (136)..(136): n is a, c, g, or t
  misc_feature (138)..(138): n is a, c, g, or t
  misc_feature (178)..(178): n is a, c, g, or t
  misc_feature (204)..(204): n is a, c, g, or t
  misc_feature (253)..(253): n is a, c, g, or t
  misc_feature (1445)..(1445): n is a, c, g, or t
  misc_feature (1558)..(1558): n is a, c, g, or t
  Peptide Sequence Number=SeqID_9307
  Probeset Number=SeqID_10916
gttatattttttttttnnnnnttnttnnnctnttttntttcatacacactgacgtgtcaccatagcactctatgcgcctcgcggtcgcgtgggcgcacactgctatagcacgtgcgtgtcgcgcggcacgcgcgcnantaagttggtggatggaccgtgcggggatgaaacatataanaatcgagatatgcaacagtttgtttncaatattctgcaactattgtctcgctatgtcgtctcctatgtgtctcgnaccattcagatatataaggtcggcgcgtgcctgacgcgccacgtctgtgtgtggtcgaatgtggcagcgcatgtcacgtgtggatgaagagagaaacagacctcctatcacatcctgacgtgacggtgcgagcgatacactgcaataccacacaagacacgcaagaatacaacttaaaaagaccactagcactccagtattaacaataaatctgctcttatgctttacgacccctccgccacgccatcacgcgcgacgctctgctgcacgccggagcgcgatatcgtcgccgcgcaccggtgcgtcgcgcgcttgtctccagcccagtgcgtggtcacttcctgcttcgcgactacccgcaatctggcctcctacgtatccactccattgttatccgctcaagatgccttatatcgtacatctgtatattgagaatgagataatgtattacgacagttatactcatgcgcgaacagtggactcccagggatattgatgttgcgccctctctgaccatgttcttatctcgcagcccgccccccgctacgcgcacgcatgatccctgtggcatcgactgtgtatatgagagtctgtgatatgcgcgccaccatctctacgcgatcgcaccaaagagtacccaccacgacgcgccactgcgcaccatactactccggctgcagcacgagacccgttctatattcgcacaactaaccggcaccgagtgtttgaacgcagtctcacactcactgattcatttctattacgttatactgagtacgagcgtatctcgcagcatacatactgtccaactgtctcagcgtcatcacacatgcttcgagcccaatggagagagtgcgactgctgcgccagagtgcgcgacaactgaatacattagctgcgcattcgctgatagtgtacgtacgaatatgatgacagtagaggcagctcacccgcattctatttcctcggcgcatcgtgtttttgtgcgagcgcggcctctatctatttagatactctcatcaatactatagtcagcgacacataccgcgatccaccataccctcgacatctccacaaatactacctcaaaacatcaggcataccgcggcgcataccgtcatgtcgatgctctatcgccacgccctcatcagattatcgtcgaccagtaccgatcaagactccgcgaacatgncgtggaatcactctctgatgcacatcatgctgtcatgtgttcacgcctcattccgcgctcacctcgacggcgtcgccgcctcgcccaacgccagcacacgtctacctcccagn

SEQ ID NO: 1138 - DNA, 1440 bp, Glycine max
  misc_feature (24)..(24): n is a, c, g, or t
  misc_feature (26)..(26): n is a, c, g, or t
  misc_feature (633)..(633): n is a, c, g, or t
  misc_feature (709)..(709): n is a, c, g, or t
  misc_feature (815)..(815): n is a, c, g, or t
  misc_feature (1388)..(1393): n is a, c, g, or t
  misc_feature (1398)..(1440): n is a, c, g, or t
  Probeset Number=SeqID_10917
cagtggtgtagtattctcacatcngngtcgcggaggagcgggcgtgatcggacggcgaacgcgcgcggagacgtgatgtataataatgacgcgcgctcgtgatgagagtgtttaatagattgttctgagtgtaagggcgggaagagagcggagcgaagagcggagagttgttgttgtgaggctcatcacacgcggcgtaggtgcgaagacgcctgcatcgttctcgggtcgctgtccgccggccctctctttgtcattggtttgtgtggtagagtgtgtgtcctgcaagggcgtcttgtaagcgtggatacacccactcctcctagcgtcccatatcgtgattctatagaatatatttggtactcgtctcacctcccgccacgcgacgagtatcgcggaagcggcgcttggtgggagagtggggttgcgaggctaacttggattgtgctcaactctttttgtggctcaaaactggagttatcatgagaagatgtttctctggtcgagcacgagaggaggatgaaaagaatcgccgcgcgcgttcgcgatgctcgagcaagtgtgggggtgtgtgtggggagtgtctcccacaagaatgtgtatagcggtgagcgtcctttctatgtccgtagnggggcttaggtcccgcgtccccgagatgtagtgggtgtggactgcgttcgcagcgatcgtagtgcgctgtgggganggaatgtgcgggtggggtctctcatgtccgagacggtgcgacccgccgttgtcgcgtctttatgaagaatgtgggttgagggtccgaagcttcccacacactcagntcgtatatcgacctacactatatttagcgagtgtgcgctctggtctaccctgctgagctatgaggcgatctattgtttttgttgagctcacgtgatgtgatgttctacctcgttggcgtgcgaggatcatttgtcatcgcacgctggggatctagtggcaaacatatacttaaagtgtgtaccagtggttttgtctgggtggtgcgaaaaagggcgaggagggaagagtttgatgagatggtatgctccctagtgcctctctcggctcattgagtctcgtcggcggtatcattatatgcgagacgtctacggcgcccgttggtgttatatgggagtttgggtggtgggagggacggaaggaagttcgaatattggaagaagagtatagatagtgtctgcgcgcgtttgtccctaagagagataaagtaagagactagaatagaggagatttcttctgtcaagacgcgcgggggtggattctcacttgagtttgttgaggagactgggctcgcggcatcgcgtgcgagtggaggtcttcgcagtctttttagttgaaaggctatcctggatttnnnnnnccccnnnnnnnnnnnnnnnnnnnnnnnnnnnnnnnnnnnnnnnnnnn

SEQ ID NO: 1139 - DNA, 1791 bp, Glycine max
  misc_feature (15)..(17): n is a, c, g, or t
  misc_feature (34)..(35): n is a, c, g, or t
  misc_feature (37)..(38): n is a, c, g, or t
  misc_feature (42)..(44): n is a, c, g, or t
  misc_feature (95)..(95): n is a, c, g, or t
  misc_feature (100)..(100): n is a, c, g, or t
  misc_feature (166)..(167): n is a, c, g, or t
  misc_feature (177)..(177): n is a, c, g, or t
  misc_feature (199)..(199): n is a, c, g, or t
  misc_feature (206)..(206): n is a, c, g, or t
  misc_feature (210)..(210): n is a, c, g, or t
  misc_feature (226)..(228): n is a, c, g, or t
  misc_feature (230)..(232): n is a, c, g, or t
  misc_feature (253)..(253): n is a, c, g, or t
  misc_feature (255)..(256): n is a, c, g, or t
  misc_feature (259)..(259): n is a, c, g, or t
  misc_feature (265)..(265): n is a, c, g, or t
  misc_feature (273)..(274): n is a, c, g, or t
  misc_feature (279)..(279): n is a, c, g, or t
  misc_feature (281)..(281): n is a, c, g, or t
  misc_feature (512)..(513): n is a, c, g, or t
  misc_feature (561)..(561): n is a, c, g, or t
  misc_feature (563)..(564): n is a, c, g, or t
  misc_feature (580)..(580): n is a, c, g, or t
  misc_feature (609)..(609): n is a, c, g, or t
  misc_feature (629)..(629): n is a, c, g, or t
  misc_feature (773)..(773): n is a, c, g, or t
  misc_feature (817)..(817): n is a, c, g, or t
  misc_feature (853)..(853): n is a, c, g, or t
  misc_feature (986)..(986): n is a, c, g, or t
  misc_feature (1138)..(1138): n is a, c, g, or t
  misc_feature (1156)..(1156): n is a, c, g, or t
  misc_feature (1189)..(1189): n is a, c, g, or t
  misc_feature (1233)..(1233): n is a, c, g, or t
  misc_feature (1372)..(1372): n is a, c, g, or t
  misc_feature (1438)..(1438): n is a, c, g, or t
  misc_feature (1453)..(1453): n is a, c, g, or t
  misc_feature (1496)..(1496): n is a, c, g, or t
  misc_feature (1519)..(1519): n is a, c, g, or t
  misc_feature (1675)..(1675): n is a, c, g, or t
  misc_feature (1784)..(1784): n is a, c, g, or t
  misc_feature (1786)..(1786): n is a, c, g, or t
  misc_feature (1791)..(1791): n is a, c, g, or t
  Peptide Sequence Number=SeqID_9308
  Probeset Number=SeqID_10918
gttttggtgtttttnnntggcccctcctcttctnngnntttnnnttgtgtgtttcgtttgttcttgtgtgtgtggttgttttgtgtgttctgcgngcttntgtttcgtggcgggctctctttctcccccccttgcctgtgttcgccttgcttggggttgtcgtggnngcctttgccncgctggttccttgtggtatgtntgtgtcntatntacccttctcgacgcnnncnnncggcgccgggcacaagatatntnnccntccctnctctcttnnccttncnatcacctctatcttcttccattccgcatctctggttcttctcgcttctcctctacgactctctaagctctcgtctggctgtatgcgtcttgtcgttcggccgtcctctgtgcgctctgtgagcgtattgtgtggatctctcttatctcatagcgttctgtgctggtgttgtatcgcgtgcttactgttgtgttgtggtcgcggtcgaccacgcgcgtggtcttgtggtagnngacccgctgggcggggcctccgccacacccctgtgcagccatcgcctncnnccacgcatcccgcgtnactccaccaccggccacaacacacacgcncacgaaacaacgagacaatnatctacacggagccacgacacgctctaataagacggaactgttatagtactgtgcgaacagtaatagatgatgcaaatacatgaacacggctaacactataggctatctatgatatgacatacacctgcatggcactaagcaangcgccacatccatagcaacgccacgcgcgctatggtgaggacanacatgtccggcgcgatgacccgactacagtcatttnactctcgccagacaagccatcgacgacgaggagagtgatatgatggcaaaattaataggaggacatgtattcgtatcgagtgggcgtgatgcagtgaatctgctctacacactccgtcactctcctcctgttntatccaccctccgcgtgttcgcatcatcctctcccacacaccgcaggctgatgagcgatatcagagacgagatcagacggcccacacagcacacacccaactagaagaacatatccctcaccactccaatgcactgttggacaccaccgacncgcagcacaaacactgtncatcacatgcgtccgactacctcgtcacttccntgtccgtccgtgcgtgttgttctctgccgcgctttgcgacatcngcttgtactccgtctcgtgtgcgaggcatcgatccgattcatgccgcactcttctctcatctgtcacgcgctgcgactcatctctcgcttctcgcaacaatgtgctgcgctataccgccaccgcactcccatcacgacnccgccacgcgccacgtgtcgcgcgctctcacgttaagaattggtgatcgcggtatgtaggagagangggcgtgcgctccgngcggtattcgcctggagagctcgtggtcgccgtgactacgtcntgtcatcgttgacctgcaatcantatatatcacacgatatcaactaatagatgaactcatagtgatgtatatcagttctgtctatagatacgtgtcactctctcttcggagaggatgatgctagaacaggatcgtgatattacgaggactctcgtacctcaatcgtcactgctgcaganctacaagcagtgaccagcatcgcgcgctgtatctcttatgtcgcgcctcgccgcgcgtctgcgcgcgcgctcgtcatgcgccatctatctctctacgtatcttctgctncnctgtn

SEQ ID NO: 1140 - DNA, 705 bp, Glycine max
  Probeset Number=SeqID_10919
agttttaaaaatgaagtcgtctttgattgttgttttggtcgctgtcgcttttgcgaaagcgtacgaccccatggacaatttggtcgacagtgcgttggatcttgccaacgaggaactcgtcgagcagcataaagacacgctgaaaattatggatgtcgatcaggaactgaagacgaaattttggggtatgacactctcagcgcagatcaacgcgaaagagggactttttaaaaacgccagcagtctctacaggattggcaaagcggacgtgaagcagagcgattccggggcgttgacggtcgtcgcagaagtcggactaagcgaattgaaaattgaatacaaaacattcagcgctagagctttaggaatcaattttggcgactcagttgaagtcaactgcggaagcaacggtgtcagattcaactttacgatctcaaccgacgaagaaggtaactgcacgtcttctytaaacgacattcatctcacccgattgggcggactgagcatttcttttaaaccgtctggcttcacgaactggatgaagagccatgctttgtcttggggactctacttcggatctggtaccctctacaaggaactgaacagacagattcaaattytcgcccccgccgccatacagcaaatcgacgtctgcgaattatttaatttttaatgtattttcaaaaattaaattttttttggtct

SEQ ID NO: 1141 - DNA, 1361 bp, Glycine max
  misc_feature (88)..(88): n is a, c, g, or t
  misc_feature (366)..(366): n is a, c, g, or t
  misc_feature (615)..(615): n is a, c, g, or t
  misc_feature (856)..(856): n is a, c, g, or t
  misc_feature (1047)..(1047): n is a, c, g, or t
  misc_feature (1220)..(1221): n is a, c, g, or t
  misc_feature (1305)..(1305): n is a, c, g, or t
  Peptide Sequence Number=SeqID_9309
  Probeset Number=SeqID_10920
gggtgagatgcgggtgcagtactccatctggatatcatatatctctagcgcctcttgtagctattctagtggtgtgtggacgtaattnagtctttactacccattcagtcatcactcccctattcactcgtaagtgtagcgagttcagcaatgataatgtccactagtgatagaacacgtgattatatcgtgcctcccgatagtattagtcgagttcacttgtgtgtggcgggtggtgtcgagaggtggaacagagacagagaaattatatggtatcaaagcgtcattgcatggagcgtgtacatggagccgggagagagctccacgtggtgaacgcgtacgtatgttcctttgtatttcatgttntaatgtgcgtaaggtggcgaggaggtgaatagatgtaacggggaaggtatggagggagatatgtgatctctattaaattgtttcgatgacgatcgtctcacaagtagaagcaaataagagagtgtgtgtgagaagccccggcgccggggtgcgggtgggtgggcgaccgacactataaatatataagagatgtgggcggagtgtggtcaatcctacactctggtgtgtgtattatgcgtaagttggtcntttctctgtttttcttatttcttgcattaattcttcttctttctatatcaccctctaccactcatcaacctcactctctgcacaatctcatactcgacagcagcggcgcccgtcatctatacttcacaatatatataagcatgctaggcatcctcagaggcgacacaacaagcgcgccgcagcagaccaatgaatgacactaagcgtggagatccgatgactcgcttgctgcgtatgtcgnctcgcgctctccatatgtattttatgccgacgtcatacgccaaggatctgcggccacaaagcgaaccagaacccagacagaagatgagcaacgaagatacacaaaataggaaacgcgccgaggctgctgtgagaggcaggacatgatgagaaacacccgcggcaacaccacagggtggagggagggaaggncgttatgcaagaggacgatatgtttattagtggtgacgcctctacgcagatatacattattcgaactaacaccatactaattagagaggatgagcatccactcttttagcgcgctgcgttctgccgggtgcgattggatttacctcctgagtcgttcttgtgttggagggtannttgcgctctatgctgtgtcgtcttttgttgggaggggtccccccgtctgcctatctttggtgtcttctctgttttaattaaaanaggaagtaatgaggctagatctctgtctgcgtcttgaagtgcggaaataatcaaaa

SEQ ID NO: 1142 - DNA, 1437 bp, Glycine max
  misc_feature (15)..(16): n is a, c, g, or t
  misc_feature (18)..(21): n is a, c, g, or t
  misc_feature (23)..(23): n is a, c, g, or t
  misc_feature (25)..(27): n is a, c, g, or t
  misc_feature (29)..(30): n is a, c, g, or t
  misc_feature (119)..(119): n is a, c, g, or t
  misc_feature (742)..(742): n is a, c, g, or t
  Probeset Number=SeqID_10921
ttttaattaattaanntnnnntnannnanntattatatcatacaaaccctcaatacacccaacccctcccccaacatactaccccgccgcacattattaaggagacatacaataatagnattaatataagtctctagggacttatgaaaaaaaaaaaaatatataacaagaaaaaaaaaaaaataaaatggaaaacatgatccatcccgcgccacacaagaccttctacgcgggtgggtttctatcgtcctccctctcttttcctctcccgccctctcctctctttcttcttacatccgccacagaattcacatcttccctctctctcccctctctccctcctctcggcctcctcctctcccgaccccagcttggtatggtgtagtttccagtttgtgtttgggtgtttacttggtattctttacttagatatatatctcatgctgttcttctttttgttatatacaaaagatggtgcgaggctctcatcgttacgctctccccctccctctccgccccccctccaggtgcggcgcgatgacaaaggatgagcgcgtgcttgtgcaaacgcgtgagaacgattaaagaatgataatatcgttctaccgccctccaacagaaatatgctaatatattatccttgattacaaacgaattttgtgtttatcctcgctatggtatccctctacattcctctcctgtttgttgttctcctgttatttagttatttcttgttttcctnactattctaccacttacacaacccaccctcatattctacctctgtcttagcagctagaatcgatgcataaatattcatcacgttatctgtatcttcgtgtatcctgtccttgtagatctctcacttccgtgtgccgccatcaacatgctcgagcaagttgtctgggaggtctctgtctcttcttctgttatcaacgacgtacgctacactatctaactatcacaacacaatcgcttcgttagcatacagtgagaagccgcaataggctacactgcaacttcactcttatatgtaattctatctctgctctgctcccgcccccgcgtatgacccgcacgtccgcggttaccgcggttgattgcgaccgtgcgcgctgcggtttgcactgtacttgtagtagtgtcgtgctatgaacgattgggactcctccacctacactctatactccatatcgatgtacgacgatctcgcacacccacatgcgcacgctcatccgctgatattacaatattcaacatcttacttcctactacaataatcccttaatataataatccaacagcagagaacaacgacagaatatatgaaaaaacacgttaatacacaactcatcttttccttatgttctacgtccttcatgttcgcaccttgtaggtcaccactattagctctctctcgacggctgtagggccgtg

SEQ ID NO: 1143 - DNA, 492 bp, Glycine max
  Peptide Sequence Number=SeqID_9310
  Probeset Number=SeqID_10922
aattttaatcgttttgggttcgtctctctcgataaaagggtaaaacgcagaagcggcccgacgaagaaatcaggtatcaaagatgaaatcattcaaggaagaattgacgttggatgaaaggctcgcggaatcgagggagatcatcgccaagtatcctactcggattcctgtaattgctgagaagtattctaagaccgatctgcctgcaatcgagaaaaagaagttcctggttccacgagatatgtcggttggacaattcatctacatcttgagtgctagattacacttgtctcctggtaaagccttgttcgtcttcgtcaacaacactctccctcaaactgctgctctgatggactccatctacgagacttacaaagacgaagatggattcgtttacgtgtgctacagcagtgagaaaacctttggttgatactaccacaccatgtttgtacatatacacttcctcataagctgttgttgttcactacttca

SEQ ID NO: 1144 - DNA, 1383 bp, Glycine max
  misc_feature (73)..(73): n is a, c, g, or t
  misc_feature (111)..(112): n is a, c, g, or t
  misc_feature (167)..(167): n is a, c, g, or t
  misc_feature (766)..(766): n is a, c, g, or t
  misc_feature (1083)..(1083): n is a, c, g, or t
  misc_feature (1162)..(1162): n is a, c, g, or t
  misc_feature (1168)..(1168): n is a, c, g, or t
  misc_feature (1210)..(1210): n is a, c, g, or t
  misc_feature (1234)..(1234): n is a, c, g, or t
  misc_feature (1293)..(1293): n is a, c, g, or t
  misc_feature (1383)..(1383): n is a, c, g, or t
  Peptide Sequence Number=SeqID_9311
  Probeset Number=SeqID_10923
atttttatgaatgtaaaaagaacggggctatacaataaatcacaaatactcaaaacacaacgacattatattnatagcaagatatcgtgcttatttttagacccccccccnnatgacgccaggcgcgcaagaagaggggatacgggaggcgcccacccttaataagntcccgacggtcagtcgctacgaggcctcccccttcttttttgttctcattgtccccgggagggtgacgcgacactgtcctcatcatacaggaggatgataatagaagtgattagtaaaccagccaccccacccacactttagtaacaaacaggaaagatttggaaatagtactagatgagcacacacccaacacgtgcggagaaggagaatatagcacccaactagagccggctattaaataacttatctcttaggttcgtagaacgtgcatgcgattacatattagaacaagagaaatagatgagaagtgagagaaaagcacgagaaaaagggagacctaacgtaggtgaaggtctctccattttcctcacgcgcgtgacgcagtcgatatgatatgtatgagaaggcgatctcatttatctgtgcctgaggtatagcagtgttaattaaagcatatatactacttttttacatatcagaaatctcctcactacccctaacggattagtgtgtaggagtggcgacaccgactaagtgatgccggccactcatacaacacggcgagagtacggggcgcaccacgtagtcaatatatgcntgaccgctaccctctacaacacttcatttatttacataataaagacacacactactccgatataattggcgtctattgagtgagtgtgattgtatctaaccaccctcctctgaccgcgaactaggacagtgtactccggccagcgttctacacattattacgaggagatgacgtctagtgagtagcgcaatataggcacaggcaaccacaaccgatacatctgtcaattcgtacgaccgttcgcatcctccgtgtcgcgatacatacagggagtgacatgatgcatggacggtctctctctactatcgacacaaagnctcgcaatgatgctcatcgaatgcgaagtcgccatatatatcacacaacaatcatacgctgaaccacatgcactaggcntcgccnagccgcagctcactgtggctattagcgttgttccacagaaangacgagcgagtaatactcatatanaacggtattctcggacactcgttatcgtgaaatgaccctatagaccgcgtattttctcnctcgcgtccgcgcacggcccgagtgcctagggagtcgtgaggacggagagcgagaaggacgccgtactgagccgcgacttctcgagtacn

SEQ ID NO: 1145 - DNA, 429 bp, Glycine max
  Probeset Number=SeqID_10924
ggaattcggcacgaggaaggagctcaaggacttacagagagatccaccaacttcatgcagtgcaggacctgtgggtgaggacatgttccattggcaagcaaccatcattggtccaaatgacagtccctatgctggtggtgttttccttgtgaccatccatttccctcccgattatccccttcaaacctcccaaggtatacatcaaaaactgttaccgtattctgacacccattttcttcatttcagttaaactttcatttacaaatgactatggataagcaaagagtttcttcctttgccatatttgaaggtggaacatctgtttttctagagcaacacacaaacacacacatcagcagctatatacagatatatatacacatacatggtagcagcatcacctaacaaaatcgtgcttgtcttcaattt

SEQ ID NO: 1146 - DNA, 1078 bp, Glycine max
  misc_feature (1078)..(1078): n is a, c, g, or t
  Peptide Sequence Number=SeqID_9312
  Probeset Number=SeqID_10925
acgaggtaatcttaacacacttcctcgcggtatttgtggcatgatgttagaaaggaagccaatccttatttgacattgggtagagtcacttatttcattcactgggatcataatgttcacttggaagggttccaggatttcaaattcctcattagattagcattgacaatgcaacaaccaagctttttattactaggtggggttgggcacatagaccaaatgatgccataatattttattgtgaatcattgacctctaaatcccttttagtagtttttctatagtatttcatagtttccctctacctctagtgatagggctttcctctatctaatctactctccttactagggtttctatacgacttatccacacactcccaaatcatctatggtgatattttaccgcttctccacaataagtgttactccaactttccctttgttgcattcattcctaatcttatcttgtctctgctacattgtgttttctctactgttggcctttcaccacccattccttagttccatacaccatcatagatcttatgcttgtgtcttgaagtttccccttaagcttaagcggtacctttttgttgttagtctcacagtcacagtatgggtgccattctgcttagcgcagggactaaaggaaatagatatagcttgccaaattcaaggataatgattcaccaaccgcttggtggagctcaaggaggacaaactgacatagatatacaggtataggctccattttcatttttccaccttatttttttacataaacatctttttttgtttctaatagtttatatactatgatcatttgaaattaaagcatgtctaggtatttgaagccgagtaagtgttctggtagaaagacccaatttcttttttaattgcgcttgatgaaattccaaaatagaagtgcattttgtttatgtagcaaatggaccaaattggtccttagcagtatttaagttctgatgttttcaatcagaaatgacttgacactgtgccagagttattctctttgtgacagctcactttaaattacaatttacaactctgaggtttgn

SEQ ID NO: 1147 - DNA, 195 bp, Glycine max
  misc_feature (7)..(7): n is a, c, g, or t
  misc_feature (47)..(47): n is a, c, g, or t
  misc_feature (52)..(52): n is a, c, g, or t
  misc_feature (57)..(58): n is a, c, g, or t
  misc_feature (63)..(63): n is a, c, g, or t
  misc_feature (65)..(65): n is a, c, g, or t
  misc_feature (67)..(67): n is a, c, g, or t
  misc_feature (71)..(73): n is a, c, g, or t
  misc_feature (153)..(153): n is a, c, g, or t
  misc_feature (176)..(176): n is a, c, g, or t
  Peptide Sequence Number=SeqID_9313
  Probeset Number=SeqID_10926
gaaaaanaactgacagatgtgatgcattccatctcggaagagatcanggaanaaganncggcnantncttnnnattactccaaagcaaaagacatctgctatcccgggaaagttattcacagtgtgttcctgaataccatcaccaatgccatnaaataccggaaggagcatgaacngcctgttatccatattact

SEQ ID NO: 1148 - DNA, 1427 bp, Glycine max
  misc_feature (73)..(73): n is a, c, g, or t
  misc_feature (279)..(279): n is a, c, g, or t
  misc_feature (789)..(789): n is a, c, g, or t
  misc_feature (1068)..(1068): n is a, c, g, or t
  misc_feature (1075)..(1075): n is a, c, g, or t
  misc_feature (1208)..(1208): n is a, c, g, or t
  misc_feature (1275)..(1275): n is a, c, g, or t
  misc_feature (1300)..(1300): n is a, c, g, or t
  misc_feature (1348)..(1348): n is a, c, g, or t
  misc_feature (1393)..(1393): n is a, c, g, or t
  misc_feature (1427)..(1427): n is a, c, g, or t
  Probeset Number=SeqID_10927
tgtccccccctccctcctcaccctcccgcctcaccgcttcgctacacgccatcacgccaccgtctatatacanactcattctgcgccagaccgtcgcgccgccccgcggcggtagagtcagcgagtgtgtttgcgcgccagccaccgccccttttgtgttatttcttgtgggttcgacctaccaacaacgcaccccagccgcgggtgcgcgatcatctgcatcttacgtgatagcgtggcgaggactgtgccatccgtcacagtatacggtcacgcaantgtccgtatgtctgtctccatgatgcgcaaaaagctgctcagccctaaatggtgtggaagatgagaatggactcaccagacgagagagtgtggttacggagttgagaagtgagactaggacgccagtagctgcgcgattccgtcggttacactgtctgcattctgtgagctccacgacgcccgaaactagaaatgtggaggcgatatgtgttgtagaggcgcagtgcgcgtagatgaggccaatatactgagcgatgcgcgcgtgcacggacggtatgttgtgctcaccacgtccacttagctcgcctgagctcgtcacaacgcgtgatgatttgaggtcgagcgtatgtcatctagtcgctctgtgccctctctgtctcggcttgtacctcgattaccgtagttcaattacgccgcactgtgtcttcgcttacgctcataacgtcactcccctatatgcactactctcgtgattatagtctgcgacgattcgtctagtcactctatttnctatatgcgtcacagtatgtatgtgtcgtatgtgtccatgatctccactacctaacacgcaacacttctcctcacttcggactttagaaaacactctcagccatcgtgtcgcgttcgcatcttgggaaaacgagcgctgtacgcgcccatcctcacagtcctgccactaagcaatatctcatgcttccgacattcgatctgaatatcatatatgttagagatgtcagcatcatctgtgtatcgcacatggtgagcgccactgcgaattctgcagaccantgaaccngtatagatccgtctcgctatcttatattctatatctcgtatgttatttgtgcgtctgatcttagcacgtctgaggtactagtgtgtatcttgatgcacgtcatagatggtgcatgtctcattctcagcgacgngcctcgccgcacaacatcgcgcgcgccgtcggtagtagggacgacgtggatcacgacggtatgtggncgcggcggtcgtctggcgctcgatntatgtcatatggcgcttctcactacagacacgtagtgttatagtagtngaagccatatgatagatcagcgctatcgtacgcgtgcgctctcgncactactctgttctctcacgtaccgagctgcggn

SEQ ID NO: 1149 - DNA, 892 bp, Glycine max
  misc_feature (648)..(892): n is a, c, g, or t
  Peptide Sequence Number=SeqID_9314
  Probeset Number=SeqID_10928
aagcaaaggctaaagtagattagattctcctcaagcaaaacctagagctcccacactcctccactacttagaatattaaaagccccttccttcatcaaggtactactgtttcatcttccctcaaagattggaacaacaacaggaacatgggtactctaacaactgttcctgtgctcccttctaagcttaacaagccttcgctttctccgcgtcacaattccgtctccctcgacctctacaaccagggatccgcgactgcctatgatgtgtcacttaatgacgactcttggccaacacaagcatttgagcttgtcactggagagaaaatcgaagacattggaaaggtttgaccctggtgccactgctacacacacatatgtacctggagaccaaaacacagggcaggttccaggggttcaccaagctattatttacgtacccgtcgttccccacaaagattggtcttcaaggaaggccctacttcaacttcccattcttccccactgggatattcctcccctgagaagacttccctgaaaaaaaaattttgtactggggcctaacaaggcctttcggggccaaaataaggggcccaccttggggcccggcttgtccccattttgctggcatctgcttattccacccctnnnnnnnnnnnnnnnnnnnnnnnnnnnnnnnnnnnnnnnnnnnnnnnnnnnnnnnnnnnnnnnnnnnnnnnnnnnnnnnnnnnnnnnnnnnnnnnnnnnnnnnnnnnnnnnnnnnnnnnnnnnnnnnnnnnnnnnnnnnnnnnnnnnnnnnnnnnnnnnnnnnnnnnnnnnnnnnnnnnnnnnnnnnnnnnnnnnnnnnnnnnnnnnnnnnnnnnnnnnnnnnnnnnnnnnnnnnnnnnnnnnnn

SEQ ID NO: 1150 - DNA, 603 bp, Glycine max
  misc_feature (1)..(1): n is a, c, g, or t
  misc_feature (547)..(547): n is a, c, g, or t
  Peptide Sequence Number=SeqID_9315
  Probeset Number=SeqID_10929
ntgaatttttataccatgccttagatattcagcagcaaacttaaaaaacctaatcttccttcttgctcttaataggtacactcatcatccaaattaccgaaataagcgtcctttccttcctcgttcatatccatgatcaacttgaaagaattgtccctgctgacctggaactccttctcaaatctgttcttagaagcttcagcataatcctgtctgtatctggtgtagtcaactgcaccattttcagcactttctctgctgaccttcttaaggacatcaaggattctggtcattctgcttctgtacaagccgtattggatctcgaacaagtcttcaagcatctgaacaaggaaattggtcttatgttcattggtaccgataagctgagggcttgagttacattcgatgaaccacaagttcaactcatcatcgagcatgaagtccaaaccgaacatctcgtacacgttactctggttccagaaagcgtgggcagacattctgacagtatggatgaaagcttcttggaagcttggcttcaaggtattgntaacccagttcttatccttgactttgccgctttcatagaggtagtctccgagacgt

SEQ ID NO: 1151 - DNA, 451 bp, Glycine max
  Peptide Sequence Number=SeqID_9316
  Probeset Number=SeqID_10930
tcaggttttggtctaaagaaatggtttctccagaatggccattctcaataaaccctctgctctcaatgctctcaacaccaatatagcagctacactgcataaactttatatgatctggaaatacgaccctaatattgattttgtgatgctcaaagacatcaaccaatcatttacaactaataaacatattattacactttaccatttaataaacaaaagaaacttaaaatcctataaacaattttttataacagcatatagttttatatacctaatatatacatattctaagccacatattactcttctaaataacattaccataactaataatactaaaatctcaatccctaatacatttcaatttacaacagacaaaactatttttactacccctaaatatcttattagataccaccctgatactacagcatctttatacctttcacat

SEQ ID NO: 1152 - DNA, 1403 bp, Glycine max
  misc_feature (60)..(60): n is a, c, g, or t
  Peptide Sequence Number=SeqID_9317
  Probeset Number=SeqID_10931
cgcgcatcaaccggcgcgctgtttcatcgcttcacctcgctcttctcgtttatttcgccnccatgcgtaacactcgttgcctacattggtctgggcaatatgtcgttggtaggggaacacgcgtttgcgctcatcccctgatcctgtcgcctcttttccgtgacaagtgtaattttaaatcccactctctttaagtctgcatacattctctttaccataattatttgttcactcggtctacaccaaatacttactgtggagacaacaactcacaagcgtggctcaaaacaaggtggcggtagaataccagggtgcgataagacgctaatgtgggcacaaaacaaggtggggtgaaacaaaagggcatcctgtcttcgctttttgtactacataagatttttgtctgctggtacctgctgccgaaactttttcctgaatcaccctgtcgcgtgtctcgttgtagataagtctcactcgccacacttcttctatgtcaaagaagttcgaaacactgactcgcgttttttcattatctttcactcattctgatcacgtcaaggttgctctgagcttcgtcactcagacacggtaacactccgctcgctaccttcttctcgttctttcctctacgccacttcctcatcgccctgtttctcgtattctcctcgctcggccacgccttcttctgcattcttaattcctcctcaatatcgtgcctgatctatctcgatctaaatatctatgtcctcaaatcctctactcaggttcccacgatccccaactatgcgtgccaaacttgcgcgaacagcgtggttgcacacacctgtagtgcgacacaaactttttattttcattgtcctctctacaccatcggtggccctcatggtcaatatacgccacaatgcggcaaccttctttctaattttgtttttgggtgctatatggggggagaaaataggtcgcaaatgaatagcggttgttaatatgggattttatgtgttgtataaatgggcgcacaccggcatcgaatagcgcgtcacccggtgcgaaaaacgggcggaaaaatgtcggtctttctacgcggcgcctcggtctaacacgggtataactgctaaacggcaaacatccgggctgttgtaatggtgtataaatggtgtggcaaaggcgggcaacaaacacgggcagaggaaccaggggcgaaaaccggggacaacgggggctccatacttggcaatgtggggtagggggactaggtgcacagggtgtcaacgggggaccggggggttagggaaggggcaaaatgtggtaaattgatgtgttgattttgtgttttttaacctgctccccgcccgcaacctggccaggcgtcaagggtagcaagggcgaaacgttggggcaacgtt

SEQ ID NO: 1153 - DNA, 410 bp, Glycine max
  misc_feature (407)..(407): n is a, c, g, or t
  Peptide Sequence Number=SeqID_9318
  Probeset Number=SeqID_10932
tgctctttgacgggttcgctgatgtttaccatttctaaatatcctcctctctttccacattctccataaaatcccttagaaacagagtgaaaagagacaagttctaatttttgatatttttcttccatttctcttaatacttttttaaatgaaataaatgattggccctctttgtagatattgtcttggtacacttcgtcagccattaagattaatttatttctgtagcagaaatccacgacctcttccatagccttgcggtccatggtatttccagtgggatttccaggattaataacaaccaaagctcttgtattaattcctttctttttggcctcatccaaagccttctccaattggggagtatctaatctccaatttgcctcttcatttaaataataccccangcg

SEQ ID NO: 1154 - DNA, 410 bp, Glycine max
  Peptide Sequence Number=SeqID_9319
  Probeset Number=SeqID_10933
tttttttttttttttatttttattccccccccactcccccgccaatataatattatttcgagtaagatcgatctctaccctcaccttttaattagccattaccaccaccccaattcatgaacgataacatgaccgccatggctgatcaatgcattcatgatccatccatagaaagactcatggatgcaaccatgtcatcatcatcagagggcatgatgatgttgagaccaaccaattcacacaactacacaacaagtggccacaatttaactccaaagggttgtgcattcaaaccaatccgaaggagatctagaacttctaagagcactccaattacccttctcaaagtcaacacctaccatatcagggcattggagcgacaattgactgggtgtcctaccacaaccacc

SEQ ID NO: 1155 - DNA, 1411 bp, Glycine max
  misc_feature (21)..(24): n is a, c, g, or t
  misc_feature (32)..(32): n is a, c, g, or t
  misc_feature (228)..(228): n is a, c, g, or t
  misc_feature (259)..(259): n is a, c, g, or t
  misc_feature (288)..(288): n is a, c, g, or t
  misc_feature (297)..(297): n is a, c, g, or t
  misc_feature (458)..(458): n is a, c, g, or t
  misc_feature (470)..(470): n is a, c, g, or t
  misc_feature (737)..(737): n is a, c, g, or t
  misc_feature (1068)..(1068): n is a, c, g, or t
  misc_feature (1085)..(1085): n is a, c, g, or t
  misc_feature (1114)..(1114): n is a, c, g, or t
  misc_feature (1119)..(1119): n is a, c, g, or t
  misc_feature (1142)..(1142): n is a, c, g, or t
  misc_feature (1211)..(1211): n is a, c, g, or t
  misc_feature (1311)..(1311): n is a, c, g, or t
  misc_feature (1323)..(1323): n is a, c, g, or t
  misc_feature (1401)..(1401): n is a, c, g, or t
  Probeset Number=SeqID_10934
gttgttccccgcctctcgcgnnnntctgtgtntcgcgcctcgttccgtcgcgtgctcctcctgctgctcctcttcgcctagtctgtcggtagagtgtggtagtgggtttgtgctgttcgtgccgatcttgttaggtagggtcgggagtgtgtttgtgtgcggactgcgtgcgtagtatttctctacctgatctatcttctcttatatcatgatgacactgtttcttgnctctcacatgtcatttactccagcggagttngggcgcgtcgccgcatcacacgcggagangacagcacngacgcgtgtagtaagtgaggcggagatatggtagatacgcgcatgagaggccgcgcgcccagtgcggtgacacgggctgaagagcaagatagttgcttcgcgcgttgtatccgctcgcgcgcccggcgcccccgcgctgcggcacgcgtgcgcacttactncaacgacgcagntcaatcgcacaggagcgttcctgtgattatcgagattatgttgtactatgatattttagttcgatcttctctctcgttttagtctcgctgtgcctgcgtgcgggctgtgcgacttgctgtcgcgatgttacgcatataaagatatatagctaacgcgtcagtagatatatgacgctccacacctcaagatcatgactgacgtcgacagatttacgctgtgatataatagatagtacatatattgtgtagtcgtgtgcgcggtagtanttattcgcttattataacgagtgtgtgagattagcgcacgcatacacgcatgagcccgcgtgctcattgtcatatcgttggagtataggcaccgcacacccttgtctgtgtgtcgcatactcgtgctttatctcaatagtctagaaacacgagcgagtgcgtggcaacgtatctctctgtcattgtattacttatattattctaatcctgttactacagcacatatctcgttacgacatcgttcgtatcgtcgacagtctcgcgtatgtgtgttgagttctactacacgttgcttcgcatcgcgactggcgtgtcgcgcgccgctcgtttnctcgcacgcgcgcatgngtacacgagcacgctgcctgcgcggagantcaangaacatcaggcggtctcactggntatcgatcgacatctatctcgactcgcgcgctctctcgcagcggtatcgcgatatatcaacacactcgntcgagtaccggcgtgcgcgtcgcgcgcgtcgtgttggtgcgcatattgattgatctcgcgtagcgcgcggcactctctggatatcgacgtcatctgctcncgtcgatctcgnaacgtgtgcaggatcctgcgtctgcgtcgccgcagtatgtgatacgtctgcgtacgcggcgctagaggcagagagcgntgatgtcgtg

SEQ ID NO: 1156 - DNA, 1659 bp, Glycine max
  misc_feature (10)..(10): n is a, c, g, or t
  misc_feature (16)..(17): n is a, c, g, or t
  misc_feature (238)..(238): n is a, c, g, or t
  misc_feature (327)..(327): n is a, c, g, or t
  misc_feature (959)..(959): n is a, c, g, or t
  misc_feature (1003)..(1003): n is a, c, g, or t
  misc_feature (1173)..(1173): n is a, c, g, or t
  misc_feature (1192)..(1192): n is a, c, g, or t
  misc_feature (1355)..(1355): n is a, c, g, or t
  misc_feature (1360)..(1360): n is a, c, g, or t
  misc_feature (1378)..(1378): n is a, c, g, or t
  misc_feature (1386)..(1386): n is a, c, g, or t
  misc_feature (1430)..(1430): n is a, c, g, or t
  misc_feature (1464)..(1464): n is a, c, g, or t
  misc_feature (1520)..(1520): n is a, c, g, or t
  misc_feature (1545)..(1545): n is a, c, g, or t
  misc_feature (1594)..(1594): n is a, c, g, or t
  Peptide Sequence Number=SeqID_9320
  Probeset Number=SeqID_10935
actagtactnctcatnntccgtagcatagtgacgcgagagagcggacgtatgtcactatcaacacaaacctacccccacaagcaatgcaatggttttagagtgaactatcataagacaatatattatgttataaattcaccacagcacctcatcctacgtattagtaccgtgtacaaggattgtatgggataatcgacttaagacaagacgacacacaacacggagacaccacgagcntaagatgttatttgatgacgattatcgtagtgtacatagctcactaagacactgacatcattcaacaataacagatataccacacgtantccgtcgtactggtgatcgtcgtacctcagttacctatccacgatggcatctcgcctcgacagtacaaatgcgagcgcttggacccacaaacactctctaacgaacaatagcttcactgactcacgttctatcagacacatcgtcgccctgcgtctgattatttattaggcggactgagtaggatgcgatgtatatggtttgacacgagaccaccacaccgaatcactctcttgtcattacctcatagccagtatgcagagcgatggacgcgaacgcagaaccaggaacgcacaagataatagtaggaacagccgacagacgctacaggaaaggaaatatagattacggcggccagacctcacgtagcgctgttgacatatagtaacgatacaaaacacacagatgaaatttccgtgtatataatgtatgtttactatagaaaccagaacacatctcgagcaaccgtggatactgtcccgctgatcttatacatccaacaccatcgtatcatatactacttagatactagatcgtgcgtgtcattactctcacatcaaccacgtccggctacgcgcagttaagataacagacacgtgccagcttctgatatcggctcggatgcgattgcgancactggtattttatataaaatatatcatgtctgaagtatccatntgcattacgtctggatcgctctcgagacgacactcttagcccgacccaacacgcttaccacgtctcacacacacgatttcgaatatgacgtactagctgagagcgtgacgtctgatctactcgcatgcttgtagatcctacagagagtacacctacccaggtatattatntctatcgtactgagacacngctacgcacatcgtcgtgcatactgccatctgacatctagctctcacctcacgataactgtgcatctacggagcctctgtacatataatacataatattcatctcagcattaatcatattataatccatcgatgtatgagtctctcgacgcaccatgctctcnctatngcatccactgtcatcgcnccgcgtgnatttcgcagctctaagcgacgtcgtatcccactgacgtgatgancatcatcgctagctaggagctatatgatatgcgngcacgacagcagacgatcgatctcattcgagaatgcctatccactgcatgctcatnatgcattcactacactatactaaantctataccatacagtctacactgtactgctactagtcagcgcagtcgcngccgtgaatacgctaatcttcctatacattactaaagcgctctagcatcacttcccacatcatat

SEQ ID NO: 1157 - DNA, 547 bp, Glycine max
  Probeset Number=SeqID_10936
tcgatcagctacgtaggccccccccccccatcagtttttcgatttctctctcgaaacaaacagcaaaaacagaaaaataattcatcatgaaatttgtcgtgctcgcagttttgttcgccttcgttgcggttgctgttgtcagtgcattaccacaaacaggtggtgcaggtcaaactgctgcaaatgcaccacaaagtgcagccggagtgagtgaggcagcaagttcattgcaacagctcatacaaactctactaagccttgtggaaggattaaccggaggaaagcttggaggattacctaagagtctccctgttggtgatgtcgctggacttgatagtctccctttggttggtggtggtgatgccgctcaaaattaagacaacctcagaaaaatcaaaggaccacggaaaatcattctcaaaatcaaactaaaaaatttcaaaaacctgcagatcgattttaattgaaaaaaaatgcaatgcaatacattacatttatcaatgaaaaataaagaaaattgaatcaatgtaaaaaaaaaaaaaaaaaa

SEQ ID NO: 1158 - DNA, 523 bp, Glycine max
  Peptide Sequence Number=SeqID_9321
  Probeset Number=SeqID_10937
gttctatcccaagatatacattaagccgaggtcggacgaaacaataaggaacaactcgaccctgatgttaatcttggtaggtgattatggatcttcgatggactgacaaattacctgtgatagagttgcaatgactgcgctctgacgcatacgcaacaacgttcggaacctcctcaccctctactagaaaaacccgcgccggatcttctagggatacgcgctgctccgaatgatgttccacttacggtgctcctcgcatgacacacctaacaagcttgattacgatctcgtcctcaccgtcgagaactttctcgagcgccgcctccatacccttgttttcaactccggcatggtcaagtccctccactctgctacggctcttatcaagcatatacatatcagggttggttaggcagcggcgaacatcccatctttcttggtaggggttgactcacacaaacacattgacttttcacttacaaatccccttggtggtggtcgccctggaagagtgaagagacga

SEQ ID NO: 1159 - DNA, 581 bp, Glycine max
  Peptide Sequence Number=SeqID_9322
  Probeset Number=SeqID_10938
gtattaaacataaaaataaaatcaagctatggctagtaaaagaggaagaggtggtcaagtcggtaccaagcttaaggtgtctttgggtcttgcccaaggtgccttgatcaactgtgctgataacactggtgctaaaaacttattcattatttctgctttcggtattagaggtcacttgagcagactccccagcgcctccgctggtgatatggttttggtttccgtcaagaagggtaaacccgaactcagaaagaaggtcttacaagccgtcgttgtcagacaaagaaagccttggagaagaaaggaaggcattttcatctactgcgaagataacgctggtgtcatcgtcaaccccaagggagaaatgaagggatccgctattaccggacctgttgctaaggaatgcgctgatatctggcccaaggtcgcctccgccgctggctctatcatctaaacaaacgcaaatagtttaaggaattttcccaatatcaataaagcatacgcatttctataatgtgtatagtagtaatgagctttttgcataaaaaccaaaacttgaaaaacctttaaagtttttatcg

SEQ ID NO: 1160 - DNA, 1586 bp, Glycine max
  misc_feature (18)..(18): n is a, c, g, or t
  misc_feature (361)..(361): n is a, c, g, or t
  misc_feature (403)..(403): n is a, c, g, or t
  misc_feature (431)..(431): n is a, c, g, or t
  misc_feature (870)..(870): n is a, c, g, or t
  misc_feature (881)..(881): n is a, c, g, or t
  misc_feature (1134)..(1134): n is a, c, g, or t
  misc_feature (1154)..(1154): n is a, c, g, or t
  misc_feature (1170)..(1170): n is a, c, g, or t
  misc_feature (1201)..(1201): n is a, c, g, or t
  misc_feature (1423)..(1423): n is a, c, g, or t
  misc_feature (1443)..(1443): n is a, c, g, or t
  misc_feature (1447)..(1447): n is a, c, g, or t
  misc_feature (1457)..(1457): n is a, c, g, or t
  misc_feature (1586)..(1586): n is a, c, g, or t
  Peptide Sequence Number=SeqID_9323
  Probeset Number=SeqID_10939
ctctctcttctgtccttntgtcgtgctcttggcgtcttctggctctccgcagaacggctagctgtgtcggttatttacattattaccgaacgccagtaatgttataacctaccactctaccctcgacccacagacttcgaccagtcgctgccatcgctgatctcgtgtcggcgaggcacgtcacggctgctcatcctctccctgccgatccatatactaccgtcctctcacataacactccgatcttcgaccgcgctacacacatcatgcgcgcggctgctatattgttacgacgcctctcgtgaccagcgtgtgagtggtgtggtgttagtgtgttgcgctagcacttctcgctcatctnatacactgtcgccgtatcactgtataataacgacatcgtgcncacacgcactgagactacaccatctcancgcatatacctagatcatgtaacatatactacatcgagcccacgacacagcagatctaatgacatacgtgctagtgtcaacacgctacactgagctcacgccacacactacatactaatcatctccgcgcactaacttcactacatatcgctagaacaagcgtgctgcgatcagcgtcgatctacgaacgaccgctagtcacatagctgactgctgacgtcactaatagtgtgttgttgtgcgtatgcaatacgactacacggccatacactcgcacctcctgacctgaatcgtcatctctcactgatctcagcgacgagtcactatgctattccgctctatcacatctcattacaatgatgactatcgaagacagagccgcgaacacgcgtatcgatcatcatgcacattgctactactagtcactcatacagctagnagtcatagacntagctgtcggtcccgcacacatacatgacatcgccgtctgcagcacacactatacacatctcaatacattacgctccgtcacgatccacaccacacactatcacatgagacgtttgctatgtcccacgagtatactgcgaccgcgtcagtccagtcactcgcaatgcgcgcgtccatcgacgcagtactcggaaatgtaaccgacaccgcacgcgcgacgaacgggccgtgtgactgattcgtactatctagncatgtgagtgactgacacangacgtgacatacgcanctgcgtgactgcgagcgctcgcccagacatnccactgagctatgatcctgttctcacgacaccgctctctcgttgctccgcagtcaatcgcgcgcgtcgctcgtcgtggtcgaccgcgctcctgctctctcatcactcactgcatcacgtgccatacgcagcgcacgtcgctgatcatcgatatgtactagcaatgagcgactacacagctcgtctgccactgactcacatcctatacctgacgctcgtcgantacctagcttacctgagtantgcnctacgctctnactgcatatgtgcgcatgcagtattactactcgatatgataatatgtgatgcctatcgagtgtctctagcccgacacatcgtatatgagcgcgtgcgcattgtcacgatctcgtgtagtcatacgagtn

SEQ ID NO: 1161 - DNA, 269 bp, Glycine max
  misc_feature (166)..(170): n is a, c, g, or t
  Probeset Number=SeqID_10940
ggcgccccttcctcgcctcagagtgccgcgacctctcggaggccgacaagtggcggcagcatatcatgcgggagatcggccggaaagttgccgagatccagaatgagggtctcggctagcaccgcctccgcgatctcaacgacgatatcaacaagctcatccgcgnnnnntcccactgggaacgccgcatcgtggagcacggtggacaatattactggaagcactccgcgaagatgacggacctcgatggaaacatcgtcgacgtcccg

SEQ ID NO: 1162 - DNA, 1403 bp, Glycine max
  misc_feature (150)..(150): n is a, c, g, or t
  misc_feature (153)..(153): n is a, c, g, or t
  misc_feature (185)..(185): n is a, c, g, or t
  misc_feature (327)..(327): n is a, c, g, or t
  misc_feature (330)..(330): n is a, c, g, or t
  misc_feature (454)..(454): n is a, c, g, or t
  misc_feature (602)..(602): n is a, c, g, or t
  misc_feature (673)..(673): n is a, c, g, or t
  misc_feature (688)..(688): n is a, c, g, or t
  misc_feature (690)..(690): n is a, c, g, or t
  misc_feature (698)..(698): n is a, c, g, or t
  misc_feature (718)..(718): n is a, c, g, or t
  misc_feature (720)..(720): n is a, c, g, or t
  misc_feature (729)..(729): n is a, c, g, or t
  misc_feature (1105)..(1105): n is a, c, g, or t
  misc_feature (1328)..(1328): n is a, c, g, or t
  misc_feature (1333)..(1333): n is a, c, g, or t
  misc_feature (1335)..(1336): n is a, c, g, or t
  misc_feature (1338)..(1340): n is a, c, g, or t
  misc_feature (1374)..(1374): n is a, c, g, or t
  misc_feature (1376)..(1376): n is a, c, g, or t
  Peptide Sequence Number=SeqID_9324
  Probeset Number=SeqID_10941
ctcggtactctcatgtgtgtgtctcatatgcgtgcgtattctctaatatctgtgggtgcaggagtcatgcattaggaatgtatgtgtgcgacagataggagatctcccagcttacgtggtttatattcggacattgtcactgatagtgtngtntaattattccttaagacggagagtgtctctcnacacaccacgagatgaggagcacagcatgactatagttaagtacagagacatagcatacacactcatacttgtctcgtcatcggatgtctctagatatacagatatcgtatatgcctccgtgctagcctgaggcacgccgcnacntagatctagtgcactcataattccatgtgcgtatactgagaggcgatacgtgcagtcaatatatctcctctcggattcgtagatgacggagtgttagtagcatgtcgcgagtgtgtgcgcgagnacacactgagcagtatgataaggtgctccgtcaagtatctccactaatgacaagactgatgacatctacacaccctgatcacggcgggtgtgcggggaggtgccggagacagtgctgtctctcatcgaatttagatcatgtcgttgtntgtgttatgatttgagaaatatcatgctttgtttttctaccatttatttcataatatattatgcgtgttgngttgttgtcgtttgntntctaatanattatattatatttcttacnanacattattntctattaaatcacacacctacgacacataaattactaattacactacaaacaagcagtattagatataccgactaccatcagtaggactatcagtgatatgtatagttctgcctccgtccgcttcatatcgttatgttactgtacgtcggacgcggatatgaagtgtctcacttctatgtggattctccaatcactcgtactatgatagtatgtcgtcaagtatttatatatatgtctatgtatctacctgcttaaatagaagacacgagagtgtagcagggctaaagattctccgctccatgagaccgaagggagattaaagcaccctacttgaaggtgagattatagacaatagtacggatggaggaatagaanagtggaactatacctaatactgtcatatctatgggtgtggggatgtgtgcctagcatgatattaacgcatactctccgagattcgcgtaagacggaggtatatagagagataagtgatgagcgctcattcctctctcccgcactcggagggggtgtctctgctatttgtaataagaggcggcccccctcctcccgctagaggagaagctagacatgcaatggngcgcntnntnnntcaccggaagcggaggagtggtgtggtggagggngngaggcagcacaagaaaagaaaaaaaaa

SEQ ID NO: 1163 - DNA, 217 bp, Glycine max
  Probeset Number=SeqID_10942
caaagcagtcgatgtcactccatctcttactatcacacttggtattagagagcgcgcttcctagggatgaggagtgatcataatgtggcaggctatatactgtggacctcgcaggctctgagaatatagctcgttctcgcagcaccataggtaaatcataggatgccggggagatagataaaaaacggcttacactgggacgagagaccatgctcta

SEQ ID NO: 1164 - DNA, 208 bp, Glycine max
  Peptide Sequence Number=SeqID_9325
  Probeset Number=SeqID_10943
atgaacacggatctgaaggtgggcggtgaacatatttcttcgctgttggaagaagagatcactgtgcctactctggccgtaagagataaggatgaaaatgattgcttagctatgcttgatgatcgtagagtctcgaatggggatctttttggcgcctatgacacagcttattctaagcctccgctgactgttatgagcagtggagatg

SEQ ID NO: 1165 - DNA, 1744 bp, Glycine max
  misc_feature (13)..(14): n is a, c, g, or t
  misc_feature (18)..(18): n is a, c, g, or t
  misc_feature (31)..(31): n is a, c, g, or t
  misc_feature (68)..(69): n is a, c, g, or t
  misc_feature (419)..(419): n is a, c, g, or t
  misc_feature (986)..(986): n is a, c, g, or t
  misc_feature (1271)..(1271): n is a, c, g, or t
  misc_feature (1296)..(1296): n is a, c, g, or t
  misc_feature (1302)..(1302): n is a, c, g, or t
  misc_feature (1329)..(1329): n is a, c, g, or t
  misc_feature (1335)..(1335): n is a, c, g, or t
  misc_feature (1434)..(1434): n is a, c, g, or t
  misc_feature (1531)..(1531): n is a, c, g, or t
  misc_feature (1560)..(1560): n is a, c, g, or t
  misc_feature (1574)..(1574): n is a, c, g, or t
  misc_feature (1605)..(1605): n is a, c, g, or t
  misc_feature (1660)..(1660): n is a, c, g, or t
  misc_feature (1744)..(1744): n is a, c, g, or t
  Peptide Sequence Number=SeqID_9326
  Probeset Number=SeqID_10944
caccagtccactnnttcnttactcctaaccncatggatatagcactcatcttcttcatcctcaatcannaaaccaagccgtaggtgagcgatgcacggcgccctccctctccgtccgaagtgcatagcgtagagggcacgcaccccccccacccacacagtgcgctatgactcattatctcgcttatagaggcgtgatgctagtctgtacagtcctcctcctgatactatagataataagtcataacagtaagtgcaggacctagtcatcttcatctgactcctcaggtattaggtcacagcagccgcttgtccagcttcagcagactccaatcttgtacaaatattatcttataggagcggaggcgagatgcatagggcacgccaacatcttgtaacgcaactcgtctctcgctctanaccctagtactgtatgactattgtcttccgacttcaggtagacaccctacaagtcacatatctttaagtattaagcgtacagaagtgggagtgctcacgagctatactcctgtgactcagtcaatacatatcactaatcgtgcgtcggcataatcgacggtatgcgtattaggtacatccgatcgtatagcatacgtattctcgcatacttgtgcctatttgtagccacatctcttctatgatagacatatacgactaattcgggctgaatcacatagagcatgtaatctttccagatatctctccgtttcacttgatcgatctacgcttaagcggtcataacgccctcatggaacacgaccctcaaaactctactccttcacctagccttttgagtgactcctcctgcttcctacacgcgaggactatagtagagcaaatgacgcgctccatatagtacacctgcgactctatacatttgctcgaaccgccaacacacctcctccagaatgaggtagtcggtcttaacttattccgagtaccattcttcttcgcgataccgctgangcgtcgtctctctagtgaggtcccggtagattaccctctctcctctccctcgctctacgaatctgtgcgcacgtgctataactcgcggcggcgaatctcagtaatggtgatcatcctcactactgtgtgcacgctcgaatcgctctgactatatgtactttccgtaataatgcgatcttatctctattgatgcgctcgcctctcatctcacggcgagcctcatcattacatctcatgatatcgtcggagcgcaccctacactctcttattacttattctgagttnccagatagatctgtcttattgtcgntgttanattgctaccggacgagatgataatcgntcatangtctatgaattctcgtcctcgagtaatactcttcttacgtcctacaccactcatctcatgcgcctcatacatgacctacgcgcgtctcgtcgctcatantatgtgctctcatcgacatcacctgcgacagatcactctcactgctcgctgatcagtcacacacgcgagcatgagtacatcgtcgcacgtctcatgntcgctacctcgctgtggtcgcaccgactngataccttgcttangccgctctcgatgatatacacagaacgagtntcggtctcagcatatgacctacgctatattatctcgacaatgctcttcacttgtncgatatatatcttgatcgatagacatctctcacctcgcactactcgtcagcactgatatatatgtttatcacgcaacacgatgn

SEQ ID NO: 1166 - DNA, 556 bp, Glycine max
  Probeset Number=SeqID_10945
aagttttttctttttgtacgataattatctggtaatagaaaaattaccattgatcgtttcattattattgaaggcattaatgatttaattgatgacttaattgtgaataaatatggttttgaaacatgagttcattgaggtcattgggaatgaatggtgaccaatttcaaccatgacttgattgaggtcagagactaggttgatccatcattggggcaagatatgagatagagctttggcgtgccgtattcattcgattctctctatcttgtcttttccacgtaaaagactgtttcatttctatggtcggggaagaagcctcatgctagcaagttacccctttggcattacaatcatcagagccttgcatgtggcaagtgaaggaaagatgcaccattttgagaaaaacaaattgcaaaaggtgtagttcttaatttaattatgcttttttacttatttatttattactattgttacagcacaacaatttttcttttgggatgaggatttatttctgtggcccattagaagttcaaatgtgtaatatcagcaccat

SEQ ID NO: 1167 - DNA, 1746 bp, Glycine max
  misc_feature (14)..(14): n is a, c, g, or t
  misc_feature (948)..(948): n is a, c, g, or t
  misc_feature (956)..(956): n is a, c, g, or t
  misc_feature (1069)..(1069): n is a, c, g, or t
  misc_feature (1103)..(1103): n is a, c, g, or t
  misc_feature (1119)..(1119): n is a, c, g, or t
  misc_feature (1157)..(1157): n is a, c, g, or t
  misc_feature (1182)..(1182): n is a, c, g, or t
  misc_feature (1185)..(1185): n is a, c, g, or t
  misc_feature (1212)..(1212): n is a, c, g, or t
  misc_feature (1221)..(1221): n is a, c, g, or t
  misc_feature (1225)..(1225): n is a, c, g, or t
  misc_feature (1264)..(1264): n is a, c, g, or t
  misc_feature (1300)..(1300): n is a, c, g, or t
  misc_feature (1340)..(1340): n is a, c, g, or t
  misc_feature (1345)..(1345): n is a, c, g, or t
  misc_feature (1366)..(1366): n is a, c, g, or t
  misc_feature (1599)..(1599): n is a, c, g, or t
  misc_feature (1615)..(1615): n is a, c, g, or t
  misc_feature (1680)..(1680): n is a, c, g, or t
  Peptide Sequence Number=SeqID_9327
  Probeset Number=SeqID_10946
gatagtgtcccccnacctccgccccacacgatatagctagcgatggtatatttgtgcgcgccgttacatcgctccccccactcttcttccgttacatattttgaatcgcctgttctttcgtttgtgtttatccatatttttgatattagttgccttcctctcccgacccattgtgttgtcgagagggaactgttataacgatccacgaccacaccaatcactaatgaaagtagtttcgccacacactacggtttatctcaacacagtgtctcaccccacagattcttttgcccgcacattaagcatattttatctgtgcacaccgcgcggcgccgcatagtacgaatcctccaatagaattatatataatccggctttaatctcccccttttcttttattatattctcctcgtcattgtcgccgatccctctcttactatctctcgccgcgttaacacgaacgccggcggtgtggtggggcgcgccggtggctaccaacgccaacacatgccaatctctctttacaacttcccgtttctctatctacgtcgcacgccgaatcaaagcggccgtgatctaaagaacttaagaattaattataattgtgatagcgtataccgtgtactcgaccacaacgcgtactatttcgttctgtttaccgcacgacgtgttttaatagctggcgcccgaatcacaaaatgaccctgaccccccgcgcgtacaaataaaatgtgttctcttgcactcgaagtacgatatatacacgcgcgcgtaaatattgacgcagaacacatgttctgtgtcgaatttgataacacgtcctctgccacacgacaaatacgacacaataaatatggtgtgttgtttgcttctgctacttcgccattatcactattatgagagatgatgtgtgtagataggaacgcagacatgatgatgtatgtatgnagataaanacccaccgagcatgacgcgtttctcgtacgaatatgacgatgggtgtgttaatagacgacgcaacgtgcatcgtacaggatatgtacagtgagtgtgttcataagacttatgncaatgataacagaaagacgatggtatgtgcgttngaatctatctgcacanagataatagtgcagacacgggtctataatgagggggcncacgacacactctacgcacgcgtanaancatagtaagcgcgtgcgactgtgacgnactgctgcngtgngcgctactgactgtcatacaagtatacgaatcgggggcnggccgtataatatatatgcggcggcgtgccgagtcnggagatagacatataatgtatggcatacaatgcggcgtangcggngcctggcgcgccgcgcaggantaggtgagaatagactagacatgcggcgcgtgagacacatattacagagcgtcgcgcgcgtgctgccgtataggtgtcgacagacaaaaaatgatcgtcgagacgtattagtgtcgtgccgcgtatacggtataaatcacacacacatatcatcgcgcgcgcgcgcggcgtgtacgtggacgcgctcgttataatactcacgaagtcggcgtatagtatgactcgcaggcggnccctggcatacataangacgatgtatatatcactcccgcggcgcatgcgcgcgcagtataataccgatgtattgatactanatcgtcagtcgtttagcctacgacgaatatacacagcagagcatattggtcgtgatgtgtactata

SEQ ID NO: 1168 - DNA, 638 bp, Glycine max
  Probeset Number=SeqID_10947
atctccgttctctttgccggctgtggcggcgatccagatccggcgggaggccgccgccgtgcgtggcccctcccctaactactccgccacccaggccgtctggatccatctccgggcaccccgacgtcgcgctccacatcatcatctcggccacatccagctctgccacggtctgctccacaggagcaccacccgaccttcaccgtgctggactatatgacgggttggtgattggtcggaagtcccacatcacggacgtgttcgcgatgacgcagatcgacggccgcatgtgccaggtcctcgatcaccatgatggatgatgctttaacaaccagaagcatcaggagtacatatggagagaagaagcgcttagcataggcttcccttgcttacaattgcaggagcaaaactcatttgtctgcatgataatttaaatcctttgttgtcggtcatgtgctataaatggtcctgtcatgttaatcaggccatgtatatggatcagagtggaccagaaatagaataccttgtgaaattcattttcgccatcctattgagatgtgggtgtttattactagagaagcttaatgttgactttaatttagtgttgcataatagttataaatgaatttagtagtttc

SEQ ID NO: 1169 - DNA, 601 bp, Glycine max
  Peptide Sequence Number=SeqID_9328
  Probeset Number=SeqID_10948
agggtcttattctttcctacttggaaggcttcttcttcgaatttctcgtaaaactctcaatctccaaggtgaaaagaaaagggatttatgtatatggataacaagtcaccaagcaaggagtcccaggagtagacacgtgagtcgattatcgctatctctaactctttacatgataaaactctggaatcacagtctggcttggagagcaagaaatcagatggtgttgcgatgcaaaaccgtgatcaagatgacaagcttaggtctgaactgatttcaatttcttatgctgactcccctgatgaaaaaatctgatcagcgtcaaaggtaaactacttcatgtgtaaatcctggattaacgtgaggcagatctttactctaaggcaaaggttgcgacttgactgcttatatactgactgagctatcgcgcaactatatgtaaatactttcagcggctacatgtgtgacgcatatgatgaaaccaccccgccaactgaaaagtgcggatgctcaaaattacgtaaacctgagggagaagcttgacaaccggaaacacacttaaatcgcttatcgatgcccgtttagctccaagcaggggacactt

SEQ ID NO: 1170 - DNA, 482 bp, Glycine max
  misc_feature (28)..(28): n is a, c, g, or t
  misc_feature (49)..(49): n is a, c, g, or t
  misc_feature (191)..(191): n is a, c, g, or t
  misc_feature (379)..(379): n is a, c, g, or t
  misc_feature (412)..(412): n is a, c, g, or t
  misc_feature (473)..(473): n is a, c, g, or t
  Probeset Number=SeqID_10949
ttttttttttttttttttcttcttcaanacatccaattcttccttcacnatttgtctcattgtcttctcctttcttgccaattcatctctttgttcttgagtcatttcttcccttctcttcaattccaactctctgagtctagcttcttctctcatctccctttgtttcttttcaatctctcgagtttganctaactttgcttcattaattctcaacagagtctgctctcttctttcatattccgaatgttcttcttcagtgagcaagtcttttgcctttaactctctcattctcttttcaatttcttctatcaactccttttctctctgttcaaactctcttctttcaatctctctgagttcttcttgttcttgtaanagtttctctctttgagccatttcattttggaanaattgttcactataatttatctctacaatctccctttcagccagcttttcttgaaaaaaancacatatct

SEQ ID NO: 1171 - DNA, 793 bp, Glycine max
  misc_feature (1)..(1): n is a, c, g, or t
  Peptide Sequence Number=SeqID_9329
  Probeset Number=SeqID_10950
nagtgctaacagggtttacgggggcaaccctccagccatgggaggttggtcctgtgctgggggatgagattctggcgggggaggtgccggatttcaattcctggggaaggatttgaagcgggaagcagcggagagactggaggattgagtcaagctgggaagatatgcacctggttctcaagctatcatgaccattgtgtctgttgtatggattcctatggtctatgtgaaactcctttcaagcttgatccgggacttttgtgctccgcagcgtgcgacatcgaaacaatgaaaattggaagtcttttgtgttgttgtcttctccaaccatctgagaagggaccaatgtatgagaagggtataagccaacatcccctggattgtcgcaatataagtgaagggaatgtgctttgttattgcctggctctgatggtatcaacacattttgatgtagaggctttgctggatgtgaggagatgttgctgctcctggatgtgagtggatcttgcaagtttgcgactatactgttaccaaggacatgaagaattcggtcgaagcctctttatgaaatgcatggttactggagcgctccatgtttgtctagttgcatgttgtggttgcagctgaagaaccttctcctccacgggttagttcatgactactgtgaatgtttttgttcgcgattgtaaatgcgaagctccagggcgtgttgacaagaggatgtatcacgaactgctgacaccaacattcaaataataatacagtagatagatagccaaaaaaaaaaaaaaaa

SEQ ID NO: 1172 - DNA, 485 bp, Glycine max
  Peptide Sequence Number=SeqID_9330
  Probeset Number=SeqID_10951
attgaaccaccgactcccctacctgacaagatggcagcccgtgtcgccgcagctctcgccctggccctgctcgtccaggtggcctcagccgctccccaatacacctgcagctgttccgccacccctgcctccggccccgtctacattggaggtggtgtcggcccagtcgtctaccctagcggcggtgtgaccattgacacccctgctcccggccccgtgtactgcggtggtgtcggacctaccgtctacggaggtggtgttgccatcgactcttccgctgatgcctacgctgctgccaccgctgacgcttcctactacggtggtgatgtctccactgacgccaacactgtatacctcggatcctcttctggtgccgtcagtgtgaccgacaactccatctacgccactcccaccgtttctccctccgtccctgtcggctctcctcagatcgtgtccacctctgccggtcccgcctcctcctacaa

SEQ ID NO: 1173 - DNA, 1962 bp, Glycine max
  misc_feature (21)..(21): n is a, c, g, or t
  misc_feature (226)..(226): n is a, c, g, or t
  misc_feature (456)..(456): n is a, c, g, or t
  misc_feature (757)..(757): n is a, c, g, or t
  misc_feature (950)..(950): n is a, c, g, or t
  misc_feature (1182)..(1182): n is a, c, g, or t
  misc_feature (1217)..(1217): n is a, c, g, or t
  misc_feature (1293)..(1293): n is a, c, g, or t
  misc_feature (1443)..(1443): n is a, c, g, or t
  misc_feature (1609)..(1609): n is a, c, g, or t
  misc_feature (1614)..(1614): n is a, c, g, or t
  misc_feature (1617)..(1617): n is a, c, g, or t
  misc_feature (1737)..(1737): n is a, c, g, or t
  misc_feature (1777)..(1777): n is a, c, g, or t
  misc_feature (1811)..(1811): n is a, c, g, or t
  misc_feature (1934)..(1934): n is a, c, g, or t
  Probeset Number=SeqID_10952
accccccactctcccacccancctctcaccgacccatgcgaggaggttcgtgagaaccgcgcgagagaagacggagagagagggatagcagagaggcgggacctcccccccccctcgagaagggaagtgataagtgtaatacgcactctttctctccctcattctttcagatgattgttacttcgtagaagaggaaggcggacaatctagtggatgagtcgtctgngagatgtcggggccgctgcgcacagagcgagatatgtgcaggtgtctaaatcaccatatataccctactgatgtgtcagcgacactatcgtcttagcagcaccggcatgtaacgcgacctacgtcaaagacaactagctacacgaccataaacacatgagaagcagtgaaggtgagctgtagtcggctaatgaagagagtatagtacttaccatgacgcaccgggtaaanagctgcccgagggcgggatatgttagatgatgccgtcccctacatggcatgtaactcaacttctgcgtgtctaacaaagcgagcaagcacactgagcgtcatgatctgatattagcgttctctttctgaggatgcgcctcgttgtagatacgtgctccacatgaggtatgatcattgatagagcggtaggtcttgtcggtgtatggtgaggtgagactatctatatcggaccgacacacctctagtgcctcgcatttacgtcttacgcgactcgtgttagtgtgtacgaccagcgcaccanggagacgcgcatcccgctgcctacatttacgtgaggagaggtgagagcagagcacactcacactgcagatgacgcaatgtcgctctctttcggtgccgatgtcagtgatatgggtagagcgatgtagtgtgtcactggcgcgacacctctcacccacacactttcaattcagtggctgctccgctgagaattnacgtgagtagcatctgcattacgcagagtacgacaacttgaatgacagatagcttcgagaatgtgcagacagccattacatcaggatcatacgagatagaaagacattaagctctgtaagagagtgtatgatgcacgaggcgatttactaagctatggatggatgtatgcgaatggtactatctctacctacgtgctctcacgtcgttcatcccttcaccatcgctgtctgncgtctcgataacaatcaccgtatattacactcaangagtgctatatgaccgatagtgtcaatatgaaagtgagcacacctcaccaggcgtgagcggcggcgcgcggcgagngatcgtcacctcgaaggctcagatcaccagctggactacgcactctatcgttggcaacacactctagaaacgatgctcatacgttgcatgaaaatatatatactatcatgagagctcgtacgtctcgacacgtactcgctagagccgcgngcatacccttcggcattgagagcgtgatacgaatgatgtgtctctctttgagcttcacactctcatctacaggtgcaaagacgaacaatatgtgactatcatgcaacctatgatacaatacggtatatcgatacacaccgtatgagtatatgcacgaatcagatangagancantactcgcatatagcgcggattcgcatgcgtaacgcattatcaatctatctcgtatagtagcgcgagatcattatatcgactacgcaattagacgtgcgcacgttgtgtgtaggtatatgngccgatatgcataagtagtctatgtagctgcgagcatatnctcgtaccatactagatcgtagtgatagcgaaantatacccatcaatctacgtgtgcgagacgtgattaaacgcaactctctctctatcaagcgtacgatcggacagctgcgcgcactcactgccatctgcattagtacataccacaagcaaagtantgacggcatagtaatcgtagcaccgttg

SEQ ID NO: 1174 - DNA, 1496 bp, Glycine max
  misc_feature (175)..(175): n is a, c, g, or t
  misc_feature (177)..(177): n is a, c, g, or t
  misc_feature (234)..(234): n is a, c, g, or t
  misc_feature (237)..(237): n is a, c, g, or t
  misc_feature (360)..(360): n is a, c, g, or t
  misc_feature (446)..(446): n is a, c, g, or t
  misc_feature (460)..(460): n is a, c, g, or t
  misc_feature (472)..(472): n is a, c, g, or t
  misc_feature (488)..(488): n is a, c, g, or t
  misc_feature (596)..(596): n is a, c, g, or t
  misc_feature (727)..(727): n is a, c, g, or t
  misc_feature (997)..(997): n is a, c, g, or t
  misc_feature (1058)..(1058): n is a, c, g, or t
  misc_feature (1223)..(1223): n is a, c, g, or t
  misc_feature (1253)..(1253): n is a, c, g, or t
  misc_feature (1302)..(1302): n is a, c, g, or t
  misc_feature (1362)..(1362): n is a, c, g, or t
  misc_feature (1396)..(1397): n is a, c, g, or t
  misc_feature (1401)..(1401): n is a, c, g, or t
  misc_feature (1435)..(1435): n is a, c, g, or t
  misc_feature (1469)..(1469): n is a, c, g, or t
  misc_feature (1479)..(1479): n is a, c, g, or t
  misc_feature (1496)..(1496): n is a, c, g, or t
  Peptide Sequence Number=SeqID_9331
  Probeset Number=SeqID_10953
cgagaggtgcgcgacgcgtgacagatacgtgatagctgtaagtgctcgcgcatgtagctgctctggcgtgaagagagcgaggtcgcagagtgatcagactctgtatcgcgattctatcacgtgcgagtctgcgtctgctcacacagcgatgctcgtgaagtcacacagttgtatngncatatctgcgcacgcgcgcggactctctactgagtcgatgtgtgactctgttcttanatnatacacgtgtgtgtaatgtgtattctgtgtcgagctgatctgcgtcctgcagtgtgtcttctctttcaacatacacgatctacatatatatgcgtatgataaagtactatcggttatgactgncgtcgagctatgcaatggcatgtcagtagtatgagcgctagcgcacgcagcgagtgagtgatcgatgatatgtgcgcgtgagcgantccatatatattanttcatatacacnagcacgagcgcgtctncacgctcatatagacactcgcgacgttcgatacattgagtgcataatatgactgtacgtgtgttgtgatgtatacggtgtaggcctatgttgttattgttgttagtantcatcacacacttctgtccgcagctccatatactgtttcgcgacagcctccacaggctcgtagctcgtattagatgctacatctcaccacacatcttcctcggcgcacagatactcctaatccaagaggangcgcaagagagcacagcacacacactccgtgatattatgtcgttgtcgtcatgacgttggctacgtcgagtgtaagtgagagagagttgatattgtgtattatgatagtgatgtatgaatattctcttccttgatgatgtcggtggtgcgcattgtaatatcataggtgtctcatgatgttgttagagaatgaatatatgagagttcatataatatgagagatgtcggggtgagtatgtagggtgtgcgcgtgagagcgagtcgccgtgntcctcctatgcgctggcgcttctaccgcattgcacggcaccactctactttactaccgcancccgaccaacaccacgacgcgcaaatcacagagtacgcaggagagcacgacgatccgtgggggtagtcatggggtagcgcgaaatacgagacgtatgtgtctatatggtaggaaaggtatatgttacgaagtacaataagagcgcgacagggtggtggagagctncggcatagccgcgacagccgggagatacanatcatatctcacggaactactccaagcaggctgtctatcctcctaatanattcgtgtgctgaggtgtgggcgtacagactcggtggagtcatgtttgtgattcataatnagtgagagagcacgcgatacttgtgccgcggggnntaanaaaccacactgtcctcaacccccctcacatttgnctccccacagagcgcgccaggatgaataagggancagggagacnacgccgcccaccccccn

SEQ ID NO: 1175 - DNA, 415 bp, Glycine max
  misc_feature (95)..(95): n is a, c, g, or t
  misc_feature (97)..(97): n is a, c, g, or t
  misc_feature (392)..(392): n is a, c, g, or t
  misc_feature (394)..(394): n is a, c, g, or t
  Probeset Number=SeqID_10954
atccatggaaatggcgacaagttttctttatccaccgcctccgtctgttttgctcaatactatgaccgtcgttggtttagccgctctgccggttntnggtctgtcggaagtgagaggaaataatctgaaatactccaaattcaacaacaacaacgcatcatcatcatcacaaaaacagcgattcggtagcatctcgagcagaaccggaatgctttgtctatacacgccagcgtttctagccgcatcggcctctttcgtcctctcaccttctcaaaatctcagattccttcttctcaaatccgcactctccatccatttcttcaaaaggatcttcgaggttctgttcattcacaagtacagtggagagatggcctcagacgcagctttcatcnantatcaagcggctatttctcat

SEQ ID NO: 1176 - DNA, 1659 bp, Glycine max
  misc_feature (55)..(55): n is a, c, g, or t
  misc_feature (68)..(68): n is a, c, g, or t
  misc_feature (73)..(73): n is a, c, g, or t
  misc_feature (89)..(89): n is a, c, g, or t
  misc_feature (114)..(114): n is a, c, g, or t
  misc_feature (123)..(123): n is a, c, g, or t
  misc_feature (125)..(125): n is a, c, g, or t
  misc_feature (194)..(194): n is a, c, g, or t
  misc_feature (256)..(256): n is a, c, g, or t
  misc_feature (259)..(259): n is a, c, g, or t
  misc_feature (280)..(280): n is a, c, g, or t
  misc_feature (285)..(285): n is a, c, g, or t
  misc_feature (406)..(406): n is a, c, g, or t
  misc_feature (481)..(481): n is a, c, g, or t
  misc_feature (706)..(706): n is a, c, g, or t
  misc_feature (1318)..(1318): n is a, c, g, or t
  misc_feature (1484)..(1484): n is a, c, g, or t
  misc_feature (1542)..(1542): n is a, c, g, or t
  misc_feature (1548)..(1548): n is a, c, g, or t
  misc_feature (1563)..(1563): n is a, c, g, or t
  misc_feature (1593)..(1593): n is a, c, g, or t
  misc_feature (1603)..(1603): n is a, c, g, or t
  misc_feature (1639)..(1639): n is a, c, g, or t
  Peptide Sequence Number=SeqID_9332
  Probeset Number=SeqID_10955
acctcgatagacgcgttcgtgacgtaacacgattactatagtatctatatatgancgttactcgcgcnctacncgccactccgtacgcncgtgtcacttaaccactagagctcncccctcgcnancgttatataaacgagcggtcacgagtaccgagcatattatataagcatatacggtcgaactgcggtcgncgcgtgttgcactcagtctccatcacagtcggtctacttagcgacaatcacatgcgatatanatngataatatatcagctcgcgtngctcngtgtatatattctctcgcgaccgtcgactacatcatgtatcatatacttctgagattcaatgactgttcgaggcgccgcggcgacagaggactcggtgcgggataattacgaccgcacgcntcagtagtgttgaagacatcgaatagtgtagcgagccacatatacacgcctagacagataatatttaatatgcangggcggttgtatatgatgtcactgtatgtacgatcgatactatcatcatctgcacgagtctcagtgatagtatattcgacgcacggtctgtatcgagaagaagtgaggtgacgctcagtatatgagacaggttatgcatagtcaataatacaaaccataagcgacagaccagcatacgatagtatattactagcagggtgtgaggtgtgtgtggagtaaggtagnaatcataatataatatacacatcggaagtacgcacgacgcaataaacagtggtttagtagtgacagatgagaattagtcaacacaagtctacagtagagcgcacagaaaataatccacacacatatccactctcatgacacgacactacacatggctatgatcaatctcggcctaatacacacaggtggcgagccgcgagccagcggaggcgtatattatcgcagctcgtattcgcaccaccactaccacctcccggaactatatcatatatctcaacattaagatgtgtgaccgcttgtgcggtgtcagcgagaatcgaaagttttattattattattgtaaaaatattcatctcttgcgtattctgagcgctcttgcgcacgtattatatgcgcggtgtatccaagtagtgtgtatagatcgaattattgctgcgctcacgatagaatctccatattaatatagacgagatgacaccttatgatgtgatacagttgtcgtccgtcaggtcgcaaacgagcagcggatatatatggataaacttgacatctgtcacgcttgtcgccgcgtccttttgtcgcgcctcgttctcattatgtttacggggtgcnccgtgagcacatctcgatagtacagcgatagcgatactgtacgtgttctcgctctttttattatatggtgaagaaccacatatacaagagacagcaccccttctcactcgatatcgttatcaactccctccggtaggacatccacaactaccgcctgattctatanagtcaagctaccggctcactctgtcacgtcgcgcgtctaggtctgaccatcagtactncttgantaaatatactgtcantagtgtactcacgcacacagatgcataatnacaacaaatnatataaaagatgaatagaccggcgcgaggtctcacngtgagcgcctccttagtccc

SEQ ID NO: 1177 - DNA, 660 bp, Glycine max
  misc_feature (660)..(660): n is a, c, g, or t
  Peptide Sequence Number=SeqID_9333
  Probeset Number=SeqID_10956
aacccatggtctccatacgactcctacaacgactgctctcaaggagtctgcaatatctactgcccgtaatggtgatacctaatcttccctcctcctcctccttccttcctcgacgacgaagactcctcctctccctccagcttctcccctctcctcatcgccctcatcgagaccctcctcaccgcctatatcctcgacgactactacactctcgtctctaaatactgacgacgtccccgccgcgaaacctcctcctcagaactttccggcggcgaatccagctccagtgcattggcgagtgtacatgctctcaacgacgctctgactaagtcgattaacgcttataaatatctcaaagtatatggaacacggaacgtctcatactagctcagtttgattgaatgagttcttaccctatgaaagcttgaggctgttgccccaaaggaaacccctcgattccccttccggggaatcaacacttgggttgagagctaactaaaattggccctcctgacgaagtttttgtcccgggaaaaaaaccaaaaaacacaattaaacgccggttctcccatcgggaggggggcccgtaaacccctgggccgaaaaaaacaaaaaatcccccccttgggtgtgaaaaaaaaaccacaaccgggaattggn

SEQ ID NO: 1178 - DNA, 1582 bp, Glycine max
  misc_feature (1)..(1): n is a, c, g, or t
  Peptide Sequence Number=SeqID_9350
  Probeset Number=SeqID_10957
naaatctggaggtagcgcttccgccgggtctccaggagttggctggtgagcatttcctggtgcatcctaatcgaaaaacgcggaacagctcgtctctccccgaatcctatcgctgctttcctacttcctccgacgcacaggttagaaggggaaacagttgcagggtctacgtgctaccccggcgcggcggcagagcgaagcacggccatctctcttgaagacagcgtatggacggcatgggcgttggggatgtttgcgagaagggatctccaggcttggcatcgtcaagcacaacaccctctgaaccaaaggaagatggccatgtaatactgattccccattcccacatcttcgccctcatgctgcaagctctgaagttgccgcctgcgaattaccatcataagacatatccggccattaggtttatggagaatgcatgtggcaaggaaatcagggactatcactacacccacgtagaaaggctggaaaatcaagtcacactcctggagcggtacctggatgaagcaaaaaagagaatcaagaaggtacgcaaaggatggttctatgctgtcagatacatgagctcgtattctactcagatacaaaatacgacagctgctcgtcgcctaagagggcaggacagcaccaaaggggcgatgaaaacagcactcgcaagcacaagaaagttggcaaaaagactacgttgtattggcctgaaatcggagcagtgcctagagactacagatagtatctggtgagctctgttcggcacatcgtacccagtatgtttatgaaccattgcctttgtaatggaaagtaccacctggtatcatgtagctcttctcactttgttttgagcaaggcacagagattatgcttctatgaactagcttgttggcagactgcccttccttactataaattatgcttctatgaaccagcttggtatcagactaccgtcccatgttgtaaattatgtattatgtattatgaacgagctaaagcaatggtcgtggtaatttttctccaaaaaaaaaaaaaaaaaaagcttatcccaaccgtcgaacttcaagggggggtcccgttacccaattctcccctataagggggtcgaattaagttcgctccacgcgcccccggttttacagccccagtgtgtgtccccacccccggggggaaacccctttcactccgcctttttttttttctcccccccccccccccccgccccccccaaccccgtctcttttttttccccacccccacggccggtggggggggggggggtccccctcccctcccaaaccggaaattccaacccgcccactcctcgaccatcctaccaccatacccccgaccccccccggccacagagagaccactcgggggagccgggcggtggacgcgttgcattctttaaattactgctgcctcactaaataatatcccaccccccactgcgccttccagcccgcccgccgcgtcgctcctctcccgaggcacggctcctctcggtgtacgacccaactctgtttctctatccccccttccccagcgccccccccccgccctcccgctcacg

SEQ ID NO: 1179 - DNA, 310 bp, Glycine max
  misc_feature (87)..(87): n is a, c, g, or t
  misc_feature (192)..(192): n is a, c, g, or t
  misc_feature (213)..(213): n is a, c, g, or t
  misc_feature (217)..(217): n is a, c, g, or t
  misc_feature (243)..(243): n is a, c, g, or t
  misc_feature (267)..(267): n is a, c, g, or t
  Probeset Number=SeqID_10958
cccacgcacgagcccacgcaagggcgcgagaaagccggaaaggaaaagcacaaaacgaaggcgggcgggggacgcacacaaaaaagngggccggggcaacaaagccgaacagcccgggggaacaacaaaggaaagaacccagggcgaacaaccaacaacagggaccaaaacagcgcaccaacaagccaaccngaaggcgcacacaaccgaagnccancccagacacacaccggagagcagaanagagcaacaaaggcacacaaacangccaaacaacaaaaaacagggacaaaaacaggagacaaacaag

SEQ ID NO: 1180 - DNA, 1340 bp, Glycine max
  misc_feature (8)..(8): n is a, c, g, or t
  misc_feature (26)..(26): n is a, c, g, or t
  misc_feature (32)..(32): n is a, c, g, or t
  misc_feature (38)..(39): n is a, c, g, or t
  misc_feature (156)..(156): n is a, c, g, or t
  misc_feature (1054)..(1054): n is a, c, g, or t
  misc_feature (1067)..(1067): n is a, c, g, or t
  misc_feature (1305)..(1305): n is a, c, g, or t
  Peptide Sequence Number=SeqID_9351
  Probeset Number=SeqID_10959
tggaaaanttatcttccctctcttcntttaangtttanngggagcaacagcgcggccgacgaaatggtgttcgtctgttggtaaaaaaaacgcgggggaggagagaacttattgaaacggtgtgggggagagagtcaataaaaagggagagaaganaatacagtggttatttaatctgtcttcgctacgctggggcgaaaataccgccgcgggtcaaattgggtggggtgtgtttgggtagcttattcctcactccaccataacatattcataatatgtgtgatatattcgttgcaacacaggttcaacataatatctcgcggaacaaacaccacacacgcgggcggaatggggcatcccaccccccaccccccttccctcatgtcctaattcttgtgttcccgcaccccccctaaattagtgccgcgccgaccaacaccctccgccgtgtgtcgggcggcgtaatccatatcccgggcggggtacgagaccacataacactcgtggcgtcctggtcatttaataaactgcgtgtgaaaacccacagcccgtgggggcaaaagcggtgtggcgcggtatctctcaccctacctcctggtgtgtgtcaaatattacaatccgcttggcgacacaaattatgcgcggtgcggtgggctgtaaatcacttgttgttgtctctttgctgtgctcccgtttctacaactacatatacccaatcactccccgcccccctccaccataatacgaaacaagctcgcgcgtgcgcaccatctgcgcccccccgctgcctccaccaactcccccgtctcgtgtattctctctggtggggtgttggtgggaattatcatctactgtctgttgtgcgcctgggaagacactatacctcctcacttgcgccctctcctaacacaccaatgctgttatatatacctcccgctgctgctgctattgtcatgaatgtcttcgcacactgcttgtgctatcatgttgtgtctgcctctgtgtggagtgatcaatactacacgttatgcacgttctcccacacccacccccnaccccacaccgcnctccctatatactccacttgtccgctcccattttggttatatgaactatcccctccacttactcatctcgctgtgcccaatacaaatagaggtgttgtgtgcgcttccgctcccccgccgcctcacctgtgttgtctgctcccctcctaacccattatctcgtattgtctgtttgttgttcgtctccgatctgtgccctcatcacacaccccgcgctggggggtgggtctgcgtgagngtatcatacgacacgctcttgtcctctgtgttttg

SEQ ID NO: 1181 - DNA, 750 bp, Glycine max
  misc_feature (160)..(160): n is a, c, g, or t
  misc_feature (162)..(162): n is a, c, g, or t
  misc_feature (164)..(164): n is a, c, g, or t
  misc_feature (169)..(169): n is a, c, g, or t
  Probeset Number=SeqID_10960
acttgaaacacagtggtgccttatcgctgtggttttcatcgtcttccttctcttatatttctttttttttttgtcttcgccgcacgccgaaacaatggccggaaaaggagagggtcctgctatcggaatcgatctcggaaccacctactcttgtgtcggngngnggcancagcttctcgtgctatctataccgcccgactcgatgcgtccctccctacaccaacccccattcttcccacccctgcaccccccaacccacgagatctcccgtaattctatcactccccctacccccacccctccccatccccaccctcatcctcattcaccctacccccgcctcttttcatcatccacctccaaagctcctccaaccacatctccagtagcccccccttctacacgcctttctctctaccacgactacacctttatccccatttcacctctccccactctatcccaccccctccccttcccacaccatttccccctaacctatcttctaacacctccctccccctccctccctccacctccccccccacctcccaccctgctccaccctcaccctctttctccctcccccccacaccccctcccccctcaatcttcactaccccctcccccacacccctcacactctcttctatcatctcatccaactctccccctccctcacagaaacccaaacaccccgctagccatgctccctacctcaccacacgccctcatacaactcacattcat

SEQ ID NO: 1182 - DNA, 1399 bp, Glycine max
  misc_feature (221)..(221): n is a, c, g, or t
  misc_feature (376)..(376): n is a, c, g, or t
  misc_feature (594)..(594): n is a, c, g, or t
  misc_feature (784)..(785): n is a, c, g, or t
  misc_feature (992)..(992): n is a, c, g, or t
  misc_feature (1136)..(1136): n is a, c, g, or t
  misc_feature (1138)..(1138): n is a, c, g, or t
  misc_feature (1145)..(1145): n is a, c, g, or t
  misc_feature (1163)..(1165): n is a, c, g, or t
  misc_feature (1178)..(1179): n is a, c, g, or t
  misc_feature (1225)..(1225): n is a, c, g, or t
  misc_feature (1301)..(1301): n is a, c, g, or t
  misc_feature (1303)..(1305): n is a, c, g, or t
  misc_feature (1307)..(1310): n is a, c, g, or t
  misc_feature (1312)..(1312): n is a, c, g, or t
  misc_feature (1363)..(1366): n is a, c, g, or t
  misc_feature (1368)..(1370): n is a, c, g, or t
  misc_feature (1373)..(1373): n is a, c, g, or t
  misc_feature (1377)..(1381): n is a, c, g, or t
  Peptide Sequence Number=SeqID_9352
  Probeset Number=SeqID_10961
cagtcgtctttgtatctgtgtctgcacgtgtatgtggtcagaatgtgaacgaactagacgcagaggaatagaagggaggagcagcaaagcgtgctatcagtgtgcgtgttgtcagatcggtgatatctacgtgatgttatgattacagttatatagtcagttaacaagaccgataagatgataagatagatagagcgccccgcacaccccaatgcagcgtngctccgtcgaactcgcacagttaggtaagtgtagaagagtaggaaatgtaaggagcgtataggagaatgtacgacatagagataagacgaacataatagagattgttgttatcatgtatatatatatataacgacaatcagatggacatctctcntctgtgcggtggtgaggcggtcgctgtttagacagcatagcacaacgctacataataagtaacaaccatcagacttagacacgtagatgtgggcgaaataatgacatcaaataacacaaaatatatatatttatcttgacacgcatgtccctacactatttgcacataaccaaggagtgagttgttttggatgttattttgctttcgtttttgtaggnttcgcgggttgtaggtgtggcacgtgacttacatgaactatatagtttgaattgttctaatctcatacaaatgtcctatttctccttccgcctgtcgttcgtatctcagtgtgtcgtaagtaagttgtcatcgcgtccaccacatctatgatatctgactactatctctatgtcaaatttatatattgtnntcctatagtactatagtcgtcacggtaatagactcggacagcatacaaagtacgcaacggatagaaggacgaccgaaagcgaggacgagaggcacgagaggcggagagagagggcgcgaagagaaagcacaaccacacacacaacaccgcgcgcacggtgttgttacagaataatataaagacgaccggcgtttgtagtatgtagtnaggacgcgcgtcgcgtctgcacgtcggccctgtttgtctgttgagttttataggttagtgactagtgcggctccaccttccattcggtagttcgttatgaagtagaataagatatggcgatctcatttgttggattgtggtatntnatatgtnttctatataacaataaannnaaggaagaaaaanntcgtctacaatcccagtcgacatacctctaatgtgttatatatctngtttatataacatttaaagaaggggggtgggcgcgcctcttcctccctctttaattacttatcttatccatcattntnnngnnnncngcgacgagaaacccgcggagcggagagagcgcgcgggagtgagatgagagnnnngnnnggngggnnnnnaaacccagggccccccaa

SEQ ID NO: 1183 - DNA, 1858 bp, Glycine max
  misc_feature (1)..(2): n is a, c, g, or t
  misc_feature (9)..(9): n is a, c, g, or t
  misc_feature (12)..(12): n is a, c, g, or t
  misc_feature (17)..(17): n is a, c, g, or t
  misc_feature (24)..(24): n is a, c, g, or t
  misc_feature (35)..(35): n is a, c, g, or t
  misc_feature (41)..(41): n is a, c, g, or t
  misc_feature (52)..(52): n is a, c, g, or t
  misc_feature (58)..(58): n is a, c, g, or t
  misc_feature (74)..(75): n is a, c, g, or t
  misc_feature (85)..(85): n is a, c, g, or t
  misc_feature (88)..(88): n is a, c, g, or t
  misc_feature (91)..(91): n is a, c, g, or t
  misc_feature (117)..(117): n is a, c, g, or t
  misc_feature (119)..(119): n is a, c, g, or t
  misc_feature (150)..(150): n is a, c, g, or t
  misc_feature (157)..(157): n is a, c, g, or t
  misc_feature (159)..(160): n is a, c, g, or t
  misc_feature (163)..(163): n is a, c, g, or t
  misc_feature (165)..(165): n is a, c, g, or t
  misc_feature (171)..(171): n is a, c, g, or t
  misc_feature (174)..(174): n is a, c, g, or t
  misc_feature (183)..(183): n is a, c, g, or t
  misc_feature (187)..(187): n is a, c, g, or t
  misc_feature (198)..(198): n is a, c, g, or t
  misc_feature (227)..(227): n is a, c, g, or t
  misc_feature (246)..(246): n is a, c, g, or t
  misc_feature (251)..(251): n is a, c, g, or t
  misc_feature (262)..(262): n is a, c, g, or t
  misc_feature (274)..(274): n is a, c, g, or t
  misc_feature (285)..(285): n is a, c, g, or t
  misc_feature (295)..(295): n is a, c, g, or t
  misc_feature (303)..(303): n is a, c, g, or t
  misc_feature (319)..(320): n is a, c, g, or t
  misc_feature (322)..(322): n is a, c, g, or t
  misc_feature (338)..(338): n is a, c, g, or t
  misc_feature (343)..(343): n is a, c, g, or t
  misc_feature (348)..(348): n is a, c, g, or t
  misc_feature (350)..(350): n is a, c, g, or t
  misc_feature (358)..(358): n is a, c, g, or t
  misc_feature (393)..(393): n is a, c, g, or t
  misc_feature (409)..(409): n is a, c, g, or t
  misc_feature (426)..(426): n is a, c, g, or t
  misc_feature (467)..(467): n is a, c, g, or t
  misc_feature (512)..(512): n is a, c, g, or t
  misc_feature (524)..(524): n is a, c, g, or t
  misc_feature (533)..(533): n is a, c, g, or t
  misc_feature (575)..(575): n is a, c, g, or t
  misc_feature (584)..(584): n is a, c, g, or t
  misc_feature (592)..(592): n is a, c, g, or t
  misc_feature (611)..(611): n is a, c, g, or t
  misc_feature (615)..(615): n is a, c, g, or t
  misc_feature (621)..(621): n is a, c, g, or t
  misc_feature (623)..(623): n is a, c, g, or t
  misc_feature (627)..(627): n is a, c, g, or t
  misc_feature (636)..(636): n is a, c, g, or t
  misc_feature (669)..(669): n is a, c, g, or t
  misc_feature (676)..(677): n is a, c, g, or t
  misc_feature (793)..(793): n is a, c, g, or t
  misc_feature (977)..(977): n is a, c, g, or t
  misc_feature (1156)..(1156): n is a, c, g, or t
  misc_feature (1193)..(1193): n is a, c, g, or t
  misc_feature (1213)..(1213): n is a, c, g, or t
  misc_feature (1275)..(1275): n is a, c, g, or t
  misc_feature (1296)..(1296): n is a, c, g, or t
  misc_feature (1303)..(1303): n is a, c, g, or t
  misc_feature (1325)..(1325): n is a, c, g, or t
  misc_feature (1536)..(1536): n is a, c, g, or t
  misc_feature (1562)..(1562): n is a, c, g, or t
  misc_feature (1564)..(1564): n is a, c, g, or t
  misc_feature (1625)..(1625): n is a, c, g, or t
  misc_feature (1627)..(1627): n is a, c, g, or t
  misc_feature (1657)..(1657): n is a, c, g, or t
  misc_feature (1660)..(1660): n is a, c, g, or t
  misc_feature (1745)..(1745): n is a, c, g, or t
  misc_feature (1764)..(1764): n is a, c, g, or t
  misc_feature (1766)..(1766): n is a, c, g, or t
  misc_feature (1770)..(1770): n is a, c, g, or t
  misc_feature (1796)..(1798): n is a, c, g, or t
  misc_feature (1801)..(1801): n is a, c, g, or t
  misc_feature (1809)..(1809): n is a, c, g, or t
  misc_feature (1812)..(1813): n is a, c, g, or t
  misc_feature (1821)..(1823): n is a, c, g, or t
  misc_feature (1829)..(1829): n is a, c, g, or t
  misc_feature (1833)..(1833): n is a, c, g, or t
  misc_feature (1836)..(1836): n is a, c, g, or t
  misc_feature (1844)..(1844): n is a, c, g, or t
  Probeset Number=SeqID_10962
nngcttgangtncagangatcgtncgtcagtcgtngtcagnggctgttgatnctgganaggtggcgggcagcgnntgtcatggancgntcncagcgatggtacaagagagtcaagtnancggtcgtcagcatgcgtctgtgctagtgtgngcgtgtngnncgntntgttgngtngttgtatanatgnaggagtgatgnatgggacggtcgtgtacgagatgggcagnattgtatctagtaatggtntggtntaagtcgcgantgacatcggtgncaatgtgtcgncgccgcccancgtgggtngggtgatgtgtggagnngntgtgcgggcagtatcngtgtntccantncgcatcancgtccgcatacgctcagacgtacatgcgcgctgancatgcagtcacgttantagttcatgtggtatantatcgttcgtgacgtgcggcgtcgtagtgcgcgtgagcgcnggatggtgaggacggcagtgtgtccgtgcgtagatgtgctgtagnagtggacgggangagcgcgancggtctgctacggtgagtctgatctttgtgtgagcactgttngccatacanccgcagtncgcgatctcgattgcgcgncgangaggtngnaggntggcgacgnagtgcagtatgactagagcatgcgcgtcgactntgagatnngtccgtctcgcgagtacagactcgtacatacgtggagtgctcgtgcgtgtggttcgcggtcacacgtcgacatggacggtcgatgatgtcgtatcacagtcgtgcagcgcgcgagncgacacgtcgatggccacggccgcgcgtgcctgtctccttgctctacttcctcacacgcgcagtgtgggggtgcgtgtccgatctcaccatcgactaagtatatatgacactgcagagtagacaacaacagatgaccggcggcgctggagagggtgccgcggctgtgcttccacaccttgtctntactgcttgcccacattcatcggttgtgacgactctcctgttgtcgccacgcatcgtgcgccctgccgctatctcgcccgtaatgcaggatcattgctctgatgagctcgatattagcgtcgtgctctggctacttcgtgtcgtcttctgttgtgtgatttatatgttgagtgtggctnggagtctctgtctgatgtgatggggttcactgttctnatgcgcgatgagtcgaggtntgtcgtgagcatatttactacttaatgtttctcggttctcgcgctcctctacttatcgcgcngctgctcgtctatatgtgtgntgtaagngggatgtgttttgtcacatatnaactctatgtgatcatactagcaccctaccaccgaccacgcgcacgtatgtcgagctgcatgtacatccgcgctcgcgccaatcttcctctcttcaccagcgtcgttgtactgattcagccaccagagcggcagacagagaccaacaccagccatctccctccgctcgtcacaacatatcacaatactacataacaacagatacatcgttntcgtatggtggtgtgtgtgtgtatantntgctgctactctcatgtgtgactgttctacgttacgagttcacagtcgcgtcacataccancngtacgcagataatactcctctactactccnctnccgggtgtgcgactgcgctgacgttacgtgtagataagcagaggcggcgctctcatctcgaacaggtccgggcgccgtagcgacnctagatatatgttatagtntnattngtggtgcggtgtggtgtggtgttgtnnntgnacggtatncgnntggaaaannnaaaagnaaanaanggcgcggnagaggcacaacaac

SEQ ID NO: 1184 - DNA, 1508 bp, Glycine max
  misc_feature (1)..(1): n is a, c, g, or t
  misc_feature (10)..(10): n is a, c, g, or t
  misc_feature (23)..(23): n is a, c, g, or t
  misc_feature (26)..(27): n is a, c, g, or t
  misc_feature (31)..(31): n is a, c, g, or t
  misc_feature (33)..(33): n is a, c, g, or t
  misc_feature (36)..(36): n is a, c, g, or t
  misc_feature (46)..(46): n is a, c, g, or t
  misc_feature (50)..(50): n is a, c, g, or t
  misc_feature (52)..(54): n is a, c, g, or t
  misc_feature (56)..(56): n is a, c, g, or t
  misc_feature (61)..(61): n is a, c, g, or t
  misc_feature (65)..(66): n is a, c, g, or t
  misc_feature (68)..(68): n is a, c, g, or t
  misc_feature (71)..(71): n is a, c, g, or t
  misc_feature (73)..(75): n is a, c, g, or t
  misc_feature (77)..(77): n is a, c, g, or t
  misc_feature (134)..(134): n is a, c, g, or t
  misc_feature (137)..(137): n is a, c, g, or t
  misc_feature (146)..(147): n is a, c, g, or t
  misc_feature (169)..(169): n is a, c, g, or t
  misc_feature (181)..(181): n is a, c, g, or t
  misc_feature (199)..(199): n is a, c, g, or t
  misc_feature (205)..(205): n is a, c, g, or t
  misc_feature (209)..(209): n is a, c, g, or t
  misc_feature (218)..(218): n is a, c, g, or t
  misc_feature (314)..(314): n is a, c, g, or t
  misc_feature (733)..(733): n is a, c, g, or t
  misc_feature (1148)..(1148): n is a, c, g, or t
  misc_feature (1316)..(1316): n is a, c, g, or t
  misc_feature (1365)..(1365): n is a, c, g, or t
  misc_feature (1373)..(1373): n is a, c, g, or t
  misc_feature (1505)..(1505): n is a, c, g, or t
  misc_feature (1508)..(1508): n is a, c, g, or t
  Peptide Sequence Number=SeqID_9353
  Probeset Number=SeqID_10963
nttcggaacncaactgccttacnacnnattnanacngcgaacctancgcncnnngngcggngctnntnctntnnntnaataataaattataatattacagtaagtatatagtgttatgtatagtgtattatatntanagtgtttanntgtgtgtatagtagtatgttanttgtaatttaanttttttaatattattgtntaatanattnttgaatatnaagtagattgattatcagtgatgtaatcagtagatgatgcaatatgtggtctgagtagacagagataactaggatgacggagcgataagtgtagtnagtcaacatggcggagagactagagggatctgtattgttaatcgcagaacaggctaataaaggggaagtctgacagagaacaaggagggccgcggaacgcgaccgatggcggcgtctgtcccgctcccgtgagcgagagtcggacgcgttcgacattaattgattgagatgtcacatgatgagtgtggatgggtgctgtatcgtactggtggcgcctgctgaggcgcgcgcgcgctcgcgtactgtccatatatttgtcctctgcgcgtgtcgtgctgctggcgcgtcctctccgcttcgcgcttcgaccgtccgctcctgctacgcgcggccgtataagatgatgcgcttactatcgcgagtccgtcagcgcgcggcatagttggacgtatggatatgatgtgggcgtgctgtctgtngcgatatctcggtgtatcacacgcacagtaagttgcgtcgctgttataattgctctatgtcgcttattcatcgcagcgcgctcagacgctcggacacgacgcgtgagtatgatcggtcgcgtgcagagtatgacaactattcatcaatgcatcggattgtgtactagatgtgtctacgttctgatactcttcatcacgcagattatattcggagtggtgctgcgtctttgctgcacacgaacatgtctacgcgctgcagagagagcgcaatacattacagcgcacttgctagcaatagatctattgtttggtctaccgcgcttcctgacttcattggcgatattttcattatatcgattctctgtgacgtgcgtattgatatccttagtcactcacgctgttgtagttgtgcttngtgcacacagatgtactattattagtgcatcgcagccgacatacttagatgcgcctgtcactgagcgtgatctctgctggatatgtgtagtcaagcgcgtcgtgtcgtgctgtcgatcatgagcgtactcgatccttccgagcgcatactagggtcgtgtgcgacgtntatgtgcgtattagatgtatgtcgcatgcgagtcgactgcagtagaaantgtgatgntcacatgtcagcacaaagtacctcgtagtagagtatgtaagtcacttattactagaacgataatgttagactatagtatcgactgtttattagtatgagctagacacactattagtgtggatggggataagnttn

SEQ ID NO: 1185 - DNA, 527 bp, Glycine max
  misc_feature (483)..(483): n is a, c, g, or t
  Probeset Number=SeqID_10964
atccttattccaaagaatttgggatcaagatcagtgagaagcttgctcaagttgaagctcgcatccttcctgctccatggctcaaatatcacgatacgggcagagaaaaggattgtcttcctcaagttgggcaatggaatatgatgaataagaaaatggttaatgggggaacagttaacaactggttctgcataaactttttcgaggaatgttcacgattagtgtgcccggcggttttggtagaaactgctcacaaggggtataattctgaatgggcttaccactggaccagttatttccccaatcagggcttgccttgtccagtggaaaaagtgtctaaaactcgttatcacgatgcccagaataaactgcaacgaaaagagcttgatttactcattgttatcttgccggataataatggatcactatatggtgacctcatacgtatttgtgagacagatctaggacttgtttcacaatgtngcttaactaagcatgtctccaaaatgagcaagcagtaccttggc

SEQ ID NO: 1186 - DNA, 1369 bp, Glycine max
  misc_feature (1)..(1): n is a, c, g, or t
  misc_feature (99)..(99): n is a, c, g, or t
  misc_feature (181)..(181): n is a, c, g, or t
  misc_feature (208)..(208): n is a, c, g, or t
  misc_feature (282)..(282): n is a, c, g, or t
  misc_feature (337)..(337): n is a, c, g, or t
  misc_feature (353)..(353): n is a, c, g, or t
  misc_feature (399)..(399): n is a, c, g, or t
  Peptide Sequence Number=SeqID_9354
  Probeset Number=SeqID_10965
ngtgagtatgtctacgacacgcagagactaatggagcatgcgacgcatgttatgccagctattagcaggaccatcggccatagtatgaaacgacaaatnaagcgcatcatgtgacggatgtatgagtgagagggaagaggccgaatgacagcagtgaggtagcgcatagattgagcgatgnatgatatagtacgcacatacataacanctctactcacgagacgatgtgtagcaatcgtatggttgtcgtttagacgagtacgagataaacgagtagtgcantgtgatatatgaatgtggatcttactgttgttacatatagtatagcaagttttgnacatagcacgatgacnacatcgtgaatactattgttcatggtatcgctactatagagtgagngtggagtcaataatacgtccacctctcatgtgtctccggatgagtatcatatatattgagtctgtcatgaagtggagtaagcacgatcgcaagaacagacaacccattatcgtattgctcttgagcatgagagacacgactgactatgtaagctgtatcgcaagtgtttagccgttggatcgacaattgagacactgtggccaatgacgtgacttcctcatcgcgtgggtggtctacctcactgcgagctcaatagtagcaagtagctaaccgttgtagggtgcgcaatgcaggcttcatctgtattgtaacagcatggggcaatggcggacacccagcggcggtctgttcgggagctcgaaacttactaatacgaaccccacgaatcaccatgcggtaaagcgtgtcactctacccgacatcgagtgaaaataattgtagtgatagaatgcatgtacatcgcgcagaatagagaatcggcgctctcgttatgagcagacgctatatattgcatgatatgataacgctcaaggtatagacacaagagcaggggaggccacacgcgtacgaggcatttaacatctggccaaggagacctctgcacgaccacgcgaagcggcgacgctatttcttgctctcgttaaattagttagagaaaacgatcggggaagttgcgaagacggatgcttagagagctagttcgccaatctacagagtcactatcagtgatgattgtaagcctctgctcgtacctctcgatgcgatagaaagtgtgaaagaggagaaagagaaagagatacgatgccatttccctctctacccctgcgggagtagtgtcgttgtaatataagaataacgcgcccaccgcccgtgggcaggacagtactttcaacctatgtcagagaggagagtgtacaaaacggtgaggatgagcggtgggcgggacgaagagcaagcgacacactgcaca

SEQ ID NO: 1187 - DNA, 484 bp, Glycine max
  misc_feature (95)..(95): n is a, c, g, or t
  misc_feature (134)..(134): n is a, c, g, or t
  misc_feature (144)..(144): n is a, c, g, or t
  misc_feature (147)..(148): n is a, c, g, or t
  Probeset Number=SeqID_10966
gaaacaaccactaacaagaaccaagaaaccaagcaaatcattgttctctctgtcctgtgttttgtgatttcccccttcaagccaccaccaatggncaacaacgagatgcaagttgagaaggggtttggacttgnaaaagtacantgnngcgttggtatgagatagcctctttcccttcaggaaaccagccaaggatggcgtgaacaccagagcacatacactcttaagaatgaatggactgggcaagtgctcaacagaacttggagtatggcaagaaaaggcacataaggggactggtttttaagctaaacgacaaaggataaggcccagtcaaggccaaagtttagggcccccccccttttgcaaaaaatccccggaaaagggataaaggggggtttttccttgtatgggggtaaaccacaaaccctttttttggcaacccaaaaacgaatattcctcttgggaaaaaaataaaaaagaaaaa

SEQ ID NO: 1188 - DNA, 1583 bp, Glycine max
  misc_feature (59)..(59): n is a, c, g, or t
  misc_feature (63)..(63): n is a, c, g, or t
  misc_feature (74)..(74): n is a, c, g, or t
  misc_feature (83)..(83): n is a, c, g, or t
  misc_feature (122)..(122): n is a, c, g, or t
  misc_feature (128)..(128): n is a, c, g, or t
  misc_feature (135)..(135): n is a, c, g, or t
  misc_feature (140)..(140): n is a, c, g, or t
  misc_feature (193)..(193): n is a, c, g, or t
  misc_feature (195)..(195): n is a, c, g, or t
  misc_feature (582)..(582): n is a, c, g, or t
  misc_feature (585)..(585): n is a, c, g, or t
  misc_feature (589)..(589): n is a, c, g, or t
  misc_feature (642)..(642): n is a, c, g, or t
  misc_feature (667)..(667): n is a, c, g, or t
  misc_feature (683)..(683): n is a, c, g, or t
  misc_feature (713)..(713): n is a, c, g, or t
  misc_feature (870)..(870): n is a, c, g, or t
  misc_feature (929)..(929): n is a, c, g, or t
  misc_feature (990)..(990): n is a, c, g, or t
  misc_feature (1026)..(1026): n is a, c, g, or t
  misc_feature (1117)..(1117): n is a, c, g, or t
  misc_feature (1226)..(1226): n is a, c, g, or t
  misc_feature (1234)..(1234): n is a, c, g, or t
  misc_feature (1268)..(1268): n is a, c, g, or t
  misc_feature (1288)..(1289): n is a, c, g, or t
  misc_feature (1451)..(1451): n is a, c, g, or t
  misc_feature (1469)..(1469): n is a, c, g, or t
  misc_feature (1542)..(1545): n is a, c, g, or t
  misc_feature (1549)..(1550): n is a, c, g, or t
  misc_feature (1553)..(1554): n is a, c, g, or t
  misc_feature (1557)..(1557): n is a, c, g, or t
  misc_feature (1559)..(1559): n is a, c, g, or t
  misc_feature (1570)..(1570): n is a, c, g, or t
  Peptide Sequence Number=SeqID_9355
  Probeset Number=SeqID_10967
ctcatcaataatgcgagatcgctacgtgtagtgtacatcgtcgacatgcgtattggtgncgcnctgcgatacgngccacacgngagtatcggcgtcgtcgcagcgtatgatgttctcgttantagacngagagtntacgngagtgtctggcttagtgagcgcggagaggtcgcgcagtcagacgcggcttacngnacacagcagcgagcgcgatgcgtacgtggcagtgctccgacgtcgtaggacgtcatattcacagtgcagagatgcgctgtggagcgagcacgatcgttagagctgtagagccgacgcatccgcgcgtgagtcgccatatcactttcatgctgataaggcgctgcatacgatgaggtatgcgacgtagaggcgtgtagtgccgtgtcactcgcattgtagcaagcgtggagcagatagtcgacgtagcatgatgcagcgatcgactgagtacatgagacggaaggggagggcggagattacatcagcctagcagcatgacgaagacgtcggcatacatatgagctgtctctatgcgctcagtgcgtggtcaggtctcattcgtgggtnttntttnttataattttatatcgtactctgctgtcattacggacgcaactcgctggtatntctgccagccgaacagtgatcatcnactcaatcgcgagcangactgaccacatcgtcaggcacgagcgggnacgagatagtagcggcagccagaggcacgctgagcggtgtcgtatgcgctgcgcgcgagtctcggtatagcagcatgatgtcggtacgagcggcgtacgatgtgcgtcaagaatatagtatgcgaagatatgcgtatggtggcttcagttgatcgcngtctactgtctcgtctcctctgctatcatgtgtacgtcgtctcttcccgtctccgctgntatcacatagtaatatgacgtcatgagcgtgtatgtctgctgttaagtgtgcgatgacgtnggtctgtatcttgagatgatgagcttgcgcgtggangcgaacgctcggctgcaatgtacgaacgtaggagaagtgaggacgagagcgagggtggacatgagcagcaggtagggtgtgatggacggtnctatgatgatctgagtttgatgtagtatgctagcggcgtgttcgtcgtccggaggcgatcagctcgcgacgcgtgaagcggggtcagagagagacaaagtggtaatatnctgtattngatgagtatgtgcgtattgacaacgtagagcgantggtgggtagtatcgagaanntcaacgactctccacccgcacagatatgagcgcatagagacgaagacacctctcgtgagcagcgcacaataaccgtagaggtagtgggacgtatagaagagtgagcagattaatataataattttatctctatatattgcagtcgtcggtaggtgcgcgctngtgcgatagtagctaganagctttaatagattgttctctgcgggcggcggttgtagaggacagacgaggcagaagaatcacagagaaagannnnaaannaanntananaaaagcggcgnacacacccacacg

SEQ ID NO: 1189 - DNA, 1557 bp, Glycine max
  misc_feature (20)..(20): n is a, c, g, or t
  misc_feature (22)..(22): n is a, c, g, or t
  misc_feature (61)..(61): n is a, c, g, or t
  misc_feature (91)..(91): n is a, c, g, or t
  misc_feature (131)..(131): n is a, c, g, or t
  Peptide Sequence Number=SeqID_6895
  Probeset Number=SeqID_10968
ggagggccgtgcgagcgccnantgttcgtcgtgttataatccgtcagcgatgagcgcgcancagctgcatatattaattcgccttttaacngcgcgcgtcgacccgcgccgtgcaatatagatagaattantctatcgcgcggcggcgcgggtgcatctattcgcgagagcgagtgatatatattaccgcgtagtgagagcggagagccacctcacagtgtgtgcctcactgtgccacatattgcgcagccactatagtcgacgctatatttttattatcgcggacgaggaagaaccagaccacaaataacattcttcacgcaacgctctattgtttgtttataatatctggcgacggcgcgcgagatgacacgcatttatcaacaactctattattcgcgctccaccccgcgtgtatatgttcgacggcgccgtatgtatatatttaggaaatgtacgcgacgacacgcagaataggcagccgttttaataatcggagacgggacggtccacagcacgcagcacctcattattaatttgcggtaattcaaccaataacactctttttgtatattcgcatcatatcaatacttcgtattatctccacaacatctgtgtctgtaactaaaacatactaatttcacaacccacatatgccactgttttcttagttaaacatagctcttgggtagtgttcacaaccatttatttatacaataaaagtaaagggtgagcaggaggggatcattttatgtgattttgagggccgccacaccgatcgtctcatttcagaggagtgtgaaccaccagagtgtattaccccgcgcgtgtttgtttcattctccccgcgccccagcgcgcttttttgttcgcgccgggcctagctgtatttaaacaaatcacccccgaattataaaaaatcggcgggggaaaaagaaccaaaatattatgtattttgtgtcgttacacctggtttccgctcccggcaattaaatagattttttttcttccccacgacggccgcgcttccgttggcgtagagaacgttttatcaccaccggcggagggtatttaaacccactttacatttcctctctgtgacccccgggggggcacgaccggaagcgccggtttctctataaacctgcccccgctacctaactcgcgctgcgcaacaacatgagcctaacatattaacaacaaggccgaggtaaacccgcctattttagagagatcagcgccggggcgtaaaagatgatcagatgggttctcaccttttaaaattataccacagccggctaacgattcggtggaggggcattatctgttgataagaatatgtgtgtgtgtagaagcggtaattatgccctcaaatcgcctcgatcgacaaaaggtatgattcaactaataccacacacggccaccgcgacatcgttcacatacttgcgtaaagggtagtacaacctgcgtatagaaaccaagcccaaacaccgcacaacgcactcggggggtaacaatggcgcggggaaagtgtagccgcgatgttgctttagtttt

SEQ ID NO: 1190 - DNA, 195 bp, Glycine max
  Probeset Number=SeqID_10969
gccagacatcggccaggaactcgttaaaggccccgcagctggcgagaaattcatatgctccccccccctgagcagcgtttcaaaaattgacgctccagggacagggggtgaaacccccccggactatatatagacccaagcgttgctattggaggccccctggtgcgcttttctgatccgaccctggcgcttacc

SEQ ID NO: 1191 - DNA, 1333 bp, Glycine max
  misc_feature (118)..(118): n is a, c, g, or t
  misc_feature (395)..(395): n is a, c, g, or t
  misc_feature (518)..(518): n is a, c, g, or t
  misc_feature (1130)..(1131): n is a, c, g, or t
  misc_feature (1136)..(1136): n is a, c, g, or t
  misc_feature (1201)..(1201): n is a, c, g, or t
  misc_feature (1204)..(1205): n is a, c, g, or t
  misc_feature (1208)..(1208): n is a, c, g, or t
  misc_feature (1216)..(1218): n is a, c, g, or t
  misc_feature (1226)..(1226): n is a, c, g, or t
  misc_feature (1230)..(1230): n is a, c, g, or t
  misc_feature (1274)..(1274): n is a, c, g, or t
  misc_feature (1278)..(1278): n is a, c, g, or t
  misc_feature (1297)..(1297): n is a, c, g, or t
  misc_feature (1300)..(1300): n is a, c, g, or t
  misc_feature (1304)..(1319): n is a, c, g, or t
  misc_feature (1329)..(1333): n is a, c, g, or t
  Peptide Sequence Number=SeqID_7758
  Probeset Number=SeqID_10970
cgcgtgttgcgcgcacgctgtctaacacatgcatcacgtgccacacgacacgcgccacgaccacctctcagcgtactgactatacgcgccttagagagtgctctttcgtcgcgcggcntatgacacacgcagttagcagtgtgtggataacaactctactgccaccagggctctagctcgcgtcggcgtctgcccgcacagtagtaacgatacacgtgtgtgattgagagggcttgatgatgtgaggtagggaacgagtgcgtgcaggagccggcgcagcgcgcgcacgctcgtacgtagtgatgagctattcgtatttcggtactctcacctctcgttcacaatttggtgatctgtcaccactaattaggacgcgtgcgcggagtctatatatnatagagtgagttgtgttctctccgagcaagacatacagaatatattgtccgactcgtgatcatgatacatatttagcgtatagtatgctgtatgcagctttcgttcggtctgcgtgtgtcggntctgcacatatcgtcgcggcaaacggctgggtggggttggtacactcccgtatcacgatcgcgtactctcagacatgtcactaaatgcgggcccgctgcgtcgctgtccacccacgcagacaggtactagactcctgtctctattattaattggactacatcacggaatgtgatgtatggcagagtgagagggaggaaaggagtcagatacgacacgagaaggccaaaggtaagagtcatggagagggatgagagtaacgaagactataagatagaaataattaaaggattctatcttccgccgcgtcgccgttctgtcttgcgcagcgtattgccgggttctgcgtggggtgttggttgggtggcgcgcgggcaggcgctgtgggcggccggtttgctccatccggaggcagcgatctctcgccgccgctcatcactgattaatagtattatagtatatgcgttcgtccgtgtctatattcgagtacgtggattcattcgcacatacatacacatccagatatggcaattcgagtgctcgcgcccgcgactatttgtatatcttattatatctcacgctctatgccacactgcggagaagaaagtggtggnnggtantgcgtcggggggcgccctccccttgctctcctcggataatggacacaactcggccgggaaatatnctnnttntaaagatnnnataaagantaanaaatataataatatatcgtcacagcctctgcctccccataaaanaaanagagagaggggggaggaanaanaggnnnnnnnnnnnnnnnngggggaaaannnnn

SEQ ID NO: 1192 - DNA, 461 bp, Glycine max
  Probeset Number=SeqID_10971
cacatgatcaggacaccacagacttgaacaaatgcatatcgttcatcaccagaaatccacccgggccagacaattctaatctcttcattctcgttctcggtgcgcttggaggaaggttcgatcacgagatggggaacatcaacgtgctgcatcgcttctcaaacaccaggatcatcctcctgtcagacgactccttgatctttctgctcccaaagacgcacagtcacgagatccacatcgagcggtctgtcgagggtcctcattgtggactgatccccatgggcgcgccctcaagtagcagcagcaccaccggtctccggtggaacctagataacaccagcatgaatttcggcgggctgctgagcacatcaaacattgtggaggaggagattgtaacagtcacttcggattctgatttgatttggacaatatcgcttcggaaacatacttaaattgtgtat

SEQ ID NO: 1193 - DNA, 586 bp, Glycine max
  misc_feature (18)..(18): n is a, c, g, or t
  misc_feature (20)..(21): n is a, c, g, or t
  misc_feature (24)..(24): n is a, c, g, or t
  misc_feature (28)..(28): n is a, c, g, or t
  misc_feature (183)..(183): n is a, c, g, or t
  misc_feature (299)..(299): n is a, c, g, or t
  misc_feature (325)..(325): n is a, c, g, or t
  misc_feature (371)..(371): n is a, c, g, or t
  misc_feature (373)..(373): n is a, c, g, or t
  misc_feature (415)..(415): n is a, c, g, or t
  misc_feature (430)..(430): n is a, c, g, or t
  misc_feature (513)..(513): n is a, c, g, or t
  misc_feature (521)..(521): n is a, c, g, or t
  misc_feature (537)..(537): n is a, c, g, or t
  misc_feature (547)..(547): n is a, c, g, or t
  misc_feature (553)..(553): n is a, c, g, or t
  misc_feature (558)..(558): n is a, c, g, or t
  Peptide Sequence Number=SeqID_7759
  Probeset Number=SeqID_10972
ttttttttttttttttcnannatngctngcttctttccttcatatgctatattgcaattgacatattggccgcgtgcttcttcgacgtgctgcccgttacgcgcgcagcgctaagccacccgctgcttgccatggcagttgctatgtatatagcactcaggattccttgcgccaccaaacggngtagcttccaacgccctacgtgaccctatggcttccccaacgcctgtacttgcttggggctttcccgtgctacgtcatgcgggggctagtgtgactgatctcctcaaaactacttnttcgagaatgaagatagatgcagaanaaatcccatgctcaccgtcatttggatccccccaacaccctccttntntcgcgtcacacatccggccattatgccctgctacccatcagngcaacctgtgatganatgagggctgtcaacgcgaagcccagcacagccgtaaaggtcacagccaacttcgagttctcgtcccaccatcctccatcctntggcttgntgggtccgtattcagngctaacccanaccaanacggngaggccagacagcatacacatgacgctc

SEQ ID NO: 1194 - DNA, 2112 bp, Glycine max
  misc_feature (18)..(18): n is a, c, g, or t
  misc_feature (20)..(20): n is a, c, g, or t
  misc_feature (29)..(29): n is a, c, g, or t
  misc_feature (59)..(60): n is a, c, g, or t
  misc_feature (89)..(89): n is a, c, g, or t
  misc_feature (92)..(92): n is a, c, g, or t
  misc_feature (137)..(137): n is a, c, g, or t
  misc_feature (170)..(170): n is a, c, g, or t
  misc_feature (185)..(185): n is a, c, g, or t
  misc_feature (193)..(193): n is a, c, g, or t
  misc_feature (198)..(198): n is a, c, g, or t
  misc_feature (200)..(200): n is a, c, g, or t
  misc_feature (209)..(209): n is a, c, g, or t
  misc_feature (261)..(261): n is a, c, g, or t
  misc_feature (269)..(269): n is a, c, g, or t
  misc_feature (286)..(286): n is a, c, g, or t
  misc_feature (302)..(302): n is a, c, g, or t
  misc_feature (330)..(330): n is a, c, g, or t
  misc_feature (335)..(335): n is a, c, g, or t
  misc_feature (362)..(362): n is a, c, g, or t
  misc_feature (396)..(396): n is a, c, g, or t
  misc_feature (443)..(443): n is a, c, g, or t
  misc_feature (521)..(522): n is a, c, g, or t
  misc_feature (528)..(528): n is a, c, g, or t
  misc_feature (546)..(546): n is a, c, g, or t
  misc_feature (576)..(576): n is a, c, g, or t
  misc_feature (578)..(578): n is a, c, g, or t
  misc_feature (613)..(613): n is a, c, g, or t
  misc_feature (785)..(785): n is a, c, g, or t
  misc_feature (790)..(790): n is a, c, g, or t
  misc_feature (839)..(839): n is a, c, g, or t
  misc_feature (939)..(939): n is a, c, g, or t
  misc_feature (1306)..(1306): n is a, c, g, or t
  misc_feature (1344)..(1344): n is a, c, g, or t
  misc_feature (1366)..(1366): n is a, c, g, or t
  misc_feature (1474)..(1474): n is a, c, g, or t
  misc_feature (1483)..(1483): n is a, c, g, or t
  misc_feature (1536)..(1536): n is a, c, g, or t
  misc_feature (1549)..(1549): n is a, c, g, or t
  misc_feature (1685)..(1685): n is a, c, g, or t
  misc_feature (1754)..(1754): n is a, c, g, or t
  misc_feature (1852)..(1853): n is a, c, g, or t
  misc_feature (1855)..(1856): n is a, c, g, or t
  misc_feature (1967)..(1967): n is a, c, g, or t
  misc_feature (1984)..(1984): n is a, c, g, or t
  misc_feature (1999)..(1999): n is a, c, g, or t
  misc_feature (2003)..(2003): n is a, c, g, or t
  misc_feature (2018)..(2018): n is a, c, g, or t
  misc_feature (2026)..(2027): n is a, c, g, or t
  misc_feature (2045)..(2045): n is a, c, g, or t
  misc_feature (2048)..(2048): n is a, c, g, or t
  misc_feature (2071)..(2072): n is a, c, g, or t
  misc_feature (2074)..(2074): n is a, c, g, or t
  misc_feature (2077)..(2077): n is a, c, g, or t
  misc_feature (2083)..(2085): n is a, c, g, or t
  misc_feature (2090)..(2091): n is a, c, g, or t
  misc_feature (2099)..(2099): n is a, c, g, or t
  misc_feature (2101)..(2103): n is a, c, g, or t
  Probeset Number=SeqID_10973
tcgatcgtatcgtcagtnanacctgtgangggactagacgcgtcgatgtaaagtgcganngtcgaccagacgcgatgactagatgtacnacnacatccacggacggcctcgctgacgtcgagagacgttacgtagantatgtgatcgcgacgcttatttaagtatagctnacggtcatatagtanactgtcgntccgntnatgtcgtantagtgcatgctctagtatcacgttaatcatatcatatattcatgagttctantctcgagngtagttcatgcgtcgcncagagatgctactacnaacacataatcatactaagcatcgctgncatcnatgaatatctcacagtagaacgtcggnagacaaagctgtgcgtcggtagcgagatgagcancacgacagagcagcgcgtggcgcgaaggtgatgtatcgacgcgtgancagctgtgtatgtatcgtgttcgtcgatacagttcaacgagtgtgtatagtctcgtgtgacagtgtatggtactgctnntgtcanctaacattatatctacgntgatgtgatgtattattatgctgagtattngnattgataataacgatgttagtcatacgacagcagntgtcgaatcatagaagtaacgcaagagagagcacagatccgcgcgagcatcagtgtacttcacatctatatcgatatacggacatcatcacctatacaccataagtatccaatagtcgacagatatacatacgagagtaccgatccatcactcgctcttcactcatcatcancatangaatctgtgatatattcgtatctctgcatatgtacgatatactggatcnctgatatagcgatgcgatcagtactctatgacgtcttcgcgtagtatagtaatatatcctgagatagcggtgtgtcattgtagataacaacatatatcantatagtaacaacccatcatcatattacatatgtcaatgagatatcgatatacacacgatatgctcacgtcatattccgcgatcttcaggcctcatttcactcgtgcactttctgcgtactctacttatatgactgactagctctctagtcgtatcgagtacaccgacacacagctaccttctagtgtgtcgtattcgattcgtcgcagtctacctctcttacgtcgcgtctcattagctcggttctttacgtgcactcatatctataactacatgatgcacgtgaacattatccacgttacgaagcaacagtatacgctgcgaccgtagcatcgcagcgtagcgccatgacaggagagagtgcgtgngacccacacattatgcgaaatacagcgagaagatgcanactaaaagtagatagttatagnatgtgtgagatatcacactattctctgtcatcatatcgtacagaatctagtcactagtactaatataagatcacaatatagatacttaacacataacaactataacanataagacancacaacactgtaagaatagtaacgtggtgtagatatgaattataatgatattnagaattgatatangaatgatatgttatatgctgtttgttatgttctatgttttaattgtcatatgatcagtattatgtgtattatattatattttcatcatatcttcacatacagactatatcttattactctagacctatccacaacnaatatcccacataccacaccaacgctgcccgagatacatacagtgacgcagctcatagacatcaatganagacaataaaggtcatatctgtctctatactacatctattatctcatatctatacatcttctattcgatcaccaatattataacgcactccatacatnncnnaccagcgtcgctaccctgctcgatgtcaccaacgcgtgtcgctcctagacccgtcacgctctcatcactcatactctctctctaatatcacaaacgacacagcgcacacgncggcgcgacgccgtcgngctcgtcgctgcagnagancggcgcgatgtgcgngaaattgnnggtttgtgtctttataangtnttcgtgtataatattactgtatnnanatnaaaagnnnaatanntggggaanannnggaaaaaaa

SEQ ID NO: 1195 - DNA, 1135 bp, Glycine max
  misc_feature (1)..(1): n is a, c, g, or t
  misc_feature (1013)..(1013): n is a, c, g, or t
  misc_feature (1085)..(1085): n is a, c, g, or t
  Peptide Sequence Number=SeqID_7760
  Probeset Number=SeqID_10974
nctcgctcgagccgataaacatgaactaaacagacaaaggaatcaatcatcctccttcaagtaatcaagcacccttcaaatctcaaattcagaatcaatcaattaatcaaataatcaatcaggttgatcatggacaggttagtgaaagcagacacaaaggaagtggagatgatttttctgaagggccaaaagtgcagctcctccttcaagctcaccaacctcatgcacaccatgtcagtggcagtgtctttaaccaccacaaactcttctcttttctccatcaacaaacccttctccacaattcccccactatctacggcatcatacaaactacaactctctcagccctccgatcaaccccctctctccgaccctcccgacgccatcaccgtccgagcaaccatgctccccaccgggaaggccaccgtcgccgacctccgccacttattctccaaacccggcccccacgtctcccgcgacggcgccttagtcgccatggaatgcggcagcgccgacgtcgtcgcggatttgctgcgcgacggcggaatccctcatgccgctcgcaattagggttgggagcctccaagcggtgaagcttctggaagcctccggctgcaaaatcgacgaatcggttcttcacgaggccgcggcaatggaccgaatcgacacgatgaagtttcagttggagcgctacggcaacgacggcgaggagttggaagtggatgcggtgtactccgaggggaggacggcgatccacgtggcgtcgagggaagcgcacgtgagggttatcaagtccgatgggaggaaaaccctattccttgaaccctgcgggtaggcacgcgccaaactgggcgctctcccagtcaccccccccaccccaacatcacactccctctgggttacgattgctttagggcacggcccgctgcccacttctgacgcgggtgcggaactaaagatgttacaagtgtcccgatgcgcttcacccccctctacacggaactatgcgatangctgctcgactgctctgcccccacgagtcccatcactgctagtttacacctgataccgtgcgctgcgtaatnacgctccaccgacgctcgccaataatcgtgcctctttttaacagtacgca

SEQ ID NO: 1196 - DNA, 751 bp, Glycine max
  misc_feature (751)..(751): n is a, c, g, or t
  Peptide Sequence Number=SeqID_7761
  Probeset Number=SeqID_10975
aaacgataaggtgtgtctcctccgactctctcgtcatcgtctgagcttacctaactccagttaatggcgatgtcgacgactacactcttccatgcacttgttccttccaacacttacaaatccagagctgtctcctcttccttcgtctcagttcctcgctcctcaactccaccttcttcgccgtctctccagttccgctcgcttgtttcagacacgacgtcgatctacggtcggaggaaatttaccggcaatctcagaagagtatccttaaccgtctccgccgccgcagcagctgagcctctcaccgtcctcgtcaccggtgccggtggcagaacagggcaaatcgtgtacaagaagttgaaggagaggtcggatcagttcgtggcgagaggcttggtgaggacgaaagagagcaaggagaagatcggtggagaggacgaagtgttcgtcggtgatattcgagaccctgaatccattgctcctgctgtgcaagggattgatgctttggtcattcttacgagcgctgtaccgaagatgaaacctggttttgattcctaccaaaggaaaaaagacctgaagtcctacctttgaagaaagaactttaccttgaaaaaggttgatttggaattgggccacaaaaaacccaaaaaaatgctgcctaaggccgcccggaaattaaccaaaattggttcttggcgggcggccccatgggtggggaaccaaccctttaaaccccccccctttgaacaan

SEQ ID NO: 1197 - DNA, 588 bp, Glycine max
  misc_feature (211)..(211): n is a, c, g, or t
  misc_feature (251)..(251): n is a, c, g, or t
  misc_feature (470)..(470): n is a, c, g, or t
  misc_feature (484)..(484): n is a, c, g, or t
  misc_feature (493)..(493): n is a, c, g, or t
  misc_feature (544)..(544): n is a, c, g, or t
  misc_feature (551)..(551): n is a, c, g, or t
  Peptide Sequence Number=SeqID_7762
  Probeset Number=SeqID_10976
ttttttttttttttttttaacttgacacgattatatttttctacatgcgccatctcaggtacgagtggtctcaattagagacgtgcagtagggccgcgctgatggcggcaactactaggctagcgctgttcagcagcgtcggacctcggggcgtgtatatgtagttgagtcttctggagacttgaatgccttcaaagcttattctcttcanagggccgtgttttggtagtcgatcacattgtccacatggngttgatctgctttcgcttgaccaaaggcgcgacaaacaagactccaacaaacaatccaacaacagtaagaagcatggaaatcttgttaaagcccttgcccaagatatcaaaggcaaaactgggtgcgactcgtgtaccgaagatatccaagccataggcaaagaccaaactggtgctttcaattccgctctcgctcgtgataatgttctcgatacccanaacttcgtacttgngggtaaggngccatttcgggtcgaagttgatgacaggtgtatacttgaccaggccttcanaagcttnttgagcagtggggtcacggccgactggtcggcgagga

SEQ ID NO: 1198 - DNA, 830 bp, Glycine max
  misc_feature (830)..(830): n is a, c, g, or t
  Peptide Sequence Number=SeqID_7763
  Probeset Number=SeqID_10977
ggggaccgggccccccctcgagtcagctatctaggcccccccccctttcactaccgataccgtcgctgccgttgtcaacaacttcgctggccgtcaacagatggtttggttcggtagctgggctactgagtggtcgcccacttccaacttcttgcagcacgcttacatccactggatgacccgtggtctgttcctcggcgcacgcaagacctacctcagcactcaggtcgatgatgttcacctcaccactaccatgtactctcctcctgacaagaacttccgtctcaggcccggtgaccttgctgagcacatcacttggatgaagaacatcaacggccgcatgcctgcaggctccaactactttgtcgagcttggtcacaacggcaacggcgacatcatcgaggctactgccgatgaatcgcagacagtgtgctctcctgcagacgctatctactacgactaccctccggacactcctcaagagttccagaagcctctaggctctggtgtcaacaactggcccgtcactccagcatcctactcctggagtcttgcttgcgctaagcgtgataccctcgcaagctggttcatgactgctgccaaccgcgacgcattcgcacacgtatctcacactttcactcacttgcctcagaacaacatcacctacagcgatgccaacaaggagatcgtcttcaaccaggcttggctcaagcaggttggcattgctagcggtaacaagtggtctcctaagggtcttattcctccggctatcactggtctccacaacggtgatgctatccgtgcctggatcaccaacggtattgttcacn

SEQ ID NO: 1199 - DNA, 1507 bp, Glycine max
  misc_feature (30)..(31): n is a, c, g, or t
  misc_feature (36)..(37): n is a, c, g, or t
  misc_feature (64)..(64): n is a, c, g, or t
  misc_feature (96)..(96): n is a, c, g, or t
  misc_feature (122)..(122): n is a, c, g, or t
  misc_feature (253)..(253): n is a, c, g, or t
  misc_feature (342)..(342): n is a, c, g, or t
  misc_feature (385)..(385): n is a, c, g, or t
  misc_feature (436)..(436): n is a, c, g, or t
  misc_feature (636)..(636): n is a, c, g, or t
  misc_feature (922)..(922): n is a, c, g, or t
  Peptide Sequence Number=SeqID_7764
  Probeset Number=SeqID_10978
ttttttttttgtggctggcgtggtggttcnnccttnnccttcatccctcctccctcccccctcnggccgccgacgacggcaaccgcagcgccccanccgaaactgtagtgataaataaaaantatatggatggcgcacccaacacaaccctacgtgagagcagacataatggatggaccacccaactttaggcatgacaagtaatcaacccgcacaacaatttgacaacaaatttttacggtaaaggagcgcntcaacgaggcgcgcagtaactgtatacacaacaagaataataaagagtattcccagttacaggagttgataacaactcagaaatacgancgaggcaagtcacaaacctctacaccaccatgtcaaaataaangacagaaatcctcaccgtgcccaacccattgtactcaatctccaacacaancgacattaccgcaccccaaccaaaacaagcaatacaagaataaatataaactttcccccccttcacgtgtcgttcaccagtaatataatgcagacgtacgccgaaagacacgagccgccatacaaatataacaggaagagcagcacacggcttgggggatcgctagccgcactatcgaatacgcgctcgggcgcaaagtngttcattgcggcgtacttaactgaatacgcgtgctgtcactcctccctatctcatgacaaacttatatcatacttaacacaacacaaacacagataatatacacacattacaacacacgaaacacgcaacacaatatatacaaaacgagtaaactaatacaacagccgacacatatttataacgacgcacacgataggctcgtcggatacaacatataaatacatctaaactctatgaaacaccactgtatgatcacgcatcctgactagaagaacacgagaggantgcgtggctgcacgtgcaatagacggagcgccggctgtcaccgctgttcttctgacagcgcgtgttattcatcgctcgtgtcgcgggcacctcaccttatgatgcacacattaaacaaatatagcgatcaataatacatactctaccaggaaacgcgaacaacattaatatatgaagagacgaccagagatagataccaacaatgacactaagcagcaagccgcatacataccagtatatataagtatccgcctcagacagtccatataaggtatcagtacgcactcacacagacgagataacacagcgagagagcatagggacaagctacacacaaaacagcacatagtaccgaccaccaatataagatcgacagacgacacgtactagatgatacacgctcctcgacgtgaaacaaccgataacgagcggcaaacaccccatgaacagacaatacggaaacaacaccactgcactgcggtcacgagcctacaacccgctgcaccgctcgacgtcgagcgcaatctgatcaaacatacacgaacattgtgattagagagtaaagactaccgagcaccgctcgtg

SEQ ID NO: 1200 - DNA, 492 bp, Glycine max
  misc_feature (336)..(336): n is a, c, g, or t
  misc_feature (400)..(400): n is a, c, g, or t
  Probeset Number=SeqID_10979
gccaaccttttagaacctgaattgggtgttcgcagagctctctctgatgggccattccctgtcattcctagtttgtctgaaacactagatgcaaaatggactggtgaaaaccgcgcaggatatggaattcaaaaggataacagttctgtaaatcctgatatacttatggcagatgctttgacaaccagtgcacaaaaagaaatatattatctaggggatcgtacagaagatcaaaaaggtcatgatattatggaaaactcttcaacctggttgggattgcccttcttgaccttctatcgccaatttaccaaaaccctttttgctattccacaaaantttaataccctagttaactacaatcttgttaatatatcatgttgccgaaaccagaacctcctanttgagccaaggctcctgctcccatttagtttcaataaaatctttattccattatttaataataaccctttagttataatgccgtacccctta

SEQ ID NO: 1201 - DNA, 401 bp, Glycine max
  misc_feature (70)..(70): n is a, c, g, or t
  misc_feature (99)..(100): n is a, c, g, or t
  Peptide Sequence Number=SeqID_7765
  Probeset Number=SeqID_10980
gtttagggtttaagacgttaaacccagaatccgttcaattcgaaatctccagcgaagaagaagaagaagnaccaaaatggcgaattcaatggctacgcnnttcgagaagactctaccgatctcttctctctaaccccagattctctcaggcttccatgcccttcagcaccaacaacaacatctccgacttatcagacactgaatctccccttgaaacgaaggcttcagatccaaaccatcaagaggaacgcgtgatggaggagcgtccactcgagaacggccttgactttggcattttcaaggcgatattggtggggcaagtggggcagcttcctctgcagaagaagctcaagaatggcagaactatcactctcttctctgtaggaaccggtgggatcagg

SEQ ID NO: 1202 - DNA, 1780 bp, Glycine max
  misc_feature (13)..(14): n is a, c, g, or t
  misc_feature (16)..(16): n is a, c, g, or t
  misc_feature (21)..(22): n is a, c, g, or t
  misc_feature (28)..(28): n is a, c, g, or t
  misc_feature (35)..(35): n is a, c, g, or t
  misc_feature (55)..(55): n is a, c, g, or t
  misc_feature (90)..(90): n is a, c, g, or t
  misc_feature (92)..(92): n is a, c, g, or t
  misc_feature (102)..(102): n is a, c, g, or t
  misc_feature (115)..(115): n is a, c, g, or t
  misc_feature (144)..(144): n is a, c, g, or t
  misc_feature (152)..(152): n is a, c, g, or t
  misc_feature (196)..(196): n is a, c, g, or t
  misc_feature (485)..(485): n is a, c, g, or t
  misc_feature (752)..(752): n is a, c, g, or t
  misc_feature (825)..(825): n is a, c, g, or t
  misc_feature (859)..(859): n is a, c, g, or t
  misc_feature (1174)..(1174): n is a, c, g, or t
  misc_feature (1287)..(1287): n is a, c, g, or t
  misc_feature (1421)..(1421): n is a, c, g, or t
  misc_feature (1449)..(1449): n is a, c, g, or t
  misc_feature (1522)..(1522): n is a, c, g, or t
  misc_feature (1565)..(1565): n is a, c, g, or t
  misc_feature (1593)..(1593): n is a, c, g, or t
  Peptide Sequence Number=SeqID_8546
  Probeset Number=SeqID_10981
cgggggtgttagnntngttgnnatcttnattgtcnctattctgctctccagacanacacgcggcgagacgcggtagtacacctcttgcgngnaggagagccntatgcgagagatncggagcgtggagtgggatgggccccccgnccctgtgncactgacgccgggtgcaaaaaaatggagattctcaatgaggtgngtccgccgcttcgcgcataagatacacgtggcaactctcaggatgggcaataagagataactatcacttatgtgtgtccgcctgtaattcatttatattatccaccgttataatgagatggtatgattagtaatacgacgtattgtgagtgctctatgcaagagcacagatacgtaagactgaaaagagaggcaacgacaccaaccccaaagcgacgagtgtcacgggtatgatacatacagatacgacaggtaaggagatacagcagcctgcaagcgtatgcgcacgntgtgtcggtgcgcgaggcgagctgcacgtgtactgtcgtatgtgggcgtcacgagtacatcattggcgcgcgcgtcgaagtcagtgtggtggagcctgccgtacgtgcactctacttctcttattgttgtagcatataataggagtatgatgcagattagctgcataggatatatgccgtgatacgaagcaatgacgctaggttgattagtaatagcatatagtcatgtactgcgcgtgtgtgtgctgtggcccagcgccgcgctgngtcgccgacgtcgcggcgcatgactgggttgcttactctatgtgtattactgtatgtgtatctctatgtggtngcctcatgctgctgtcgctagttatagagaaganagtgataccagacaatccatacatccccaaccatacacaagttgatagatgatagtgacgagaatgatatgtatgttgtagtaaaagatacaatgattgaccatctgtatagtacatgcggatgtagtacacactcaaccgacactgcgaccaccagccagatacgcagtgtgctgtatagatcagtgaatccgatacatagataacagcacgctctctatgcgtgctatgaagcacatcgcatgtgcatgtgcacgtatctgagtgctgattgatgatgatgagtggtacaacaatcgtacgcattcgaccctnctctgcctcgctggtgacctacactcatcacagccatcacacacatactacgataatgacgcacaatcgatctcatcagcatgtcgcacgttgtcatacgatatgatgctacntagtagatagaatgatatcgacacattgtatacatattgaacttgtagcacacacagcgtccgtgctcagccgccccatgatagatgatattatgagatagataatgtcgtactatacctctactgatacatantagcgtaacataagacagtcagacgcanaagacatagcacgcgcagcactcgcacttatgacgtacatgctatcagctagtcgatatatatatatggacgncggccgtggagcgcagcggtgagtagaggtgccactcgatgtnaagtacagctcgacgacgtcggcgtggntgtgagtgtgagtgtaatattgtaagtgtgtgtgcattcttcgtacgtcaagcttcagttcgcgatgaccgtacggatattaatatagtgagtatcggacatgatatgactcgatattatactatatatatcatcatgtctcacagactcgcactctgttctcagcgacacagaatgtacgaactag

SEQ ID NO: 1203 - DNA, 1030 bp, Glycine max
  Probeset Number=SeqID_10982
gtcaagtgggggtggtcgaggtttcaaggtttgagaaatgcatgtcgcggtgtttggtcattattataaggtgtcgcgtttgttttagagggggttattgacccgtcgtggtgctttggagatataatgggcgtcgctttccgccaaggagtgggtgcagggagaagagggggggatttgctagtgtccagggaacccagagccgccgggcgggagtttcaatgctttggccggttttgcgcccatgggtgagggtttcttcgtgggtcaagtggttcttcttagcggggtggtgtgtgttttgggaggagccctcgctgggagtgttccggtgcctgtggtgggccaaatgcctgggtttgtgcgttcgatccgatgggaggggagtttccagcgcggaggtgctcattgcattccggatgggggacttccagtgggagctggcaagggatttcttggccaagtgcgaattaaccaaccctcgggtgcaggggtggccaaatgataatggggcgcaagcgttgtttgagcagccaagggcgtgccgaggcaaatgtcgcctgaggatttggcccggacaaaaatggttgtgtgagggccggggaaacccttttcatggaggatccggtgatgaaggatgcaagcctgctcgccgataccaagtgcgggtcggtgaagaaggtatatgtggtagcaaagactgatggctccagctcggaggagatgcagcgttggatggtgttgttgatccccggcacggaggctgaggagatcgcgggagctggccacgccatcatgagctcaaggcctagggagctctgtgatgctctggtcaagatcgccggcagcttaaatgcttgctaaattgtacgatatatatccctggaaatcaatgtaggtgtgtacttggttttcatctaaaaatgaatatgttcagttgatactattaaatcaatggaaattaagtagtgtgccccgtttttggtggggtgggtggggggggggggggggaggggtggggggggaaata

SEQ ID NO: 1204 - DNA, 1822 bp, Glycine max
  misc_feature (11)..(12): n is a, c, g, or t
  misc_feature (25)..(26): n is a, c, g, or t
  misc_feature (30)..(31): n is a, c, g, or t
  misc_feature (48)..(48): n is a, c, g, or t
  misc_feature (57)..(57): n is a, c, g, or t
  misc_feature (80)..(80): n is a, c, g, or t
  misc_feature (88)..(88): n is a, c, g, or t
  misc_feature (145)..(145): n is a, c, g, or t
  misc_feature (175)..(175): n is a, c, g, or t
  misc_feature (177)..(177): n is a, c, g, or t
  misc_feature (220)..(220): n is a, c, g, or t
  misc_feature (248)..(248): n is a, c, g, or t
  misc_feature (252)..(252): n is a, c, g, or t
  misc_feature (296)..(296): n is a, c, g, or t
  misc_feature (310)..(310): n is a, c, g, or t
  misc_feature (313)..(313): n is a, c, g, or t
  misc_feature (494)..(494): n is a, c, g, or t
  misc_feature (567)..(567): n is a, c, g, or t
  misc_feature (572)..(572): n is a, c, g, or t
  misc_feature (576)..(576): n is a, c, g, or t
  misc_feature (640)..(640): n is a, c, g, or t
  misc_feature (642)..(642): n is a, c, g, or t
  misc_feature (690)..(690): n is a, c, g, or t
  misc_feature (759)..(759): n is a, c, g, or t
  misc_feature (766)..(766): n is a, c, g, or t
  misc_feature (818)..(818): n is a, c, g, or t
  misc_feature (863)..(863): n is a, c, g, or t
  misc_feature (868)..(868): n is a, c, g, or t
  misc_feature (885)..(885): n is a, c, g, or t
  misc_feature (928)..(928): n is a, c, g, or t
  misc_feature (941)..(941): n is a, c, g, or t
  misc_feature (964)..(964): n is a, c, g, or t
  misc_feature (1062)..(1062): n is a, c, g, or t
  misc_feature (1091)..(1092): n is a, c, g, or t
  misc_feature (1167)..(1167): n is a, c, g, or t
  misc_feature (1172)..(1172): n is a, c, g, or t
  misc_feature (1188)..(1188): n is a, c, g, or t
  misc_feature (1192)..(1192): n is a, c, g, or t
  misc_feature (1197)..(1197): n is a, c, g, or t
  misc_feature (1199)..(1199): n is a, c, g, or t
  misc_feature (1226)..(1226): n is a, c, g, or t
  misc_feature (1240)..(1240): n is a, c, g, or t
  misc_feature (1288)..(1288): n is a, c, g, or t
  misc_feature (1294)..(1294): n is a, c, g, or t
  misc_feature (1303)..(1303): n is a, c, g, or t
  misc_feature (1307)..(1307): n is a, c, g, or t
  misc_feature (1345)..(1345): n is a, c, g, or t
  misc_feature (1367)..(1367): n is a, c, g, or t
  misc_feature (1385)..(1385): n is a, c, g, or t
  misc_feature (1438)..(1438): n is a, c, g, or t
  misc_feature (1502)..(1502): n is a, c, g, or t
  misc_feature (1504)..(1504): n is a, c, g, or t
  misc_feature (1570)..(1570): n is a, c, g, or t
  misc_feature (1582)..(1582): n is a, c, g, or t
  misc_feature (1589)..(1589): n is a, c, g, or t
  misc_feature (1618)..(1618): n is a, c, g, or t
  misc_feature (1640)..(1640): n is a, c, g, or t
  misc_feature (1645)..(1645): n is a, c, g, or t
  misc_feature (1647)..(1647): n is a, c, g, or t
  misc_feature (1650)..(1650): n is a, c, g, or t
  misc_feature (1666)..(1667): n is a, c, g, or t
  misc_feature (1684)..(1684): n is a, c, g, or t
  misc_feature (1789)..(1789): n is a, c, g, or t
  Peptide Sequence Number=SeqID_8547
  Probeset Number=SeqID_10983
tggtggctccnnccaccccgcgccnncccnnccgcccccgcaccgccncacgacgcnaccctgccacgacgcacgacccnacactccncacacacaccacgcggaccgcgcgcaggggacgcgcgccgcacacgacggcgctacncgacagtctgcgctctgttccgccgaggcntngaagcgacaattgaagcggcaggagcgggaggcgataggtgancagcgagtacgacccgcgaccccgcagngagncgcgacaatggccgtcgcacgtctggcgcggcgcgcgcgccacnttcttctttcccgnctntgattcctgatctcgcgtgagacgtcgcgcatcgccgcttgctttcgcgcggtgcagcatcgcgtccgcgctgtacgtacgcgcgtgataacgacagcagatacagaacatacgatacgaggtgagtagtctgacgcgtgcgctatgtgacgcgtcgtcgctctcgtcatacatctcgtgnagaaatgttaacagtgcgcctcgagcgccgtgacgatgttctcgatgctgacgaggagcagatcacgaactcnagatncctnctctacggtgtgtcgtccgtcgcgtggcgctgcatgagtcgctacgcgcgagcggacgtgaatntnagtcgatgtcgagagagtatgcctgctaatacatagcgcagtgttcgnacgtacgatagtcgtataggtcgggagctagccgctagttccggcacacgtcctcgtggtcgcggtggnacgtcgnatcgtgcggtgcgagtgacggttcgtgtgatcgcatggattgttgtcttctnactagtcgcgcgtcgtgaaagaaccgatagtgagagcgtagtggntgtgnctgtcgagtgtgattantagagtgtaatagtggaggaggttgtgatgtaggtggatatgncgtcagacgtaantatcaacgtagtcagtatgcganatatctgagacggatggatagtatagtgtgtatgagcagtcgttgatcgtatgagtgatgtgatgttaatatgtcagcatcgcataacgtagagacgnatgtcgtcattagtatgacatgtcgatgnncgctattgcgtcgtctgctgatctgcgatacgtgatgtgcgtactgacgatgcagataagtgctatgatagtcgntatcntgctgtacttatcatnagtngtatntntagtttgcgaatgatagtacgcgcgangcggagacaaatgnagcacgtgacatagtatgagaggtactacgagatgctgtattctatantggtgncgagtgtgnagcncgtatagtcgtttgtgatacgagatgcgagtatgtggnttgtctcacgtataatacgctnacggtgactcgcgctcgnacgacaagcacgctggatgtcgcaagatgatatttgatgctcatgactaattnatatcgtattagttcttacgtctgtctcatttgatgtatatctgattactatgactgatgactngnatatatatgtgtcgtaggcgcatgcgcgtcgctcatacatcaacgacaaatgcagattagtagtangatgcgcgtgtntaagtangagtatgttcgtatgtgtgtgtgtatganctaatgcgtatgatgtcgcaanttgtngncgnctgtatacagatgagnntgctatctcaacgtgtngatcgcgtatatatatgattattagtatgatatatgaatatatacattgcatgttgtatatagatcgaggttagtacgagagtacgtgtttgtgagtcgctttancactattagtaatagacgagtgcatatattgtg

SEQ ID NO: 1205 - DNA, 1064 bp, Glycine max
  misc_feature (1)..(132): n is a, c, g, or t
  misc_feature (398)..(398): n is a, c, g, or t
  misc_feature (435)..(435): n is a, c, g, or t
  misc_feature (1064)..(1064): n is a, c, g, or t
  Probeset Number=SeqID_10984
nnnnnnnnnnnnnnnnnnnnnnnnnnnnnnnnnnnnnnnnnnnnnnnnnnnnnnnnnnnnnnnnnnnnnnnnnnnnnnnnnnnnnnnnnnnnnnnnnnnnnnnnnnnnnnnnnnnnnnnnnnnnnnnnnnnnctgatccccttgccaagaaagactggtaccatatcaaagccccttccctcctccaggtcaagaatgtgggcaaaaccctcgtctctcgtacccaaggaaccaatattgcttcccaatgactcaaacatcgggtgtttgacgtctcattggctgatctccaaggggatgaagaccactccttcaagaagattcgtttgagagcttaggacgttcaaaggaagaatgttctgacaaacttctggggaatggatttcacaactgacaanttaaagtccttaataccaaaataacaaactttaatgnaatctcatataaatatcaaaaccactaataattatacattagaaatattctacattaactgtaccaagaaacatagtgcccgggtgaaggggccctgttatgcacaatcgagccgaatcagacagattcgcaggaagatgagatagataatggtcaaccaaccaccagcatgtgatttgaaagaattggtgcgcaagttcatccccgaaatgattggaaaggagattgagaaggcaacatgtagcgtctatcctcgacagaatgtgttcattcgtaaagttaagatccttaaagctccaaagtttgatcttggaaaactgatggaggttcatggggattactctgaaaatgttggtgccaaggtggacagccctgccgatgaaacattggctgaggaaccccctgaagtagttggggcttgatctggctcataaggcatttttgttattttagaattcctgtttctcttacaaaaattaattttcagttttgttttaatatttagaaacccatttgttgcaaaaaaaaaaaaaaaaaaaaaaaaaaaaaagcgccgctcgaatcggacgcgtgggcggacgcgtggggaagacgacagaaggggggatagaagtattcaggtcagaggn

SEQ ID NO: 1206 - DNA, 1558 bp, Glycine max
  misc_feature (10)..(10): n is a, c, g, or t
  misc_feature (20)..(20): n is a, c, g, or t
  misc_feature (25)..(28): n is a, c, g, or t
  misc_feature (34)..(34): n is a, c, g, or t
  misc_feature (39)..(42): n is a, c, g, or t
  misc_feature (58)..(58): n is a, c, g, or t
  misc_feature (126)..(126): n is a, c, g, or t
  misc_feature (149)..(149): n is a, c, g, or t
  misc_feature (156)..(156): n is a, c, g, or t
  misc_feature (240)..(240): n is a, c, g, or t
  misc_feature (265)..(265): n is a, c, g, or t
  misc_feature (289)..(289): n is a, c, g, or t
  misc_feature (340)..(340): n is a, c, g, or t
  misc_feature (492)..(492): n is a, c, g, or t
  misc_feature (684)..(684): n is a, c, g, or t
  misc_feature (873)..(873): n is a, c, g, or t
  misc_feature (1233)..(1233): n is a, c, g, or t
  misc_feature (1347)..(1347): n is a, c, g, or t
  misc_feature (1387)..(1387): n is a, c, g, or t
  misc_feature (1445)..(1445): n is a, c, g, or t
  misc_feature (1558)..(1558): n is a, c, g, or t
  Peptide Sequence Number=SeqID_8548
  Probeset Number=SeqID_10985
ttttttttanggtttggtgnctctnnnntctcgntgctnnnntcgtcgttcttcgtgngcgcggctcgcccttcgacacgccgcttggtatgtggatatattatatattgctacgctttaggaganccaccccacaccccaccccgccncagaganatagcggacgctgcgaggtggtggcgcgagcgggcgcctctcccccctctcttctctgtgagtattgacgcacatacagcgagntctcgcctctcccttatttttcccnctctgtttgttggatttgaatgtnagagatcgtacgcgcgcccgcgctagcaggcgcgaccacacagttcgtttntctacaatgtgaggtatagcgtgcataggttgtggtggagcttggagcgcagcgtatcactagtgtgctgtcttatattgatgcgctatgtgcttcaccctccctcctatcaatcacacattcagacacacgaacatctatctctgcttgtncactgggtcggtgcgagtgctgctatattattcatctcatcgcttctctcataagcctattgtgtgtctagcgttttccggcagagttggtggtgtgcatctagtctgtagtctagaatgctggtatgggattctgagtgttatggttgttcgctcgcctgctgacccaccgtcggtttgcgcacgcggttngtatgcttggtgtctttctgatatgtatctcacattttgtctcactcgacgcctctcgtttcatcgcgcactcgtgcatggatgtacgtgcaagtagtgagtaccgcggaggtccgtatgtgcgggaggtgtaagtatagaggggaggagggaggtggtgcgggcatatatgtgagtgtgtgtgaagtncaatgccctattgaggcgcttcacgaacgacgcggtgcgctccgtcgctgcgcgtctgcgtcccgcgtggatgggtggcgcatgtcgcgcgacgtcgagcgacggcgggctcgcggtgatgttgtctctctccatgcacctatgtgtgtctccccgcatgtctggttagtgcgagacgccagtatgctccgcgagcgccgcgcccgctcctctcgtgtgttgcgtgtttcggccggagcgtgtcgaccgtgatgctgtctgtgcacccgctgacggcgtgtatgtatacgcgctacagccgcgcttgcggtgcgttacctttgccccgccgctacgcgtcacttctatcttgcgcgcgcntggtgcggtagcggaggagatcgatcgtgttggggttacctcgctcgcgcgctgctgctgcgcggcgttacggtccagcaataaggttgtgctactgaggcacgtcatggtgcngtcgtcctgtaccgccagcgccgtctgcgtccttgagggntctatgtactgctatctgtgttctgtgcacatcgctcggctatgtatgtgagagccgncgcctacgctgtatgttgtgtgtctccctctcacatgcacgcgtgctttgtcgctccgtgaccctagttgtgtgtgctcgctccgcgtggggcgcggtgtgagtgtgtgcatn

SEQ ID NO: 1207 - DNA, 717 bp, Glycine max
  misc_feature (55)..(55): n is a, c, g, or t
  misc_feature (58)..(59): n is a, c, g, or t
  misc_feature (61)..(62): n is a, c, g, or t
  misc_feature (601)..(717): n is a, c, g, or t
  Probeset Number=SeqID_10986
tttttttctatcctctcaccactcgcgcctctcacgcccttcccgccgccgccgncgnngnnactcccctcgccgccgcagcagccgcagccatggggcgcatgcacagccgcgggaagggaatctcatcgacggcggcggtggctacggcagccgggaggggcgcgaagactacggaagcgaccagaagcaccaacaacaacagaaccaaccgaccgagaaccggggcaagccaactgcagggcaccaacagtagaggccaaacccgggaccggtaaacaaagtgccggaaccctaactaaccgggaacccccacaaacgagagaaccaccaccacaaaaacaaaaaaaccccccccatcacaaaacggcccaaaccagtctccgacaaaataaaaaaagaaccacccaaaaaacgtccaaagaaacacaaacacccccccccgacgggtgaccaaacgcaatcaccaaaacgggagaacgcaacaaacccgagtaaaaaaaaaacaacaagccacacaaaaaacccctcaaacataaagcgcagcaacacagcacgccacaccgaacacccacgaggaaaaggaacaataacagcgcgnnnnnnnnnnnnnnnnnnnnnnnnnnnnnnnnnnnnnnnnnnnnnnnnnnnnnnnnnnnnnnnnnnnnnnnnnnnnnnnnnnnnnnnnnnnnnnnnnnnnnnnnnnnnnnnnnnnnn

SEQ ID NO: 1208 - DNA, 488 bp, Glycine max
  misc_feature (85)..(85): n is a, c, g, or t
  misc_feature (87)..(87): n is a, c, g, or t
  misc_feature (256)..(256): n is a, c, g, or t
  misc_feature (413)..(413): n is a, c, g, or t
  misc_feature (428)..(429): n is a, c, g, or t
  misc_feature (436)..(436): n is a, c, g, or t
  misc_feature (439)..(439): n is a, c, g, or t
  misc_feature (458)..(458): n is a, c, g, or t
  misc_feature (467)..(467): n is a, c, g, or t
  misc_feature (470)..(470): n is a, c, g, or t
  misc_feature (472)..(472): n is a, c, g, or t
  misc_feature (474)..(474): n is a, c, g, or t
  misc_feature (476)..(476): n is a, c, g, or t
  misc_feature (479)..(480): n is a, c, g, or t
  misc_feature (482)..(483): n is a, c, g, or t
  misc_feature (485)..(485): n is a, c, g, or t
  misc_feature (487)..(488): n is a, c, g, or t
  Peptide Sequence Number=SeqID_8549
  Probeset Number=SeqID_10987
atcacaccaaaccctcttacttctccacattgacagaaaatacccatctcttctctttacttcctttttttccttctctttttgngnggtggaattattttgcttcatcatgggagttttagtaatctcggctctcctgctccatgtcctatcattttctgtttgcgttcaaggcttctaccgtcgtggcggccaccatcccggcggccacatgggaccttggatcaatgctcatgccactttctacggtggcggngatgcttccggcactatgggtggagcatgcgggtacgggaatctatacggccaaggttatggaacagagactgcggcgctgagcacggcgttattcgataacggacttagctgtggtgcctgcttcgagctgaaatgtgtcaacgaccctcagtggngcatacaagggcggnnccattgnggncaccgccacaaacttttgncctcctggnggngncngnganncnncnann

SEQ ID NO: 1209 - DNA, 680 bp, Glycine max
  misc_feature (601)..(680): n is a, c, g, or t
  Peptide Sequence Number=SeqID_8550
  Probeset Number=SeqID_10988
ccgattgggtaccgggcccccccgcgcgagaccggcgaggaagccgccgccatcccgttcctgaagcggttcaccgtcttcaacgccgcccaatgcgaaaacctgccggccgaggtcgcggccgtcgcgccaccgccgccgccgggcctgatcgagcccagagtcgaggcgctgatccgcgcgaccggcgtcgacttccgcatcggcggcaaccgcgccttctacgcaccgggtccggacttcgtgatggtcccgccgccgcaggcatatttcgagccaatcaactggcaccgcacagccctgcacgagctggggcacgccagcggtcatccgtcccgtctcggccgcgatctcggcggcgtgttcggcagcaagaagtacgcgttcgaggaactggtggcattatcctgactctgtgatcctgtctcagaatcatgcattggaggcgcctcaccacggctccggtgaagctcttcagacgtccgggtcaagcgttcccgcagcgtagcgaggacaacgcttgacgcggcggcggcacgacaagctgttcatggggtgcaggctaagtcctgcacccctgccacgcggcgagcgggagagnnnnnnnnnnnnnnnnnnnnnnnnnnnnnnnnnnnnnnnnnnnnnnnnnnnnnnnnnnnnnnnnnnnnnnnnnnnnnnnn

SEQ ID NO: 1210 - DNA, 1434 bp, Glycine max
  misc_feature (28)..(38): n is a, c, g, or t
  misc_feature (40)..(40): n is a, c, g, or t
  misc_feature (81)..(81): n is a, c, g, or t
  misc_feature (100)..(100): n is a, c, g, or t
  misc_feature (110)..(110): n is a, c, g, or t
  misc_feature (229)..(229): n is a, c, g, or t
  misc_feature (401)..(401): n is a, c, g, or t
  misc_feature (541)..(541): n is a, c, g, or t
  misc_feature (582)..(582): n is a, c, g, or t
  misc_feature (648)..(648): n is a, c, g, or t
  misc_feature (884)..(885): n is a, c, g, or t
  misc_feature (1160)..(1160): n is a, c, g, or t
  misc_feature (1201)..(1201): n is a, c, g, or t
  misc_feature (1268)..(1268): n is a, c, g, or t
  misc_feature (1343)..(1343): n is a, c, g, or t
  Peptide Sequence Number=SeqID_8551
  Probeset Number=SeqID_10989
aaaaaaaggaggatagccacacgctcgnnnnnnnnnnncngacacacatggcattctcatatactacccagagcgtccggnaccgatcatcataatatanaagaagaaanagagcgatacaagccaatgatataagcgaaccgtctctcgcgtcacgcgtgtcgtccaggtcctacctctcctcccctacttacgcttcgaacacaggcccaccacgctgcccgctccncactatcccgacaaacaacaccgtcacctctttacaatcggtatctgcatatataagagggcgggggcagcgagcgacctcgtctcgcctgggctgcctcctctatgtgttcatccatcaactaactaatacacgatgtccaaatacttctagtcttgtgtgccccccgacnccaccccaccatactcttatcctcgaccccacttccttataatcggctttgcgctgcacactcccaacacactacaattaaccgtccacagacaacataccaacaacacgacgccatcatcacccgacgcaatccagacnacacgactcattcgtggggcaagcttcacacacattatccnatgtatcgatgctctcgtgtttgtttgtttcttctcatttactgctccgattccgcctgcagactncgctcgctcgaccctctacgtgtcgcactcacgcaagctggacagtcctcactcccgcgcaggacgtaccgatctagcttctacaaatacattcatcctacactgtcctctcacaactactcactctacctgataactacttgttatgaaagagaacaccccccacatacacatgctatatagaaaccacgctacaatgtatttatatggagttgaggagttaaaaggaaaaagannacacccaccaccactcaatcgtcagtcgtctcgtgaataaccacgagaagccagcgcgcatccttctcacacaagtagtggaggcagcgcaggcacaacatctgtcgcgtaagacaatgctaattactcggttatgcagcgcttaaatgcttgccttctttgacgtccgacattaacacactagcacgacacctccatcgctcacccagcacggataagtggtcgtggccactccatgtgtcagacatgagagtgatgtgagcgtgccacgacanactcacgaccagatatgagtgacactaagtaatgttccttngcatacttactgtgagtcgcgtgcgtgaaatgtatgtatgcttacatctctacgcgacatagtcagntctcaacaatcagcgcgcgactatgtctagatagagcagtcattcgagagactcacaccgtcgcgacggctcgantcaaacacaatctctctccatctcgtccgtgtatgcctcagcgcatcacatatatatgctgatcccttcactgccattcctcgtcactatt

SEQ ID NO: 1211 - DNA, 1610 bp, Glycine max
  misc_feature (23)..(23): n is a, c, g, or t
  misc_feature (33)..(33): n is a, c, g, or t
  misc_feature (40)..(40): n is a, c, g, or t
  misc_feature (44)..(44): n is a, c, g, or t
  misc_feature (69)..(69): n is a, c, g, or t
  misc_feature (77)..(77): n is a, c, g, or t
  misc_feature (81)..(81): n is a, c, g, or t
  misc_feature (86)..(86): n is a, c, g, or t
  misc_feature (101)..(101): n is a, c, g, or t
  misc_feature (173)..(173): n is a, c, g, or t
  misc_feature (185)..(185): n is a, c, g, or t
  misc_feature (237)..(237): n is a, c, g, or t
  misc_feature (288)..(289): n is a, c, g, or t
  misc_feature (302)..(302): n is a, c, g, or t
  misc_feature (306)..(306): n is a, c, g, or t
  misc_feature (343)..(343): n is a, c, g, or t
  misc_feature (467)..(467): n is a, c, g, or t
  misc_feature (502)..(502): n is a, c, g, or t
  misc_feature (609)..(609): n is a, c, g, or t
  misc_feature (621)..(621): n is a, c, g, or t
  misc_feature (665)..(665): n is a, c, g, or t
  misc_feature (732)..(732): n is a, c, g, or t
  misc_feature (832)..(832): n is a, c, g, or t
  misc_feature (840)..(840): n is a, c, g, or t
  misc_feature (853)..(853): n is a, c, g, or t
  misc_feature (1277)..(1277): n is a, c, g, or t
  misc_feature (1322)..(1322): n is a, c, g, or t
  misc_feature (1350)..(1350): n is a, c, g, or t
  misc_feature (1355)..(1355): n is a, c, g, or t
  misc_feature (1470)..(1470): n is a, c, g, or t
  misc_feature (1493)..(1494): n is a, c, g, or t
  misc_feature (1507)..(1507): n is a, c, g, or t
  misc_feature (1515)..(1515): n is a, c, g, or t
  misc_feature (1522)..(1522): n is a, c, g, or t
  misc_feature (1547)..(1547): n is a, c, g, or t
  misc_feature (1552)..(1555): n is a, c, g, or t
  misc_feature (1558)..(1558): n is a, c, g, or t
  misc_feature (1565)..(1565): n is a, c, g, or t
  misc_feature (1571)..(1572): n is a, c, g, or t
  misc_feature (1575)..(1578): n is a, c, g, or t
  Probeset Number=SeqID_10990
catgttctcaatgctgtcgtgcntgagacagtntagaatntagntgtgcgccgtgagtgagaacgagangtcgtgangatntatgntataatatatatganagagtatatagtatatattacagtatacaaatcatatatgctgcagtttttattacgtgatatatgcagatntatttctaacantatgtcacagatataccacagatagagatactcaccgagtgagcatgtagtntaacgtagattatatcgcgtcacagagcgaagacactgtagcgcgtgtgtnngtatgaagatctntctngtctacattgcgtacggcgcacgtatgttgatgtgcntcacatgccgtgtgagtatagagacgagtactgccgcagagagatgtacatgtgttatcttcatatgctcgtccgcaggtgcaccgatattagttaatatgcatgagtgtatggagataatgantagactggagcaggacacatataatagtttgtatntataagagccgtacaacacgatgcacagtataatatacatatatattatattcacacacaatcagcacccacatgttatatatttttctctcgggtgagagaagtgngtgtatgtatangcgtcgcctcgttgttggtttggattgacacaacgacacgtctnttgtgtagcgctgcgcggttagtgtatgcagttatattatccaccgaccacacacatcttattgtgngttgtatgtagtgttagacgcggtattgagagctggtgtagtcgcgccgcgtatgttgtttgtatttttttcttacctgcaacgttattatttgtttttncttccatnttttttatttatnttctcacacacactatatatataaaattagttcttactcccactatataagactgtccttgtccaacatacatgagaaattatacacacagatgaaagcgtgatcaaccacaagagcgcgctgtggcatctagatgagtagatcgcgcccaacgcgatttgtattagcgcacagtatataaccacaggacgactgctagtatataacagccagcgagttattattcgccgcatgtactctagtgatgtatagaatgagagttagatagaaattataaattagagagaagaagcataagtaagtgtaatgacgccacattatttgttaattatatattatgtgattaatatttatttcttgttataattttccaagatatatataaccactaatctcaataattatatctcattataagcgtatnacaatatagataatataatactatctatattgcccgcggtgtgtngatgatacaccacatcattttatttctnctgcnatgagtatggttgaagagagagtgatagaaagaacaatttagtagtccttcccctcacgagggatggtattggtcgccggccagctccgcagcgtagattaaaaagatatggtcnaatattattcgggaagagattanngggagatgcgtcnggccgccncgtgtgntaaagagagaggaccaaagaaattngaacnnnnccngcgctcnccgccnnccnnnncacaaaaaaaaaaaccccacccagcccaacac

SEQ ID NO: 1212 - DNA, 687 bp, Glycine max
  Peptide Sequence Number=SeqID_8552
  Probeset Number=SeqID_10991
aagtcaagtttcgtttcgccctgctgataataagcccttcacttgttcgacgcctaagtttatcccaaaatgcctcgacgcagctccggtggtggttaccgcgctcgccccgcaccagcacgccctgcaccagcacgtgcacgcagcccgcctcctcctcaaactgtgaaacatgctcctcctccagcaacagctcagcctcagcgtagtgctattggctctaccatagctgatggtatgacttggggtgctgggaatgcaattggtcacagggttgtggatgctatcatgggaccaagaaccattaagcatgaaaccgttgtttctgaggctgcccctgcttcccctgttgccaacagcatggcctctgcttcttgtgacactcagtccaaggctttccaggaatgtgtcaacaattatggaagcgacatcagcaagtgccagttctacatggacatgctcacggaatgcaagaagaattcgggttccatgatggctgcttaagtgccatctactatcgttatctgcaataaataaaaaaaaagcgaaagtttatgaagaagagtttgttctctctggtgtctttgataaccagaagtttaaagtctagtagtttttcttattttgtaagatgtggtgatctcctatgttgacgaacctttctctatggaatagtaatcataagct

SEQ ID NO: 1213 - DNA, 1473 bp, Glycine max
  misc_feature (3)..(3): n is a, c, g, or t
  misc_feature (90)..(90): n is a, c, g, or t
  misc_feature (144)..(144): n is a, c, g, or t
  misc_feature (146)..(146): n is a, c, g, or t
  misc_feature (164)..(164): n is a, c, g, or t
  misc_feature (180)..(180): n is a, c, g, or t
  misc_feature (189)..(189): n is a, c, g, or t
  misc_feature (250)..(250): n is a, c, g, or t
  misc_feature (316)..(316): n is a, c, g, or t
  misc_feature (944)..(944): n is a, c, g, or t
  misc_feature (986)..(986): n is a, c, g, or t
  misc_feature (1087)..(1087): n is a, c, g, or t
  misc_feature (1089)..(1089): n is a, c, g, or t
  misc_feature (1109)..(1109): n is a, c, g, or t
  misc_feature (1130)..(1130): n is a, c, g, or t
  misc_feature (1141)..(1141): n is a, c, g, or t
  misc_feature (1224)..(1224): n is a, c, g, or t
  misc_feature (1257)..(1259): n is a, c, g, or t
  misc_feature (1261)..(1263): n is a, c, g, or t
  misc_feature (1372)..(1372): n is a, c, g, or t
  misc_feature (1395)..(1395): n is a, c, g, or t
  misc_feature (1408)..(1408): n is a, c, g, or t
  misc_feature (1456)..(1456): n is a, c, g, or t
  Peptide Sequence Number=SeqID_8553
  Probeset Number=SeqID_10992
ccnctaactcggcagtacggggtagtgcgtagctgtgtctgatgtcgtgagtgtatgtttccacgtttttcagtgctcgttgctcgatgnttgacagcaggggatgcgtgtatctgctgactctatgactcgtcgtaagaatgncnattgcgcatgatcacaanagtgaaatatgtaatngtagctctngctatgatacagtatattagtgatagctgaataatgaggtagtagacgagttgctctgagngtgaggaccgcgtgagggagagagatgatggagacaacgggagagacgacaatgctatctgcttgnggattgtcctacgtgtcactctcacggctgaggcatggactcgtcatccacatagtcacgacagagcagaaggcggacgacgagactacataatcatacccgtgaatggatacagtgtggcagtcactaaccactcgcctgcgtccacgtggactgcagacatgcagcgacttggcaatagtcgtagacacgacgtcttagtgtgaaaagtataacataaaatcaaatataaatcagaggaagagatgtgatattagtatatcatactaaattagtgtcgctgagtcatctgagataagaggcgggcgggcgagatctagtgtaccataccacattacactctaggtcgaacgcaactcactacacagaacggatacgtgcaattgactctgtcgctccccctccacggcactcgatctcccccctcctctggcgctactattcgttctgagtcagccagttgagttagcagacacacatagcactgagcagggagacggacatccactatcagaccaaaactacattccgaggtgctcctcacgctccccaccgagcgcgcccatccacccaaccctcgccgcgccgcgtggtgcagattgagtgtgagtgcggtagtgatgggtanaatagtagtctcgctcctctctctctctctgctcctatcgtnacacagtctgccactactgaagtaaatctgagcagtcatagactttcttgttcctatgctttatatattatatcgactgtgattgccgtgtcgtgcggctntnctggctgctcatcccccgcncagtaaagagcgataatgagngtgcggcggcngttgagacggtatgagactgatctcatagtagcttagatgtgggtcgttctatttcccgagttctttgcgcggggcagaacangcgtagtcatctagcgctccatcttcatatacnnngnnntcatacataaccctgagcaacaggaaacatacaacaataatatttatatatatctaactcaagcgtaccttactttctgcataagtttataatcatcctcaagttactngactccgtctccgttagattatnagaagagggggangaggggaaacagcggaaacaggagaagaggcacacacacaacaccacnggggcgcaccaccacac

SEQ ID NO: 1214 - DNA, 738 bp, Glycine max
  misc_feature (18)..(19): n is a, c, g, or t
  misc_feature (23)..(23): n is a, c, g, or t
  misc_feature (25)..(26): n is a, c, g, or t
  misc_feature (31)..(32): n is a, c, g, or t
  misc_feature (37)..(38): n is a, c, g, or t
  misc_feature (42)..(42): n is a, c, g, or t
  misc_feature (47)..(48): n is a, c, g, or t
  misc_feature (65)..(65): n is a, c, g, or t
  misc_feature (77)..(77): n is a, c, g, or t
  misc_feature (79)..(80): n is a, c, g, or t
  misc_feature (88)..(88): n is a, c, g, or t
  misc_feature (90)..(91): n is a, c, g, or t
  misc_feature (127)..(127): n is a, c, g, or t
  misc_feature (131)..(132): n is a, c, g, or t
  misc_feature (140)..(140): n is a, c, g, or t
  misc_feature (142)..(142): n is a, c, g, or t
  misc_feature (149)..(149): n is a, c, g, or t
  misc_feature (151)..(151): n is a, c, g, or t
  misc_feature (153)..(153): n is a, c, g, or t
  misc_feature (155)..(155): n is a, c, g, or t
  misc_feature (160)..(160): n is a, c, g, or t
  misc_feature (162)..(162): n is a, c, g, or t
  misc_feature (166)..(166): n is a, c, g, or t
  misc_feature (184)..(184): n is a, c, g, or t
  misc_feature (201)..(201): n is a, c, g, or t
  misc_feature (206)..(206): n is a, c, g, or t
  misc_feature (211)..(211): n is a, c, g, or t
  misc_feature (217)..(217): n is a, c, g, or t
  misc_feature (222)..(222): n is a, c, g, or t
  misc_feature (230)..(230): n is a, c, g, or t
  misc_feature (242)..(242): n is a, c, g, or t
  misc_feature (293)..(293): n is a, c, g, or t
  misc_feature (432)..(433): n is a, c, g, or t
  Probeset Number=SeqID_10993
aagcccctggagccctcnncacncnngcggnntggcnnggcnccgcnntgctagaaacctatgtngtgtattctccncnncgggcctngnncaggaaaatatcaggcgagccgaaggggaccctttntatnnactacttntngccacantntntncatcngngatnatacattctaaccacctngatgcatacagcttgangcctnctgcnattgcnctacntactatangatacgtcgttntcgcagccgccgtcatcttctgctttctgtgtactgcaccgaccgaaagtnatagtccccaacgcccgcatgtatgaaagggtgaatcacatgcctgcctgtcggaagggtgtgccaggggcagcccgtgtgaagccttctcttcctggagaaagaaaggttacttggttaccattatgggtgacgaatnntctcgcaccatttgagaacacggatgggaacacccaccgagaccctgttgccaacccccacgatgatgaggaaaccaggctataacgcttcaggttttgctgccgcctctacaccaggagaagcgaagcttggtgtcgtgtcgccattgatcgaaggcatgccgcttccggtgttggtagaggtgtctcactggctggcggtggatgaggcttatggggtcgtgcgtctgaggctgatatttcaaggcagagtgatgttgaaggctggggccatcagaattgcgcactacggattctatgttaag

SEQ ID NO: 1215 - DNA, 626 bp, Glycine max
  misc_feature (487)..(487): n is a, c, g, or t
  misc_feature (626)..(626): n is a, c, g, or t
  Peptide Sequence Number=SeqID_9334
  Probeset Number=SeqID_10994
atagtgttgtcgtttcgagcaaaagaaatgaatgacaaatagaccaccgcaagggcagagaaacaaaaacaaacaaaacgcagcacttggttgtgtttgagttgagcttgcgcaaaacccctaaaccctgtgaatgaagaagagtggcgaagaaaatgggggcaagttcaagctcaagggtgcggataggtcagcgtacttcgcacgcagagaggcagccaaggtcttgaaagtggttctcgaaggagacgctaagcgccgcgctcttgcctccatcaaatccctcatctatcaaccttccgttagaaacaagaaagccacattcgctctcatttgtcaaaccctaaaacatcttcccattatcaattatgtcttggaagctgcttctattctcaacagcaagtggaagaggcaacgagaattgatttatatcattgtctatgatattcttttcggccaggcggttccacacaacataggagtgaangaatggcggatgtgctaccaagatgccctgcgttctactctggaagagacttagttgcagagggttgtcaagacagttaaacagttgattgctctgcatcaagttcctgatgtttctgtacctcgatatgttcgtgtgn

SEQ ID NO: 1216 - DNA, 1534 bp, Glycine max
  misc_feature (22)..(22): n is a, c, g, or t
  misc_feature (28)..(29): n is a, c, g, or t
  misc_feature (31)..(32): n is a, c, g, or t
  misc_feature (38)..(39): n is a, c, g, or t
  misc_feature (43)..(43): n is a, c, g, or t
  misc_feature (57)..(59): n is a, c, g, or t
  misc_feature (70)..(71): n is a, c, g, or t
  misc_feature (80)..(80): n is a, c, g, or t
  misc_feature (82)..(84): n is a, c, g, or t
  misc_feature (87)..(89): n is a, c, g, or t
  misc_feature (91)..(92): n is a, c, g, or t
  misc_feature (94)..(94): n is a, c, g, or t
  misc_feature (101)..(102): n is a, c, g, or t
  misc_feature (147)..(147): n is a, c, g, or t
  misc_feature (205)..(205): n is a, c, g, or t
  misc_feature (209)..(209): n is a, c, g, or t
  misc_feature (235)..(236): n is a, c, g, or t
  misc_feature (241)..(241): n is a, c, g, or t
  misc_feature (245)..(245): n is a, c, g, or t
  misc_feature (264)..(264): n is a, c, g, or t
  misc_feature (268)..(268): n is a, c, g, or t
  misc_feature (280)..(280): n is a, c, g, or t
  misc_feature (338)..(338): n is a, c, g, or t
  misc_feature (354)..(354): n is a, c, g, or t
  misc_feature (415)..(415): n is a, c, g, or t
  misc_feature (480)..(480): n is a, c, g, or t
  misc_feature (513)..(513): n is a, c, g, or t
  misc_feature (541)..(541): n is a, c, g, or t
  misc_feature (562)..(562): n is a, c, g, or t
  misc_feature (572)..(572): n is a, c, g, or t
  misc_feature (613)..(613): n is a, c, g, or t
  misc_feature (677)..(677): n is a, c, g, or t
  misc_feature (923)..(923): n is a, c, g, or t
  misc_feature (926)..(926): n is a, c, g, or t
  misc_feature (928)..(928): n is a, c, g, or t
  misc_feature (932)..(935): n is a, c, g, or t
  misc_feature (938)..(938): n is a, c, g, or t
  misc_feature (942)..(942): n is a, c, g, or t
  misc_feature (947)..(947): n is a, c, g, or t
  misc_feature (951)..(952): n is a, c, g, or t
  misc_feature (1096)..(1096): n is a, c, g, or t
  misc_feature (1227)..(1227): n is a, c, g, or t
  misc_feature (1393)..(1393): n is a, c, g, or t
  misc_feature (1484)..(1484): n is a, c, g, or t
  misc_feature (1534)..(1534): n is a, c, g, or t
  Peptide Sequence Number=SeqID_9335
  Probeset Number=SeqID_10995
taggggggaggtggtgatggtnctgccnncnncccccnncccntgcgggcgcgtccnnngttcgcacctnnttacagctntnnntannncnncntacttanntttatccctccttcctatatgttctcccccaccccacacgcacantgtcgacccagccgatgctcctctactctacaagagtagagtacaaccacacataaanatangaggttatacataccgcaccactccnncaccncaanacacacccgcagagcgaanggtncacgacgatacnttgtgaccaggaagaccgctcggctcctctctacagtgtatatgaatgctttatttcntttattgtctggcctnaccgcgattagaaggtgagttgttgagatgctgctcataccggcaccgcaacattctaggncacctgtacccaccaccacgataataaccatcatgttctagatagttagcacaaaaaacgacaanccactatattctcacatcctcgctcctccgagncagcggagcatggcatatatactcactnatggacattatccaaagaagnaaatacgcangacgcgatatgtctggctacgatgacaatccgataagacantacacatcttcactgcactgcgcactactcaccccctccatatattgtagaagtctagctactncgcgggctctgggctgacatatataggatgcgcctacagctatgtgtgagtcttatgaagtattgctgtatctcggagtttctaaattgaaataatgaatgataattatgtagagatgataaaggagaagtcaagacttgcgtagcgccgtgctggcgatgtcactctcacccgcggcgcggactggccggcctatctctatctgtcagatataaatttaattgaatgtgggagaccacaccaggntananaaannnnaanaaanacaanacannacaatacaacaaatattcctacacacttattaatgaaaatcacaccccaccccatgcatcacaaggccgtgaccgcactaacaccgcccctccacccctgcgcgtgcaccgaccacgctcccacccccgatccacccatatcanagaaagtaaataaattgaaccaaaataaaagatcaggtcccgtgcgcgggacagcgatgagtcggcgcgatgcgtatcgtgaagtgtgcagatgatatgatatagacatccacgaagacgtgccacagtcnataaaagatcacaagccatgagcgtctcctcgccaatgatgagtaacgtggcgtaatctaggtcatctcatgacgcctgctcaaatgcaccgtgacttctgtttgcatctctccgcatctctgcgcgagtgactgtgtgcttggacgatgccgtgagtggcgtccnaacgatctggtatagatggccatcttatgcgcgactcgtcatctcgctcgtggctatcgtccactcattacatccctgtcgcctagtcagntctcactgtcccgtatcacgaccccacccgcccgacactcatgctcgtcn

SEQ ID NO: 1217 - DNA, 459 bp, Glycine max
  Probeset Number=SeqID_10996
acgcggatcttgcgcctttctatctcaatcatctttctctttgacaacaacacagagatagagccaatcacaaatccttcctcctgattttggtggcgttgaggagacatcatcacaatgtcaagcgtagaggatgcgaaagagcaagggaacctcaccaatgaagctgaaaagtcaatgccatcatcacagcaagaggaggctgctgtcaagagcaagtatggaggtctcatgccaaagaaaccacctctcatttccaaggatcatgaacgagcatactttgactcagctgattgggctcttggaaagcaaggtgttgcgaagccaaagggacccttagaagctcttcgtcccaagttacagccaacgcagcagcagacgcgttacaggaagtctccatgtgctccatccggtgaagatggaggggctgctcagggagaatgagtttccgacaacgag

SEQ ID NO: 1218 - DNA, 1612 bp, Glycine max
  misc_feature (20)..(20): n is a, c, g, or t
  misc_feature (63)..(63): n is a, c, g, or t
  misc_feature (101)..(101): n is a, c, g, or t
  misc_feature (204)..(204): n is a, c, g, or t
  misc_feature (206)..(206): n is a, c, g, or t
  misc_feature (264)..(265): n is a, c, g, or t
  misc_feature (293)..(293): n is a, c, g, or t
  misc_feature (296)..(296): n is a, c, g, or t
  misc_feature (366)..(366): n is a, c, g, or t
  misc_feature (383)..(383): n is a, c, g, or t
  misc_feature (409)..(409): n is a, c, g, or t
  misc_feature (535)..(535): n is a, c, g, or t
  misc_feature (543)..(543): n is a, c, g, or t
  misc_feature (561)..(561): n is a, c, g, or t
  misc_feature (808)..(808): n is a, c, g, or t
  misc_feature (911)..(911): n is a, c, g, or t
  misc_feature (929)..(929): n is a, c, g, or t
  misc_feature (1207)..(1207): n is a, c, g, or t
  misc_feature (1454)..(1454): n is a, c, g, or t
  Peptide Sequence Number=SeqID_9336
  Probeset Number=SeqID_10997
cagtgatgagcgcgatatgngtcagtcccgtagctagtgctagatgatagttcggcgacgagntgcacgtatgtattcgagacagatcgtcatatttgatnataagatctgtggtgtatatatctatgtatgagagcgagttagcagcagagtagtatgatcgattgatagcatgataatagatcaaagagtcatgagtaatgnangcggaaagatgaatatcagagatagatacaaacgcgagacgagatgaagagagacgcnncgtagatatgtgcgagtgaagatggtgntgngacatataacgtaggtgtcttatcagcgttagtggtcgaacgatacgaagagttagatacacgagatgtnaacgaatgtgcatggcntgacgtagttataatagtcagagtancgtgtctctatatagcacgcgtcatcacataacacgcgctgagcagcacatgataataggcacatgatacaacagagtagactcagactcgtgtgacaatagtagttagtgtgagagatgatgagngtaggcantatagactagtgcagagncgatgtcgcgtgatccatatgtctcaatacaagagattatagtagactgtcacgagaggagcggggtagagacgtcatcgcgtcctgagtcacataatgtgtcagtatagtgcgatgagtctgaatatggtgcgcgcaagcatcatatctacatgtcgtgtaagctgtatcatattaaatgtagatagacttcaatgtataagtggtgatatcaagctaccactgatgagataagattatgtagtangaagcagatgattgcggtcggcatatggatgatacaagctatatgatctaatcaaatgactgaaacgcggaatcgtgcacgacggagaagtatatggaattcnaactgcgatacaaattangaaagatactgagaggtcatacgagcgtgagcgacagagaactatgtatctatgccgttgagtcgatgatatatggtagcggcgagaagctcgtcgtcgctgctagacattcgtcgtgggttcgatggtggtctgcggcgggttagaatgtaattagtaggtatactgggcggcgatggagtgttatataaataaatgttgcagagaaggataggcgcaggtagtaagaagagtagtaaatgtaatagtagatgttaataaattctcgccactccgcncatggttcacccagagtctgtctcatgctacaccgcccgggtgagaaagacgacgcaaagagaggagcggagtgatttgtgggtgcaccaaaagtaaggcctttatgtcactctctagttcctctttataatcacctattgtttagcccgttttctcgaaatatcttagaagaatgtggggggggaagatagacccggttgattagctccaaaattatagcgagaagaaagggcggtggctcgttantaaaaggaagggaaagataaaagaaataaaggcaacaaaataataaagaagagaagagagaagaagcagaaacaacaacacgatactacagtcagacactaccgaaaagcggcataaagaaatatcacaaaataacactcagaaagatgagtcgcgcg

SEQ ID NO: 1219 - DNA, 502 bp, Glycine max
  Probeset Number=SeqID_10998
caagacttgtctcactctttagtcttttctctttgtaaagtaaagtaaacaagtttctgaaatagcatacttgttgatatattatgaaatgtactgaaaaggggtggatggtttaggcccattttggactgacatgcttggatataggaagtacatcatagagaaaccaaacaaggttctgttcttgatgtatgaggacctcaaaggggacatcaattttcacctgaaaagggtagctgagttcttgggttgtcctttcaccttggaggaagaaaatagaggtgtgattgagaacataatcaagttgtgtagctttcagaaaatgaaggaattagaggtaaataagtctggtacatttggcaggaactttgaaaataagtttttgttcacgaagggtgaaataggggattgggttaattatctttcgccttcgatggcgcagaaattaaccaaagtcatggaagacaagttaggtgggtctggtttgacatttagaatgaac

SEQ ID NO: 1220 - DNA, 409 bp, Glycine max
  misc_feature (15)..(15): n is a, c, g, or t
  misc_feature (32)..(33): n is a, c, g, or t
  misc_feature (59)..(60): n is a, c, g, or t
  misc_feature (84)..(84): n is a, c, g, or t
  misc_feature (107)..(107): n is a, c, g, or t
  misc_feature (112)..(113): n is a, c, g, or t
  misc_feature (156)..(156): n is a, c, g, or t
  misc_feature (178)..(179): n is a, c, g, or t
  misc_feature (249)..(249): n is a, c, g, or t
  misc_feature (263)..(265): n is a, c, g, or t
  misc_feature (282)..(283): n is a, c, g, or t
  misc_feature (323)..(323): n is a, c, g, or t
  Peptide Sequence Number=SeqID_9337
  Probeset Number=SeqID_10999
gcgcggagtggtggnctatggttcacatttgnngcttgggagaaccctgttgacgaacnncagtgctgcctccgtgccttcaangggcgctggttgtagcttgaagnctgcnnggtgtgtctttgcaccactttcttagagctgaagcttctcaancctcaacagtttatgtcgccanncttgcccttcagcgttcgttgtggcgttggtggcaaagtcctccctccttccttggtttaccaccttgtnctccctcttaaacnnncagtgaaagggatttgnnaggaaaatattggtcacaaattcgactatgagaaggatgntgcgagccacagctatgctgctctttctgtcctgattaggaacctggcgtgttgtttgtgtttgcttattatttttgaaaaaccaa

SEQ ID NO: 1221 - DNA, 440 bp, Glycine max
  Probeset Number=SeqID_11000
ttttgtctttctcaatcaccgctggtttagacttgataataacaatgtcaactacgtcgttgcagaaaaaggtcggacaagaggaggcccctactttccacagaatcagaatcacattgacttcccgtaatgtgaagaacctcgagaaggtgtgcgctgacctcgttgatggagccaaggtccaaaaactcaaggtccgtggacccgtccgtctccccaamcaagcacctcagaatcaccaccagaaagaccccttgtggtgagggtagcaagacctgggacagattcgagatgcgcatccacaagcgcctcatcgatttgtactcccctgctgagaccgtgaagcaaatcactgccatcgccatcgaacccggagtcgaggtcgaggttgccattgccaagctcaagtctgagtccaaataaagacacactttctcttg

SEQ ID NO: 1222 - DNA, 298 bp, Glycine max
  Peptide Sequence Number=SeqID_9338
  Probeset Number=SeqID_11001
atcttccaactgcgttaaatgctggcctatggacaaggatatcgataggtttcttgtgaggaacattgttgaacaggctgcagtctaagatgtgcacgaggtttgtgtctacgatcaatacacgcttcctaaggtgtatgtgaatatgcactattgtgtttcctgtgctatccactctcatgatatgagggttcgatcccctactgataggataaagcgtgagcctccacatcgattcatcacgggcaaggatgatgcaccaacgcctgctcatcctgtacaagctccacgtcctgct

SEQ ID NO: 1223 - DNA, 289 bp, Glycine max
  Peptide Sequence Number=SeqID_9339
  Probeset Number=SeqID_11002
gagaatgttcctcggcgtattcggacgccacgctggcgtgccccaggtgccgccttgtgtccaccgtcggaagggcgcatcaagcgccgtggaataactacgaggggctcgcgcccctccaatccggcggtgccgccgacaacggcgggagtggagggcggtcgaattgtgattgcgactacaccgacaacgaggaggacggggacggtggaagagatgatgaggaggatggggacaactagaaggcgtcgggggaaattccagcatatcgcacatcgacagagcttcc

SEQ ID NO: 1224 - DNA, 2100 bp, Glycine max
  misc_feature (40)..(41): n is a, c, g, or t
  misc_feature (57)..(57): n is a, c, g, or t
  misc_feature (86)..(86): n is a, c, g, or t
  misc_feature (90)..(91): n is a, c, g, or t
  misc_feature (138)..(138): n is a, c, g, or t
  misc_feature (184)..(184): n is a, c, g, or t
  misc_feature (191)..(192): n is a, c, g, or t
  misc_feature (225)..(225): n is a, c, g, or t
  misc_feature (251)..(251): n is a, c, g, or t
  misc_feature (371)..(371): n is a, c, g, or t
  misc_feature (381)..(381): n is a, c, g, or t
  misc_feature (385)..(385): n is a, c, g, or t
  misc_feature (387)..(387): n is a, c, g, or t
  misc_feature (390)..(390): n is a, c, g, or t
  misc_feature (392)..(392): n is a, c, g, or t
  misc_feature (396)..(396): n is a, c, g, or t
  misc_feature (400)..(400): n is a, c, g, or t
  misc_feature (402)..(402): n is a, c, g, or t
  misc_feature (405)..(405): n is a, c, g, or t
  misc_feature (430)..(430): n is a, c, g, or t
  misc_feature (440)..(440): n is a, c, g, or t
  misc_feature (458)..(458): n is a, c, g, or t
  misc_feature (460)..(460): n is a, c, g, or t
  misc_feature (477)..(477): n is a, c, g, or t
  misc_feature (556)..(556): n is a, c, g, or t
  misc_feature (558)..(558): n is a, c, g, or t
  misc_feature (608)..(608): n is a, c, g, or t
  misc_feature (708)..(708): n is a, c, g, or t
  misc_feature (809)..(809): n is a, c, g, or t
  misc_feature (853)..(853): n is a, c, g, or t
  misc_feature (965)..(965): n is a, c, g, or t
  misc_feature (979)..(979): n is a, c, g, or t
  misc_feature (1030)..(1030): n is a, c, g, or t
  misc_feature (1070)..(1070): n is a, c, g, or t
  misc_feature (1073)..(1073): n is a, c, g, or t
  misc_feature (1113)..(1113): n is a, c, g, or t
  misc_feature (1134)..(1134): n is a, c, g, or t
  misc_feature (1171)..(1171): n is a, c, g, or t
  misc_feature (1295)..(1295): n is a, c, g, or t
  misc_feature (1306)..(1306): n is a, c, g, or t
  misc_feature (1359)..(1359): n is a, c, g, or t
  misc_feature (1371)..(1371): n is a, c, g, or t
  misc_feature (1452)..(1452): n is a, c, g, or t
  misc_feature (1473)..(1473): n is a, c, g, or t
  misc_feature (1477)..(1477): n is a, c, g, or t
  misc_feature (1485)..(1485): n is a, c, g, or t
  misc_feature (1606)..(1606): n is a, c, g, or t
  misc_feature (1623)..(1623): n is a, c, g, or t
  misc_feature (1679)..(1679): n is a, c, g, or t
  misc_feature (1752)..(1752): n is a, c, g, or t
  misc_feature (1779)..(1779): n is a, c, g, or t
  misc_feature (1803)..(1804): n is a, c, g, or t
  misc_feature (1833)..(1833): n is a, c, g, or t
  misc_feature (1836)..(1836): n is a, c, g, or t
  misc_feature (1839)..(1839): n is a, c, g, or t
  misc_feature (1845)..(1845): n is a, c, g, or t
  misc_feature (1854)..(1854): n is a, c, g, or t
  misc_feature (1870)..(1870): n is a, c, g, or t
  misc_feature (1890)..(1890): n is a, c, g, or t
  misc_feature (1912)..(1912): n is a, c, g, or t
  misc_feature (1919)..(1919): n is a, c, g, or t
  misc_feature (1933)..(1933): n is a, c, g, or t
  misc_feature (1935)..(1935): n is a, c, g, or t
  misc_feature (1938)..(1938): n is a, c, g, or t
  misc_feature (1953)..(1953): n is a, c, g, or t
  misc_feature (1982)..(1982): n is a, c, g, or t
  misc_feature (1985)..(1985): n is a, c, g, or t
  misc_feature (2013)..(2013): n is a, c, g, or t
  misc_feature (2021)..(2021): n is a, c, g, or t
  misc_feature (2044)..(2044): n is a, c, g, or t
  misc_feature (2083)..(2083): n is a, c, g, or t
  misc_feature (2086)..(2086): n is a, c, g, or t
  misc_feature (2089)..(2089): n is a, c, g, or t
  misc_feature (2100)..(2100): n is a, c, g, or t
  Probeset Number=SeqID_11003
acctcggtgggtagtgggagcgtgaatggagaggataggnncttggtcgttgtgtgngttattattcttgtggttatttttttttntttnnttatcgaaatatgtggggcagagaagaagagatacgataccgctggnaatgagattatgcttccagcgttcggtagtcggttcttctgctcgncgcgtanncgtcgacactacttttatcactactaccacacntgcacattattactgcacaaaacaanacgacccatatcctactctctcacacatttactcatcactacatattcttcattgttactcttctttgtgtcttcgcgctcgcctgagtatagtgctgtggtgtgatgtggaggacgcgnagaagatgtnaatngngananatgntggntnggnactgcgcccgtcgcgacgagacgcnagcccgcgangtgcgacacgagaatcananactactctgacactctncgacatcatgagaaatactatatacatggtagattctttacataatgtatatgtatgtttatatttgtgtgtagtggtntnttgatggtctctcttctctgtgctgctcgttgcggtctgtatgcattctnatataaataattatgatttgttgaacgttgggttgacaacaatctatatgtgctctcgtgattctatgtgtcgcgctggtctcttacggtcggctgtatngcggagagtgaatacgctaataacatattcatatagtagagctatagcattatatatttttagtactgatggtattattacgactcacagctgcactcatnatcgtatcctctactctcttacatctgactcgtcattatctctnacttctctcgaatacgtattcttgctagtatgtagtatgctataatatgtattagatataatgtgagacgttctaggagtataggctgatcatagcatctagatacacatgnctctgacgacgctngtctctgtatgtcatgaacatatgatcagatgcgcgtggacgtgctaccantagcgcataacgatgtgttgggtatacatcacagttacanctnatacacgagatacgtagtacgtgacagcagcgaacgacanagcatgacttctatgacgacncagtctaacactcgtgagagcgcgagaagtatgatgntagatgttgtgagtgtgaccgacgaatgtcgagcggacacgacgcgtgtcgatactgtgtgtgatgtgatgattgtgtcgtgtatcgatcgttatacttatctgagttagtgtgtgctgtcttnatcgtatgttngttgctctagtatgtcagtacagtctctcctctctttcactatatctctgtantcgtgtgtcganagtgacagactgcgcactagattctactaatatagctaactagcatacgatctcgaacaacatgcagttgaagatgtgacntatcgtagtatatacataagnagancacagtgntgaggaagtgtgaggagagcgtacagatgtaggagtgacgtcacaaagcgtgtagacatagcaacatatctactgaatgtagtagtaacagggactatggagtgagagagtcaagagcgcngccgtcgcagacccgcnagcaacattgcgcgagcagtagtgcgtgatctgctcgcaatgtatcgtgtgtgatnaagtgagacggtatgagatgacgtgcacgctcaagtgcagtgtgctgtgatgctagtggatgcgagtccgtgncacgacataggagctgcactgcagaanacgtagatatctacgaccatactnncgttactactgtatgtacgatgatacacnacngancaccangacatcttntactactctactcacngtctttacttgtgtatatcngtaagtatttctactgaatgtntatcatnatgatagtcgtatnanganatagatgatcgatgncagtgtggcgtcgcgctgcgtgttgctgngtnctgttcgtcgttgatcgcgtgatgcgcngcgcgacngctgctcggagtggactacggtncttcaggcggttctactaaatcatgctactatatgctgntanganatcatcatgan

SEQ ID NO: 1225 - DNA, 2019 bp, Glycine max
  Peptide Sequence Number=SeqID_9340
  Probeset Number=SeqID_11004
gtcgcaaagaaaaagaagagagtgatcacaatgcagagaagcgtattgttactcgtggtgttgttctttgcagcgtttgccttcgctgatgaggagaaaaaagtgcccactaatgtgattggtattgatcttggtaccacttacagttgtgttggaattttcaagaagggaaaggtcgaaattattgccaatgaccaaggtaacagagttaccccctcatgggtcgctttcactgagaatgagcgtttgattggagaggctgccaagaatcaggctaccgttaaccctgagaacactgtttttgatgttaagcgtcttattggaagaaacttcaatgatgctgaggttcagcgtgacatgaagttgatgccctacaagattgtcaacaagggaggaaagccctacgtccaagtcaaggtcaagggagaggacaaggtctactcccccgaagaggtctcagccatgatcctcaccaagatgaaggagactgccgaaggacacattggaaagaaggtcgagtacgctgtggttacttgccctgcctatttcaatgatgcccaacgtcaagccaccaaggatgctggaaccattgccggattggatgtcctccgtatcatcaatgagcccactgccgctgccattgcctatggtcttggcgatatgggaaatgagaagaacattctcgtcttcgatcttggaggtggtacattcgatgtgtccattcttaccattgagaagggagttttcgaggttatctccaccaacggagatacccatcttggaggtgaggactttgatcaacgtgttatggactacttcctcaagctctggcaaaagaagactggcaaggatgcctccaaggacaagcgtgccatccaaaagctcagaaaggaggttgagcaagccaagagaattctctccacctctcatcaaacttcaattgagattgagaacttccatgacggacaagacttgacccaaacccttaccagagccaagttcgaggagctcaacgccgatttgttcaagaagactttaacccccgttcagaaggctttggatgatgccaagctcaagaaacacgaaattcaagaggtcgttttagttggaggatccacccgtatccccaaggtccagcaattgttgaaggacttcttcaatggcaaagagcccaacaagggagttaaccccgatgaggctgttgcctatggagctgccgtgcaaggaggtatcctctccaaggaggatgatgttggtgatgtcgtcttattggatatcaccccccttaccctcggtatcgaaaccgtcggtggagtcatgactgccctcatcacccgtaactctttcatccccaccaagaagtctcaagtcttctctacctaccaagacaaccaagatcgtgtgttgatccaagtgttcgaaggagagcgttccatgaccaaggacaacagattgttgggcaagttcgagctctctggaatcccccctgcagctagaggagtaccccaaattgaggtctcattcgagctcgatgtcaatggtatcctccacgtctccgctgaggacaaggccagtggagccaaggagtccatcaccatcaccaacgacaagggtygtctctctgaggatgagatcaaacgtatggttgaggaggccgaggctgcagctgaggatgmcaagaaggccaaggagagaktcgaggccagaaactcactcgagaactatgtctaccaagtccgtaacaccatcaatgacaacgagaagttgggagacaagatytcagaggaggacaaggagaccattgagagcaccatcaaggacgccatcgagtggttagagcagaacagcatgggaragaaggaggagtttgatgacaaatacaaggaagttgagaagattgtccaacccatyttcgccaagttgtacggaggagcccaagcccaccacggagcccctggagctgatgaggagatgcccgaccacgacgagttgtaaattaatagtttccacaaaagagag

SEQ ID NO: 1226 - DNA, 1732 bp, Glycine max
  misc_feature (1)..(1): n is a, c, g, or t
  misc_feature (153)..(153): n is a, c, g, or t
  misc_feature (330)..(330): n is a, c, g, or t
  misc_feature (425)..(425): n is a, c, g, or t
  misc_feature (470)..(470): n is a, c, g, or t
  misc_feature (476)..(476): n is a, c, g, or t
  misc_feature (490)..(490): n is a, c, g, or t
  misc_feature (539)..(539): n is a, c, g, or t
  misc_feature (543)..(543): n is a, c, g, or t
  misc_feature (554)..(554): n is a, c, g, or t
  misc_feature (586)..(586): n is a, c, g, or t
  misc_feature (647)..(647): n is a, c, g, or t
  misc_feature (718)..(718): n is a, c, g, or t
  misc_feature (789)..(789): n is a, c, g, or t
  misc_feature (855)..(855): n is a, c, g, or t
  misc_feature (998)..(998): n is a, c, g, or t
  misc_feature (1247)..(1247): n is a, c, g, or t
  misc_feature (1270)..(1270): n is a, c, g, or t
  misc_feature (1324)..(1324): n is a, c, g, or t
  misc_feature (1334)..(1334): n is a, c, g, or t
  misc_feature (1363)..(1363): n is a, c, g, or t
  misc_feature (1394)..(1394): n is a, c, g, or t
  misc_feature (1398)..(1399): n is a, c, g, or t
  misc_feature (1405)..(1405): n is a, c, g, or t
  misc_feature (1450)..(1450): n is a, c, g, or t
  misc_feature (1491)..(1491): n is a, c, g, or t
  misc_feature (1497)..(1498): n is a, c, g, or t
  misc_feature (1517)..(1517): n is a, c, g, or t
  misc_feature (1521)..(1521): n is a, c, g, or t
  misc_feature (1543)..(1543): n is a, c, g, or t
  misc_feature (1567)..(1567): n is a, c, g, or t
  misc_feature (1571)..(1573): n is a, c, g, or t
  misc_feature (1576)..(1578): n is a, c, g, or t
  misc_feature (1614)..(1616): n is a, c, g, or t
  misc_feature (1641)..(1641): n is a, c, g, or t
  misc_feature (1645)..(1645): n is a, c, g, or t
  misc_feature (1647)..(1648): n is a, c, g, or t
  misc_feature (1650)..(1650): n is a, c, g, or t
  misc_feature (1659)..(1660): n is a, c, g, or t
  misc_feature (1670)..(1670): n is a, c, g, or t
  misc_feature (1673)..(1673): n is a, c, g, or t
  misc_feature (1690)..(1694): n is a, c, g, or t
  misc_feature (1699)..(1705): n is a, c, g, or t
  misc_feature (1710)..(1717): n is a, c, g, or t
  misc_feature (1722)..(1732): n is a, c, g, or t
  Peptide Sequence Number=SeqID_9341
  Probeset Number=SeqID_11005
ncagtaattcgccagattacagactaagtcggatacctactataatttctcgtctattctatcatctacgtacttccacacgagatatgctcgagtctcatacacttcatacgatatacagtaggtgcgtcatgccgacaagcagacttcacncatctatctatctacagtcaacacaagcatacaacagagtataactatatctcatagaaatcacattatcatatcacactcatatctcgctgtataatcgacgtgtgtgtgtcgttgagagcactccactcacgcatcatcactcagtactacatcacttgtcatgcagacgatcgnttcgaaatagtctaacatacttctacgtatcgatcaaggatgagacgatataatgacacacgcacatacataccatatactcataccacgcaacncaatagcgcattacgcgtacagagcagacagtaatggcgacgcgngataanctcatctcaaatantacatggcgaacatatgagatatatactcgcaaggacgtaatcactagnagtncataacgtcanatatgcagtacgcgcaagatgatgactactgntttgacgttatagatagcaggcacatacgcgtaagtcaattgttcactcactatccaactngctcacacacatatccatcatctcgtcattatcatgtatactgtctattactatcgatgtatgcatgatantcatgacgacgaggtacataatgatgttagatggtggagtgtgtgacattctgtatcttacaactcaatcngacattcacaaatacagaacagcactcatatacatacataacaaacatggacagaacacatataangatagataatgactgtcaatatgataattaacagtagattatcagcgtaagtaaacctatcacaataccagtatgtagtgtgtgcgtgtgtgtgatatatatagcatagaacgaagaacattactcatatcagtcgaccgtgntcctatacacctctctacttcttctctctttaatatacatctcatacgctgacgacctaagcgatatcaattcctcttattcctctctccttctctccctcagaatacacatatattgtgaatgacttagtatgtgtagtatatataaattgaattattataatgtacgtggtgtaaatatcagtatacacatgaacgtaagctgaaagaagatagtaatatagttatctgtgtgtgtgtcgtagacantattgatatatgagtactataancatatagatttatgtagtatcttgcatctatctgtttagagttagtccgtgcgngggtggtcgngaagatggagcgtggcagaaaggagtagnaagataggtgagtatagagcatggagtgtgntaanngtcganaagtcaattatattactacttcgatatatcggcgatgctatgatngtgtgctcgtcgtcgcggtgtgatcgtgcctgtcccgccanccgcgnncggcatcacttctctcctncacntgtatcttactctcgtgctacnggtattgtgtttctgttattgtgncgtnnnccnnnccctgcgccatcgtgctcacatatacagttctcgtnnnccagcagtacacatatatacaacanctanannanaaattagtnnaattatattnatngcaatacaagtaccggnnnnnaaaannnnnnnggggnnnnnnnnaaaannnnnnnnnnn

SEQ ID NO: 1227 - DNA, 455 bp, Glycine max
  Probeset Number=SeqID_11006
atgtctcactttgtttgaaactaggaaggtcggaggaagcacctgaaagattggaggaagctaagaatctcgcagaaaagctctgcagtggtcctctttcacaggctgcaaatctgtggaacttgagagcttctatagagataaagtcacttgctactgctaccggcagtgcttcctttagtgaggagaatctaagttctctgtttgatttatttaatattgtacttccgaagttatccataaccaaggccgagggactctggcatacggcgatgaaattgttttctcatgaaaagatatatttcgaaaagctggtgaaatgtgcaatgctatcattaagttcagctggtgggagtgattgtggagcttcagtctcttcagcttttgtcggatgggttttgcagaaagatggtattaagcaagctaggaaaatgtataagagatttttggcttta

SEQ ID NO: 1228 - DNA, 1368 bp, Glycine max
  misc_feature (1)..(1): n is a, c, g, or t
  misc_feature (61)..(61): n is a, c, g, or t
  misc_feature (87)..(87): n is a, c, g, or t
  misc_feature (171)..(171): n is a, c, g, or t
  misc_feature (267)..(267): n is a, c, g, or t
  misc_feature (417)..(417): n is a, c, g, or t
  misc_feature (522)..(522): n is a, c, g, or t
  misc_feature (812)..(812): n is a, c, g, or t
  misc_feature (1318)..(1318): n is a, c, g, or t
  Peptide Sequence Number=SeqID_9428
  Probeset Number=SeqID_11007
ngtcatatgtttctggctcgaagagtgtccgtgcgcagaagtcgtgctgctgtgtggtatncagacgcatcaggtctcaggagtgcngaggcacgccgatgttatatcctccgtcataactattctatgctgtgacgtgattacgtcgtggatgtagacttaagttgtatntcgctggtatagctcgtagtaccgtactcattgttctctcttagtcgacgtggtagctgttgtcttgaggtatctttgtgacgatgagtagtgtgnggatcattgtgtggtcgtgcgctaatgctctcttcactcacctctcatcctagctgtggtaggggtggtggacacgtgcgcggtatcaacatattattagtttgttctcgacttacatagaggtgtaatctcatcatggtatcgcgcggngggaggtataactttagtagtgttagcttactcaacagctcgtcgcgctctgtagagtcgaggaggttgtgtactcacctcctctcgcttctgaatgcgccgctngctggacaaacacagtatcgaggtggtgagtaggctcggctcagttgtgtccacgagcatattgttgtgtgggtggcgccactgcccctcgcccaccaaaataatatatttctcttccccagggttgttgttgtgtatacccacacccctcgtctgtcgtggggaggtccaaacaaaaacctcgcgggggagagatcctagttaatacctcccgcgcgtttatttataatatatcttcctacaacgacgcgagcggggtagagaacgagagagaagaattattatacacnccttctattatatagtacgcttttatacaggaagtcctcttgtggaacatccctctccgcgggtaaaaggcgagtggtgggtggggtgaggagatcttcccgactgctggtgtgtggtacagcgggccaatcattcagtgtgtgcgggagtctcgcctcgaccgtctcttgtgaatgaaagagctacggctgttgcgggtaggtctattgctgcatctgcttgtcgttgtgtgtcgtcggttttctttctatgtcttaaggattggaattgtggttgtagtaggtatcatgagtatacgtgcgtcgcgtatggtttcatgatcgccccattatcctctcttgtgagttaggatagcgaggcgacagggagggtgagcatatgggaggtatgcttgctccccacaccataatcttcgatctagtgaatagagggtggtgcccgctgtagtcagtaatttgtgtgcgggagacgcagacaggaagtctcctcctctcttaatctatantctgttctgtctcttgttgtgcatcggttattctcggttggtgctggtct

SEQ ID NO: 1229 - DNA, 1536 bp, Glycine max
  misc_feature (1)..(1): n is a, c, g, or t
  misc_feature (163)..(163): n is a, c, g, or t
  misc_feature (300)..(300): n is a, c, g, or t
  misc_feature (468)..(468): n is a, c, g, or t
  misc_feature (524)..(524): n is a, c, g, or t
  misc_feature (592)..(592): n is a, c, g, or t
  misc_feature (620)..(620): n is a, c, g, or t
  misc_feature (716)..(716): n is a, c, g, or t
  misc_feature (1427)..(1427): n is a, c, g, or t
  misc_feature (1509)..(1509): n is a, c, g, or t
  misc_feature (1516)..(1516): n is a, c, g, or t
  Probeset Number=SeqID_11008
ncgctactccacagtaatcatcaacgtacacacacatcaacgagggacggcgtacatatactcgacatgcgcacagcaccggacgtactcgtcgtgcagccagcgcgacgcacgtcacagtcgtagtcgccgctagactgcgacggcacaccgatgttgcacntagtacacagtttagtcatggcgatcaatgtcaagtcagaattacagacgctgtgccgagacagccaccgatcgatgacaacaacagacatcactgcaattctagtaagctgtgatacaacatcagcgcgatcttgnatatccgtggcgcgttggttatgaatatgtacaacgcgatcgatatgagcggcgtgagagactagcgttccgacggctatcagtaatagtgataagtagcgtcttgtcaacacatctgtagagagataacgcatcggtcactctctctctcatcgtcgcgcggagcanctcaggacagactctgcatgtctcgtgacaatagctatcgcgatacacggagctgnatgatctgaaacataagcattagcgtgtgagactgcagatacagaagactctatcacgttagagatgntgtgcacagcgtattggcggcggactantatacgcatgaggagcgacgcgcaagacgactggctcagcttgtattacgcaggtcgaggcatgagtccacaacagccgccgtcagaaatagcagnatatgtgtcgcgtcagtcgtctcgcgtcggagcgtagcacgtgatatgtgtctatcgcgtcgctgacgttatatatgctcgcctgaggcgccctactctgataaaggatgagtttgtctgtagaatcacagtatcatacaaaacaataacagcgaacgacgagtggaagaggatagaagaccacaacacgacagaactatacgaatatgagcgagtgatggaatgatcaggtagactagtatacggtatctttgcggaacgctatgcgctcggtagtggtgtgcgagccaaggtcggtcgctcgctacataacgcagtgcgtcaacatggcacacgcaggtgacggtatcaagtaatatagccgcgtgacgtaacacgaaacacaagcactaccgcagaagcacaccagagcgctcgcaccaccaacgcactctggcctcaatatctccatcctctaacttcagtccagcatcgcaggaaagcactcagcagactcatatacgaaataacaatgacagtgaggggtagtacgcggcactgtgtcggtgctcggcactgaagcaaatatgtagcacgttataccatagaggatagatatctagctgatcagagctgtttctcttgctgtgcgatgttcgtctacatagtgacgcgcgtagggtgttgtgcctctgcggctgttgcactactgtcctctacggagacatagangacatacgagcaacatatattattctgtgcagatcagtaatgcatgagtatagataaataactatgtgaggaaagaggatanagataangagtaatgaaagagagttat

SEQ ID NO: 1230 - DNA, 354 bp, Glycine max
  Peptide Sequence Number=SeqID_9429
  Probeset Number=SeqID_11009
gccccccccaccccccccgccccccccccaccccccccccaccacccaccaccccacacagccagtcctcatcacacctcccctcctcagcccgtgctcgtggcctcgcaccagctgtcccacctgatccttcccctccgcacacagtcattatgcataagctcataattcatgcccgctcagtcagtttttcatcatagatttgctaagcattatgtcaatacacatgttatttggatggccagtcatgggacctagctaaatttctgtttctgatagagatcattgtgtccccacttttataattttcctactatgttggtgtgatatgaatcatgctcattttggctccct

SEQ ID NO: 1231 - DNA, 1422 bp, Glycine max
  misc_feature (153)..(153): n is a, c, g, or t
  misc_feature (194)..(194): n is a, c, g, or t
  misc_feature (216)..(216): n is a, c, g, or t
  misc_feature (1301)..(1301): n is a, c, g, or t
  misc_feature (1358)..(1358): n is a, c, g, or t
  misc_feature (1383)..(1384): n is a, c, g, or t
  misc_feature (1397)..(1397): n is a, c, g, or t
  Probeset Number=SeqID_11010
caagggagtggagtggactcatcgtggatgagtatatgtgcgcatgtgttggtgggatcatttcatgtggtatatcgaggcacagtcttcgaccgcccgacatcgagccacactaatatcgatacttgtactcgactgctctctaaaccagcnctcgcgaacaatgtgcaacctagcagacagcccacgtgtgngatagacagttctctatcatcnataggtactcgtgcgcggttcgcagtccatgatacgatgatgccgtagaagagacaccaagcgacaagatgcgtgtacggaggttagatagtttattcttcgtgcacgtttagggtgaggtcgtacattatattggatggctaggggtcgggtcctggaggcgggaaacgtgggcttaatctcagaatgttgtcaatatgtgggccaatatgtggattgtatatcgtctatacacgaaaataataatatatcattcgagttagcactgagtagagaggtgtaggggaagctgtgtagtccctgacacataatctctacaccgcacgcagtagggtgaggtcttgagcaaaatagacggagtaggtgtgggtgtgaggacgtaaatcataataactcccgtcgccgtggccggcgtgtgaatcgtgaggagcgataccaaatctatagagtgatttacgataattataaaatgtattatctatgtggttggtggtggaatattatctggtgcggtataggtcgatgagaaaatagagggggtgagatgcgacaaagctctatcggacaggcactctacacaagcataaacagaagagagcgtggtgctacctagaggcggtcaattcaacatcttggataatgaaatgatgaagatttttcgcctacacgctaccctctggccaatgactccaccgaggaggacaaaataaagttagtgaaggacctgcgcatcgggattttatagggtaagcttataggtaccatttaagtacgtacagaggcgcaggtagaggtacttagggggctgtaggtcggggggcgcgcggtgcgagggagtaggagttagttgtgggaattgttgtatgcggtgtgggtgtcctctctcccttgctggtcttgccggaggggagggtcgcgagagggcgggggcagtgtgatgagtagaagcacagcgagaacaccaaatatataggggtaggtagcaggtgacacgccagaggcctccttctctttcgtcttggtctccgccgttctctgttgtcctctctattatcatgctttatttaggcgcgggggggggtggngggggcgcccaatattgcgatgagtgtctattgcccgtgcctaatccgcgggcggcntcctaagcggcgggtgaggagaaanntgggagaaaggancccataaacacaacaacgaccccgg

SEQ ID NO: 1232 - DNA, 714 bp, Glycine max
  misc_feature (9)..(12): n is a, c, g, or t
  misc_feature (20)..(20): n is a, c, g, or t
  misc_feature (31)..(32): n is a, c, g, or t
  misc_feature (38)..(38): n is a, c, g, or t
  misc_feature (46)..(46): n is a, c, g, or t
  misc_feature (49)..(51): n is a, c, g, or t
  misc_feature (179)..(180): n is a, c, g, or t
  misc_feature (204)..(205): n is a, c, g, or t
  misc_feature (634)..(634): n is a, c, g, or t
  misc_feature (642)..(642): n is a, c, g, or t
  misc_feature (650)..(651): n is a, c, g, or t
  misc_feature (670)..(671): n is a, c, g, or t
  misc_feature (677)..(677): n is a, c, g, or t
  misc_feature (687)..(688): n is a, c, g, or t
  Peptide Sequence Number=SeqID_9430
  Probeset Number=SeqID_11011
tttgcaacnnnngttttggntcgaaacgtcnncgttcngactaccnagnnngtgaacgggtccaaaaaaagtgtggtggtggggcccgtcaggggaatcaacggtggtaaagtcacccaatcagtgtcgtgccaccagagcctgttgccctacctgctgtgcgactgccacgcggttcnnaaggttcgggtgtgcggagcgggnnttctggacccgaaaacaaaggccgcgattaaccgcggagttgccgtctgccacttgggcgcctcggattggagcgcgacccacggagcgttcctctcgctcgggtcgggcccgggtcggatcgaggtgtgccactggatcttcgagaacgacgtggcgtgggccactgcggagtgagaaaagagagcatcagaataaggaaggaagaagagtcacctctataggaaattaaagttaaattaaaacaaaaaaggaacttctgttctgctaagaaaatttagcagtctcgagaattatttgtttttaatttgagaattaagtaatgtgattttattttttttggatagaaaagtgtaagacaagggtcttttccctacatttggaagaggaaggtagacgcaaatatatgaaaaagatccataaacaattnctcatgcncattgctnnaatcatgagcttggcaagnngcgaangcccgctctnnactaatcattgctggcaataactcaa

SEQ ID NO: 1233 - DNA, 465 bp, Glycine max
  misc_feature (464)..(464): n is a, c, g, or t
  Peptide Sequence Number=SeqID_9431
  Probeset Number=SeqID_11012
agtcagcaccatgtacacctggacgacactcgttgccgcagcggcgactctctgcgcagtaagcggacagaagactgctcagcaggaagacccatgcaaggccaagtttagggtggtgggtgacgccacgtactgtgacaggtactgggagtgtgtcaacggtcagccagagctctatgactgccccaacggtctagtgtacgccggcaagaaccgcggtgtgacagagggttgcgactacccatggagggccaactactgtgaagacaagacccaagctaatggacccatcggacgagaacattgcgactggctgtacggcatcttcggccatgagacttcctgcacgaggtactggacttgttggaacggaacggcgacagaacagctgtgtatcggcggactgctgtacaacgagaacacacactccctgcgactggcctgagaacgtggacggctgccana

SEQ ID NO: 1234 - DNA, 621 bp, Glycine max
  misc_feature (320)..(320): n is a, c, g, or t
  Peptide Sequence Number=SeqID_9432
  Probeset Number=SeqID_11013
aatcctaaaggttcatgctagcaacaaaaagtttgatgctgatgtttctcttgaagtgattgcaatgagaacacctgactttagtggagctgatcttgcaaatctgttgaatgaagctgctatattatctggtctccgtggaaagacagctatttcatctaaacaaattgatgattctattgataggattgtggctggaatggaaggaacactgatgacagatgggaataccaaaagtttactggcatatcatgaatttggtcatgctatttgaggaactttcactcctgatcatgatgctgtacaaaaggtaacactanttcctcacagtcaaactcataaacttacatagttcattcctaacaataacccaactctaatctccaaacaacaactctttacaaaaattattagaagactaagtggaaagactacagaaaaaattattttcgataaacctaaagtgacaactaaagcagctagtaatttacagcgaatcaccagtttgacaaaacagataattaccacattgagaatatctaatattaatccttaatcactttataaaccatcagcacaaaagttagattcatcatgaagatgaaacgaagaacttcatac

SEQ ID NO: 1235 - DNA, 510 bp, Glycine max
  Peptide Sequence Number=SeqID_9433
  Probeset Number=SeqID_11014
gtctctagctgtaacgccgattatttatttattttaattattatcatctcatctcacccaattcaattcacgtatcttggaatcgattcttagggcttctgactcctgtatgtgtactgtctgcacagttgtgtcatgggcaaccacaatgtccggtcccctcgaacagattcgctcatagccttgtctttgacagggttttgtccgtgcttgtgtacacagaaggaacggtagagtgatgatcatgcccttccagagcttccacgatgacatgagggccgggattggatctctcaaaaagaaggcacttattgcgtacttcaaatttcaaacacactgtagagaagaagagaagctagacgaaaagcgatggccgtgttaactacgttcattcgaagacgttcgcgattacaaggagctccaaactgtctacgcctttcgccaatccttgatcatggaccaattgcttcccgaagcctttgatgattaccatatgacgttaagatgttt

SEQ ID NO: 1236 - DNA, 1345 bp, Glycine max
  misc_feature (1)..(1): n is a, c, g, or t
  misc_feature (32)..(32): n is a, c, g, or t
  misc_feature (47)..(47): n is a, c, g, or t
  misc_feature (83)..(83): n is a, c, g, or t
  misc_feature (219)..(219): n is a, c, g, or t
  misc_feature (280)..(280): n is a, c, g, or t
  misc_feature (289)..(289): n is a, c, g, or t
  misc_feature (315)..(315): n is a, c, g, or t
  misc_feature (483)..(483): n is a, c, g, or t
  misc_feature (492)..(492): n is a, c, g, or t
  misc_feature (892)..(892): n is a, c, g, or t
  misc_feature (906)..(906): n is a, c, g, or t
  misc_feature (908)..(908): n is a, c, g, or t
  misc_feature (919)..(919): n is a, c, g, or t
  misc_feature (1013)..(1013): n is a, c, g, or t
  misc_feature (1103)..(1103): n is a, c, g, or t
  misc_feature (1135)..(1135): n is a, c, g, or t
  misc_feature (1208)..(1208): n is a, c, g, or t
  misc_feature (1215)..(1216): n is a, c, g, or t
  misc_feature (1258)..(1258): n is a, c, g, or t
  misc_feature (1265)..(1266): n is a, c, g, or t
  misc_feature (1274)..(1277): n is a, c, g, or t
  misc_feature (1287)..(1291): n is a, c, g, or t
  misc_feature (1302)..(1304): n is a, c, g, or t
  misc_feature (1306)..(1306): n is a, c, g, or t
  misc_feature (1310)..(1310): n is a, c, g, or t
  misc_feature (1318)..(1318): n is a, c, g, or t
  misc_feature (1324)..(1327): n is a, c, g, or t
  Peptide Sequence Number=SeqID_9434
  Probeset Number=SeqID_11015
nttctctactgcatacgctgcgttcgctctcncgctctgttgatagnatatttatgtgccgcatatgatatatctcataaccncgtaccacaccgcacgcaagaatatatatatctatatataccaaccgtacatcaacagcaaacgccgccacatcacaccatcaatagttgagcagtcacattgcatgtgtgttatgattcacaccacgcaagtgtntcagagcgatgaatagttgtagattgttagagcgcacagctgtgtgacaccatgtgtaatncactatgancgcgagacaccatatatgcttctcgngccgccgcggtcgtgtttgatcttagttgacatgtgttcgtgaacagatcgcgcaggtatggtatgtgtgtatgaacaccagcaagaatatagaggtgaggtctctcatgctatgcagtgttgtgatcaccagagtcacagtcggatgtgtgcgaggaggggagttantaatacacnctcacccacttatataccacagtcacaaacacaccaaccactatagacttacgacgcctatcccatcatcggtatatattgtctagcgtgtgccgctaaccgagatcccacgaatgatgaacgaacggtgtcgtattcgtgtccctcttcagttttatcacttaaactattttattatctagctctatacgcctcttgtgcagaggatcaccggcgtgtagaaccaccgcgagtttgttgctgagtcagagctcgcgctttattaaacaccacctactcactgtcacgtacgtgcactctcctccctgtcatagtaacaccgcccaatatatgctagtatttaatatcgatgcgagagcatatgtctgtgttgtacgcgagtgcgtacgtgtgtgatttntgaaccagagtcanancatccagtgcntcgccccgctcattacctattcttgatagaacaatgtgattaaaataatataatcacacatttagtattcatagaagattacaataaattaatnatagagagaagagtgaggaagcgcagataacgactgccgcttacgccgcgcaagacacctgtgcggatcggtacgcatacgacgatcgantagtagcagtagctgacgcacgcgattgtttngcttctaccaaccacacatcactataccacacacaacatgtgataaactatagccggatatcatagatacatnttgacgnnatctaatctctgacgctgcaaatagagtgatatgaaggaganggggagnnggaccgcnnnnggccgccccnnnnncccacgccccnnngnagcncccccccncccgcnnnnaaaaaaagaaaaaaaccc

SEQ ID NO: 1237 - DNA, 1676 bp, Glycine max
  misc_feature (64)..(65): n is a, c, g, or t
  misc_feature (85)..(85): n is a, c, g, or t
  misc_feature (88)..(88): n is a, c, g, or t
  misc_feature (173)..(173): n is a, c, g, or t
  misc_feature (209)..(209): n is a, c, g, or t
  misc_feature (211)..(211): n is a, c, g, or t
  misc_feature (352)..(352): n is a, c, g, or t
  misc_feature (364)..(364): n is a, c, g, or t
  misc_feature (410)..(410): n is a, c, g, or t
  misc_feature (732)..(732): n is a, c, g, or t
  misc_feature (840)..(840): n is a, c, g, or t
  misc_feature (1045)..(1045): n is a, c, g, or t
  misc_feature (1205)..(1205): n is a, c, g, or t
  misc_feature (1469)..(1469): n is a, c, g, or t
  misc_feature (1581)..(1581): n is a, c, g, or t
  misc_feature (1676)..(1676): n is a, c, g, or t
  Peptide Sequence Number=SeqID_9435
  Probeset Number=SeqID_11016
ggtgtaaaataggagaggagaggcaaagaagggcggcgcccttgttctttccctatcctcctcnnctctctttccccctgcctgntcntgcgcggcgtggtgaggagttctcccagccgggtgcggaggggggggggccgaggctctccctaggagcactacgctggcgtatncctcccgcgtgcgctgtcgccgggtgtagttctccntncgagcgacagcgaccctatatcacttttgacgatacacacttctcatgagctcacgccaagagacagagcatcaccatcacctcttcccactctccttcgttcccggagatagtgtgtcagagtcagcatagctatggatntactataactcngtcagacacagcacccgcctactgctgcttcactgccgaacgatanagccgcctaatgcgctactctccggctactaccagctcgcctcccgcacgtcgtcctatccccctatgtgcgcttactgacgtccaccgttcatccattactcacttcattagcgctcgcgagcgccagtgtctccgtcgcccgtgcccctgcggctgcggctagcgtcgtgccagacggctgctcacgagccggccggcagtgtcctgggcgagttgatcgttcatcatatgctatctgtgtgagcatggttcgcaggtctgtcgccggctatggttattattctaggcaccgtgacgaagttacttcatggctagtgtcnggtcgtcatgctttgtgcgtccctcgcgcgcatcgtctcccgtatgctccgaacgtgcgactctttgtagtgtagtctgaagtctctgcccttagcgctggcttctcncgtatggccccagagtgtcgagaccgatgacgccaggcgcgcgagccacgtagatcgtcactattctctcttagtggcgccgcagctcgtagatactggttcacctagcgcgtctctggctctctcgatctcacatagagagtcgtcgatcgccagtcgtgcacccgacgctctgttcatgatctctcgcccggctgcatatttntgtggagctaggcgcgcctgagaacgctggttagccatctatctccgctcccggtactggtccttgttacgatcgcgatctacgcgtggtggcatcgtagaggtgaagccgtacgtcccgcgtctggtccgtccacggatcgcggttgagtcactcgagncgtcggagagtgctgactcgcgtggtggagtgagagtgactgtctgggacattgtggactgtttattgttgcggcgattgtggggctgtacgcgccgctgactgcctgatcggactcgttctcagtaccgttatgctccgcgatgcgcaacagggcgcgcgtcgactagtgtgcttacgctcattatatttgtgagttactcaggtaatattgagtgtgattggtttatcgctcttctcagcgcttatacgcgccgttctactnctcgctatagctagtctctctagtctctctctcgtcttatgacgcgcggtgttctccactacgcagattcgcgcgctatcgcgtatcagcgacgtgtaacgacgaatgaatnttgcctcagtcatctctacatcgtgtctctctacactattgtcctcagtcagtgatatacacttactatatatcgtgtgattcggacggcggtgn

SEQ ID NO: 1238 - DNA, 2724 bp, Glycine max
  misc_feature (1)..(3): n is a, c, g, or t
  misc_feature (12)..(12): n is a, c, g, or t
  misc_feature (21)..(21): n is a, c, g, or t
  misc_feature (36)..(36): n is a, c, g, or t
  misc_feature (41)..(41): n is a, c, g, or t
  misc_feature (69)..(69): n is a, c, g, or t
  misc_feature (79)..(79): n is a, c, g, or t
  misc_feature (129)..(129): n is a, c, g, or t
  misc_feature (168)..(168): n is a, c, g, or t
  misc_feature (174)..(174): n is a, c, g, or t
  misc_feature (177)..(177): n is a, c, g, or t
  misc_feature (186)..(187): n is a, c, g, or t
  misc_feature (218)..(218): n is a, c, g, or t
  misc_feature (242)..(242): n is a, c, g, or t
  misc_feature (245)..(245): n is a, c, g, or t
  misc_feature (252)..(252): n is a, c, g, or t
  misc_feature (258)..(258): n is a, c, g, or t
  misc_feature (266)..(266): n is a, c, g, or t
  misc_feature (298)..(298): n is a, c, g, or t
  misc_feature (303)..(303): n is a, c, g, or t
  misc_feature (319)..(319): n is a, c, g, or t
  misc_feature (325)..(325): n is a, c, g, or t
  misc_feature (333)..(333): n is a, c, g, or t
  misc_feature (335)..(336): n is a, c, g, or t
  misc_feature (350)..(350): n is a, c, g, or t
  misc_feature (353)..(353): n is a, c, g, or t
  misc_feature (357)..(357): n is a, c, g, or t
  misc_feature (363)..(363): n is a, c, g, or t
  misc_feature (367)..(367): n is a, c, g, or t
  misc_feature (381)..(381): n is a, c, g, or t
  misc_feature (384)..(384): n is a, c, g, or t
  misc_feature (395)..(395): n is a, c, g, or t
  misc_feature (398)..(398): n is a, c, g, or t
  misc_feature (423)..(423): n is a, c, g, or t
  misc_feature (439)..(440): n is a, c, g, or t
  misc_feature (447)..(447): n is a, c, g, or t
  misc_feature (449)..(450): n is a, c, g, or t
  misc_feature (466)..(466): n is a, c, g, or t
  misc_feature (475)..(475): n is a, c, g, or t
  misc_feature (481)..(481): n is a, c, g, or t
  misc_feature (493)..(493): n is a, c, g, or t
  misc_feature (500)..(500): n is a, c, g, or t
  misc_feature (502)..(503): n is a, c, g, or t
  misc_feature (518)..(519): n is a, c, g, or t
  misc_feature (525)..(525): n is a, c, g, or t
  misc_feature (529)..(529): n is a, c, g, or t
  misc_feature (538)..(538): n is a, c, g, or t
  misc_feature (549)..(549): n is a, c, g, or t
  misc_feature (566)..(566): n is a, c, g, or t
  misc_feature (590)..(590): n is a, c, g, or t
  misc_feature (605)..(605): n is a, c, g, or t
  misc_feature (608)..(608): n is a, c, g, or t
  misc_feature (620)..(620): n is a, c, g, or t
  misc_feature (624)..(624): n is a, c, g, or t
  misc_feature (632)..(632): n is a, c, g, or t
  misc_feature (642)..(642): n is a, c, g, or t
  misc_feature (672)..(672): n is a, c, g, or t
  misc_feature (677)..(678): n is a, c, g, or t
  misc_feature (699)..(699): n is a, c, g, or t
  misc_feature (717)..(717): n is a, c, g, or t
  misc_feature (741)..(741): n is a, c, g, or t
  misc_feature (762)..(762): n is a, c, g, or t
  misc_feature (781)..(781): n is a, c, g, or t
  misc_feature (799)..(799): n is a, c, g, or t
  misc_feature (809)..(809): n is a, c, g, or t
  misc_feature (842)..(842): n is a, c, g, or t
  misc_feature (877)..(877): n is a, c, g, or t
  misc_feature (885)..(885): n is a, c, g, or t
  misc_feature (890)..(891): n is a, c, g, or t
  misc_feature (896)..(896): n is a, c, g, or t
  misc_feature (949)..(949): n is a, c, g, or t
  misc_feature (956)..(956): n is a, c, g, or t
  misc_feature (962)..(962): n is a, c, g, or t
  misc_feature (966)..(966): n is a, c, g, or t
  misc_feature (1001)..(1001): n is a, c, g, or t
  misc_feature (1047)..(1047): n is a, c, g, or t
  misc_feature (1049)..(1049): n is a, c, g, or t
  misc_feature (1052)..(1052): n is a, c, g, or t
  misc_feature (1062)..(1062): n is a, c, g, or t
  misc_feature (1091)..(1091): n is a, c, g, or t
  misc_feature (1101)..(1101): n is a, c, g, or t
  misc_feature (1196)..(1196): n is a, c, g, or t
  misc_feature (1202)..(1202): n is a, c, g, or t
  misc_feature (1210)..(1210): n is a, c, g, or t
  misc_feature (1215)..(1215): n is a, c, g, or t
  misc_feature (1217)..(1217): n is a, c, g, or t
  misc_feature (1220)..(1220): n is a, c, g, or t
  misc_feature (1229)..(1229): n is a, c, g, or t
  misc_feature (1244)..(1244): n is a, c, g, or t
  misc_feature (1254)..(1254): n is a, c, g, or t
  misc_feature (1261)..(1261): n is a, c, g, or t
  misc_feature (1274)..(1274): n is a, c, g, or t
  misc_feature (1334)..(1334): n is a, c, g, or t
  misc_feature (1356)..(1356): n is a, c, g, or t
  misc_feature (1366)..(1366): n is a, c, g, or t
  misc_feature (1402)..(1402): n is a, c, g, or t
  misc_feature (1407)..(1407): n is a, c, g, or t
  misc_feature (1417)..(1417): n is a, c, g, or t
  misc_feature (1438)..(1438): n is a, c, g, or t
  misc_feature (1474)..(1474): n is a, c, g, or t
  misc_feature (1486)..(1486): n is a, c, g, or t
  misc_feature (1661)..(1661): n is a, c, g, or t
  misc_feature (1701)..(1701): n is a, c, g, or t
  misc_feature (1814)..(1814): n is a, c, g, or t
  misc_feature (1816)..(1816): n is a, c, g, or t
  misc_feature (1845)..(1845): n is a, c, g, or t
  misc_feature (1869)..(1869): n is a, c, g, or t
  misc_feature (1882)..(1882): n is a, c, g, or t
  misc_feature (1904)..(1904): n is a, c, g, or t
  misc_feature (1914)..(1914): n is a, c, g, or t
  misc_feature (1916)..(1916): n is a, c, g, or t
  misc_feature (1932)..(1932): n is a, c, g, or t
  misc_feature (1954)..(1955): n is a, c, g, or t
  misc_feature (1957)..(1957): n is a, c, g, or t
  misc_feature (1959)..(1959): n is a, c, g, or t
  misc_feature (1969)..(1969): n is a, c, g, or t
  misc_feature (1972)..(1973): n is a, c, g, or t
  misc_feature (1978)..(1978): n is a, c, g, or t
  misc_feature (1982)..(1982): n is a, c, g, or t
  misc_feature (1984)..(1985): n is a, c, g, or t
  misc_feature (1989)..(1989): n is a, c, g, or t
  misc_feature (1993)..(1993): n is a, c, g, or t
  misc_feature (1999)..(1999): n is a, c, g, or t
  misc_feature (2006)..(2006): n is a, c, g, or t
  misc_feature (2011)..(2011): n is a, c, g, or t
  misc_feature (2014)..(2014): n is a, c, g, or t
  misc_feature (2016)..(2016): n is a, c, g, or t
  misc_feature (2024)..(2025): n is a, c, g, or t
  misc_feature (2037)..(2037): n is a, c, g, or t
  misc_feature (2046)..(2046): n is a, c, g, or t
  misc_feature (2049)..(2050): n is a, c, g, or t
  misc_feature (2054)..(2054): n is a, c, g, or t
  misc_feature (2056)..(2056): n is a, c, g, or t
  misc_feature (2058)..(2058): n is a, c, g, or t
  misc_feature (2061)..(2061): n is a, c, g, or t
  misc_feature (2063)..(2063): n is a, c, g, or t
  misc_feature (2066)..(2066): n is a, c, g, or t
  misc_feature (2073)..(2073): n is a, c, g, or t
  misc_feature (2076)..(2076): n is a, c, g, or t
  misc_feature (2078)..(2078): n is a, c, g, or t
  misc_feature (2086)..(2086): n is a, c, g, or t
  misc_feature (2089)..(2089): n is a, c, g, or t
  misc_feature (2091)..(2091): n is a, c, g, or t
  misc_feature (2093)..(2093): n is a, c, g, or t
  misc_feature (2096)..(2096): n is a, c, g, or t
  misc_feature (2098)..(2098): n is a, c, g, or t
  misc_feature (2104)..(2104): n is a, c, g, or t
  misc_feature (2126)..(2126): n is a, c, g, or t
  misc_feature (2133)..(2133): n is a, c, g, or t
  misc_feature (2159)..(2159): n is a, c, g, or t
  misc_feature (2164)..(2164): n is a, c, g, or t
  misc_feature (2171)..(2173): n is a, c, g, or t
  misc_feature (2179)..(2179): n is a, c, g, or t
  misc_feature (2181)..(2181): n is a, c, g, or t
  misc_feature (2185)..(2185): n is a, c, g, or t
  misc_feature (2202)..(2202): n is a, c, g, or t
  misc_feature (2206)..(2212): n is a, c, g, or t
  misc_feature (2216)..(2216): n is a, c, g, or t
  misc_feature (2223)..(2224): n is a, c, g, or t
  misc_feature (2229)..(2229): n is a, c, g, or t
  misc_feature (2248)..(2249): n is a, c, g, or t
  misc_feature (2267)..(2268): n is a, c, g, or t
  misc_feature (2282)..(2282): n is a, c, g, or t
  misc_feature (2307)..(2308): n is a, c, g, or t
  misc_feature (2348)..(2348): n is a, c, g, or t
  misc_feature (2352)..(2352): n is a, c, g, or t
  misc_feature (2355)..(2355): n is a, c, g, or t
  misc_feature (2362)..(2362): n is a, c, g, or t
  misc_feature (2366)..(2366): n is a, c, g, or t
  misc_feature (2394)..(2394): n is a, c, g, or t
  misc_feature (2410)..(2410): n is a, c, g, or t
  misc_feature (2412)..(2413): n is a, c, g, or t
  misc_feature (2436)..(2436): n is a, c, g, or t
  misc_feature (2451)..(2451): n is a, c, g, or t
  misc_feature (2465)..(2465): n is a, c, g, or t
  misc_feature (2470)..(2470): n is a, c, g, or t
  misc_feature (2479)..(2479): n is a, c, g, or t
  misc_feature (2493)..(2493): n is a, c, g, or t
  misc_feature (2506)..(2506): n is a, c, g, or t
  misc_feature (2511)..(2511): n is a, c, g, or t
  misc_feature (2518)..(2518): n is a, c, g, or t
  misc_feature (2563)..(2564): n is a, c, g, or t
  misc_feature (2586)..(2586): n is a, c, g, or t
  misc_feature (2592)..(2594): n is a, c, g, or t
  misc_feature (2598)..(2598): n is a, c, g, or t
  misc_feature (2603)..(2603): n is a, c, g, or t
  misc_feature (2611)..(2611): n is a, c, g, or t
  misc_feature (2626)..(2626): n is a, c, g, or t
  misc_feature (2632)..(2632): n is a, c, g, or t
  misc_feature (2634)..(2635): n is a, c, g, or t
  misc_feature (2642)..(2642): n is a, c, g, or t
  misc_feature (2656)..(2657): n is a, c, g, or t
  misc_feature (2660)..(2676): n is a, c, g, or t
  misc_feature (2679)..(2682): n is a, c, g, or t
  misc_feature (2684)..(2685): n is a, c, g, or t
  misc_feature (2690)..(2698): n is a, c, g, or t
  misc_feature (2703)..(2704): n is a, c, g, or t
  misc_feature (2711)..(2724): n is a, c, g, or t
  Probeset Number=SeqID_11017
nnngttgtatgngtattagangatcaaataatgtangtatnctacgtgcactttatgtatcgtcaacgnacacgtacgnctgagactattatgccatagtgcgaaagcatgtaatgatgacttataccnatacttactaatagtctagtggagtacagatgaaaaatncgcatnatncagtcgtgnntacactgtcgacgctcagccacagttatctnaagtcagcaaatgagtagtaagtntancatagtnatatgntagaatgntgcagaacaacttcacttaatcgaagtattgntaatngtagtcagcatcatgnctactncgctcacncnntcccgtggcctagntcntacncctggntacngcatttcgcatcgntcnataccgttcanttnctgtcttgcagcctctgcctcagcngtagaaagcaggatgnnacaattnanntcatcaccagctaacnatcgtaagnaacagnacgatccacatncaccctnanntggttgtggtccgtnncgtcgngttnttgattcancattgtagtcngtagttaagtcaacgtncgtaatctgtcctgtgattgatantcgtcgttcgttcantcngtaatgcggagngtcngaagtcgnactcctacgnagctgtctgcatctatctgcagtctatttngattnnaaacgattgtaaagacgagantattcagtatcactatgncgacgtagcactacattactcagntctagtcatgtacacagtccngggctactgacttagctantatcaactgcgctcgtcntctactatcnacctcgcactagtactacgttcagtaagaatanatgtacgtatctacatatatagtcacttacatctncgacgtanatgtnntgatncccgaatccgagatcgatctcgtattgaaaagtcctagcactatcataccctnctgtacntcagantccntcgattccgtgtcgtctaagtcatcagtaccacgnatctagtatagcactcagtcaatatgtcatactcgtcgtgatgcgncnatnacttgtctcnactgctcgtacgactagagcgcaccgatntgagctgatntgtcgcaggatgcgacgcagacggctagcacggtgtacagcacgtagtgtcaacctcacatcagcctactatcgatgatgatcttatacacacangcagancgcaacgngcagnantanacgcggatnacacagcagtgccantaacatctantactacntaccactatacantactcagtcacgagtcatgtcactaatcagaagttgtatagcaatctcagctcagacacntacacatcgatacgacctctancacacacgtntcagtgcgcagcagtctcaatactacgcagctctcntcgtntgatgtactnattctcatagtatatcattantatcacgtagctctacactacacatagcatctatanacagatacaccngacacacgacatgcgcgataatgtacgcaacaactgacctgctactcatagcatcagccactgctgtgccactagacgcatgcgcactggtacagcagcgtctcgacgtctatcgcatgtgtatcactgatactgctcgtctgctcgcgctgtgcacaatacggcgctagaccgncgcgatgacgtcaacagagcacggtcagcacacagacganagagcacgaccggcaccgcggatacccagtcactatgctatacagatatgactctcatgagtgttatacgtactgtcgtgacgtgcgcgtctagtcgtgcacagcgactcagncntggtctcgtcagtcgtctactcagcacgntctgacactcgcctacatcgcagntctcgccgcttcnacattgactatcatatatatcntactcctacncncaatcaacgtaactgntttatattatgaagttagacgnnanantatactgtgnatnncggtntatngnntttntatntgtcgngtggttntgtgngtntnttgtattnnagcggctatgtntgtgtctgntgnntgtntngnctngngtnttgttgntcntntcgtttgntgntngntgntngttgtngtgatgttgagtgcagtatgtnatgactnatatggtatgtaatgatatgatagtntgatntactgtnnntcgtantncttngtgttgtgtgtgtgtgngagnnnnnnnactntttctcnnctatntatctaccttacactctcnnagcggtttagcatcgctnnatactacatatatncacaccatctacacagaagtcaaanncatgatatacgcgcacgagtgcgccgcaccagtagtacancacnctnattccgncatnagcagagcgagcgaagtataggagttgnacagtcgtacagtacncnncaacagagagctaccagtcagancagcgccccacgcgnagtcagtagttgangtganacacgcacnaccctagcacacgngcgagcgatgtcnctacnagtgtgnaaccgtacagacgaccgtcgcgtaagtacgaagcactacgagccnnctgcaggcagctacacagctangcgagnnngcgnctagnggagacgnggcgacgacccgcgnccaagngnnctgcccngcgcgccatagccnnccnnnnnnnnnnnnnnnnnccnnnncnnccccnnnnnnnnnccccnncccaaannnnnnnnnnnnnn

SEQ ID NO: 1239 - DNA, 843 bp, Glycine max
  misc_feature (629)..(629): n is a, c, g, or t
  misc_feature (666)..(666): n is a, c, g, or t
  misc_feature (681)..(681): n is a, c, g, or t
  misc_feature (684)..(684): n is a, c, g, or t
  misc_feature (698)..(698): n is a, c, g, or t
  misc_feature (716)..(716): n is a, c, g, or t
  misc_feature (726)..(726): n is a, c, g, or t
  misc_feature (729)..(730): n is a, c, g, or t
  misc_feature (737)..(737): n is a, c, g, or t
  misc_feature (746)..(746): n is a, c, g, or t
  misc_feature (750)..(751): n is a, c, g, or t
  misc_feature (753)..(753): n is a, c, g, or t
  misc_feature (768)..(768): n is a, c, g, or t
  misc_feature (776)..(777): n is a, c, g, or t
  misc_feature (786)..(843): n is a, c, g, or t
  Peptide Sequence Number=SeqID_9516
  Probeset Number=SeqID_11018
aatcaaagttcacatctcaagaagactcacgccatcgccttttggtcgaccgagcaagaatcaaagaagaggcgatcagagatcgaaagctgtcccttcctctcaggtttgttagaagatgtctcgaagatatgatagccgcaccacaatcttctccccagaaggccgtctctaccaagtcgagtacgccatggaggccattggcaacgccggctccgccatcggtatcttatccaaagacggcgtcgttttaatcggcgagaagaaagtcacctccaagcttctccaaacctccacctcctctgagaaaatgtacaagatcgacgaccacgtcgcctgtgctgtcgctggtatcatgtctgacgccaacatcctcatcaacactgctagagtccaagctcaacgctacaccttcatgtaccaggagcccatgcctgttgagcagcttgttcagtctctctgtgatacaaagcaagggtacacgcagttcggtggtcttcgtccctttggagtttcgtttctttttgcagggtgggacaagaaccatgggtttcagctgtatatgagtgaccccagtgggaactacggtggctggaaagctgcggctgtgggagctaacaaccaggggnctcagtctattctggaacagattacaaggatggtgcnaactagagaagaggnggnggagctttgttctnaaggttttgagcaagacnttggcaggantannttggcgnccgaaaaanctgnnanttggctgaagggggntttctgannccgcccggnnnnnnnnnnnnnnnnnnnnnnnnnnnnnnnnnnnnnnnnnnnnnnnnnnnnnnnnnn

SEQ ID NO: 1240 - DNA, 1414 bp, Glycine max
  misc_feature (1)..(1): n is a, c, g, or t
  misc_feature (5)..(5): n is a, c, g, or t
  misc_feature (46)..(46): n is a, c, g, or t
  misc_feature (68)..(68): n is a, c, g, or t
  misc_feature (80)..(80): n is a, c, g, or t
  misc_feature (120)..(120): n is a, c, g, or t
  misc_feature (132)..(132): n is a, c, g, or t
  misc_feature (165)..(165): n is a, c, g, or t
  misc_feature (220)..(220): n is a, c, g, or t
  misc_feature (237)..(237): n is a, c, g, or t
  misc_feature (406)..(406): n is a, c, g, or t
  misc_feature (521)..(521): n is a, c, g, or t
  misc_feature (690)..(690): n is a, c, g, or t
  misc_feature (793)..(793): n is a, c, g, or t
  misc_feature (857)..(857): n is a, c, g, or t
  misc_feature (863)..(863): n is a, c, g, or t
  misc_feature (884)..(884): n is a, c, g, or t
  misc_feature (887)..(887): n is a, c, g, or t
  misc_feature (1147)..(1147): n is a, c, g, or t
  misc_feature (1187)..(1187): n is a, c, g, or t
  misc_feature (1241)..(1241): n is a, c, g, or t
  misc_feature (1291)..(1291): n is a, c, g, or t
  misc_feature (1339)..(1339): n is a, c, g, or t
  misc_feature (1389)..(1389): n is a, c, g, or t
  Peptide Sequence Number=SeqID_9517
  Probeset Number=SeqID_11019
ntgcnagtggtctgcacagtagagtcgtgactatctatatgtaganagatgtgagcagacgacggatntgctatgttagncgtatgcatatgtcgatcgtgtggatgcgatggtgtcgtnggcgtcgtatcnactgatatatatatatgtcgtactatggcgtcntgtgagtgcatgatgatacggcgatacagggagcaatagacaatgcatcgctgtntccgaggatgtacgatngtgtaagagtaagagaagacgatcgtcgacacaacgatacgtgcgacactggtagtactctctgctcgaagctacgcatactatcgttgatgtagtaccatgctatcatgtagagcgacgcggagtcgcgtcgcgtcgtgagagtgtgtgacactgtccacgcgatgcnggtctatccacacagtcgcacagtgcacacacatctatcatagatacatgacgcaatactcttagtatgtgaggtgatgtagtgagttaggtatctctccgtgcggcttggtgtngatatatatacatagatatatactagagatagatcagatcatagcagtaatgtcagacgagagagtgagtctctcagcgtacagagacaggtcatcacatatctatatatactcctggccatactcgtgctgtctcacgtacgtcgtcatacagctgtgtgtgatattngtactgaggatgaataagagagaggagatcggaggagattataggatatgagcgtctcagcacacaagcaatgatgacaggcacttcgtagtgaggtcgacanatactatactacatatagacgagctctagtgtgacgcgcaacagtgtgcgtctgtagtatacantaatcntttctaatgaacagcaacatntgnttcatacattagcgctcgcttaggctgcatgccgcgcaggcgagcatcagtctcagtatatgcagctatgaatatgggaggtgagcactgcgtcaggtttgtgctgatcgtttgtacgtacgtgaatcgtagatgcgtgagttagcgctacgacgttacaccttacactatgttcttacttgttgcgcgctcgcgcgcgcgtgccgcgcgcgttagtacaaagcgttctgattgcgttcggttagctgatgtgacgtgtnggttcgtatcgacacatgagtaagaatatatatattacgnacaaatcgtggactgcgatagtgcgaccatgctctctcgcacgtgtttctgcgnttgtattatttataatacattgaaataaataagtgaagtatatcatatgntcctcttatattacgcgcttctgtggtgtggtgtcctatctctgtgangagtggggtcgtgggggttggaggggcgacagtcaggcagcacccaacanaacaaccagacgacacaacacacac

SEQ ID NO: 1241 - DNA, 605 bp, Glycine max
  misc_feature (605)..(605): n is a, c, g, or t
  Probeset Number=SeqID_11020
agaaaccctaacagatcggccgagccctccgccgccgccccgccttcagctctctccttccttctccgatccaagatgaagctcattgctgcctatctgcttgcttacctctctggcaacgccagcccctctgcagaggacctgacatccattcttgagtctgttggatgagaaatcgacaatgagaagatggaactcatgctgtcccaagtgaagggcaaggacatcaccgagctcttggctgctgcaagggagaagtttgctgcaggtccatctagagacggaggtgtgcatgtttcagctgctgcccctgctgctggacgcgctgctgaccctgcacctgagccaaagaaagaagagaaggacgtggagaacgaacagagtgatgatgacatggacttcagactgttccactaagttgtgcggcaccttgtgtctgaagaatctatccttgctcaggaaactaaagtaaatgatgatttagactttattcaactgagctgagacacactggcaagacaacgtcttgatatgcaattcagcccctgatagctggttgattaactggcagaccataccgatgctatccaattctggtacgttan

SEQ ID NO: 1242 - DNA, 643 bp, Glycine max
  misc_feature (627)..(627): n is a, c, g, or t
  misc_feature (632)..(633): n is a, c, g, or t
  misc_feature (635)..(635): n is a, c, g, or t
  Peptide Sequence Number=SeqID_9518
  Probeset Number=SeqID_11021
gatccgaatctcgaaactcgttccgctattatccatcaaaccgttgagtaggcgggtgtttctatctggatgttaagactactgcaccaggacttctatcaatggcaaatgctactgctaataccaatgattgacaatgtttcattacaactgcgacaactcgctggttggacggaaggcatgttgtttttggtaaagttctttctggaatggatgctgtttacaagattgaagctgaaagaacacaaagtggcactcccaagagcaaggttgattgttgacagtggtgaactccctctataattgtacttcacgaatctgaatctagacttgctgaaagagttcccagttttcatttcaattacatctacgagactacttatcttttataagcatgttctaatagatcaaagactagttgaatgtttgtgatacttattagataaagtttttccccctaatgataatatggaaaatggcatttgtgaacatgaacattgtaaaaggaaatctaagtgaacatggctgttgaataatagcagatgcccttaatgtgaagtatcttaagctaggaaaaagggttggcgcaaaaaaaaaagatgttttgaaaaaaaaaaaaaaatttgngttgnngngggcggcc

SEQ ID NO: 1243 - DNA, 522 bp, Glycine max
  misc_feature (50)..(50): n is a, c, g, or t
  misc_feature (185)..(185): n is a, c, g, or t
  misc_feature (232)..(232): n is a, c, g, or t
  misc_feature (402)..(402): n is a, c, g, or t
  misc_feature (423)..(423): n is a, c, g, or t
  misc_feature (426)..(426): n is a, c, g, or t
  misc_feature (436)..(436): n is a, c, g, or t
  misc_feature (483)..(483): n is a, c, g, or t
  misc_feature (494)..(494): n is a, c, g, or t
  Peptide Sequence Number=SeqID_9519
  Probeset Number=SeqID_11022
ttttttttttttttttttcatcataatgaatagtgatacatcctgctaanaataatgctgtgtgtactgtccaaccgtaaaagtatcttaatcaacgaaaacccagcaaacgtagaggcgacacccgcttccccgaactcgcttcggcttcagcaactgccggaggagcattcgacgcctcaggnggctctgactcgggagtcggcggtagcgattgcggaggctgcttaanatagggccgaattggtggaggaggtgacccgtctgaaggtaaagcagtcgcagtagagggacgacccttcttcggtttcttcaagttaggatcaaagtgaacagttggcgcgggatcgcgaggttgagaagaagatgaagctgaaggatctgagaccgaggacgatgcanccggaggtggtgaagccccantanaagcagcctnttccggaatgtcgctcaaagcaggctcgaaatgcacagccgttgcanaatcgcgcggncgatcttgtccaccctgaggaccaggat

SEQ ID NO: 1244 - DNA, 1003 bp, Glycine max
  misc_feature (1)..(1): n is a, c, g, or t
  Probeset Number=SeqID_11023
ntgtacccgtgctctagtcgacctcgccaacggcggcaccgcatctgagagaggggggaggggtcttcggagaggagatggcgaagcggctgcgcgaggcggcgccgtggggggaggcgccgggctcgccggtgaacggcctggacgacggctgcctcatgcatatcttcagcttcctcagcccgattccagataggtataacaccgccctcgtttgccacagatggcgcttccttgcatgccatcctcggttgtggttgcgcgttgagaggccgctcagagatgtaaaggagcctggagtttatccagatcttgaggctgctatttctgctgctaggcctggtgacactattctaattgctgccggtggcacctatcttgcatgtaatatccaaataaagaagcccctttgcattattggcgggggtgagcttcctgatgacactgtattgacatgttcccgtggctccgataatgcactggagttcctttccacctgcaagatcgcgaacctcaccatcaaggctgagctcggatgctgcctgctccatcggagcggcaagctaactattcaggagtgcttgctccagtgcgagccaaaccctctggactacctgtccttcccgatagtcagcacggcgatcgaatacaatccattatcgtcgtcgctcaaggagcagcaggggcacggcgtgacggtcgtccgcacccggatcgaaggcggcgccaaggccatccggaccaacgggaccctggcgctgcagcgcgtgcgggccatctacgcccgcaggtccgtcttcttctggttcgaggtaggggagaagctggaacccctgtgaaaccaataagctcttgtattctgtaatctcactcaacctagcgttgagagcaaacccttgtagtatcatgtctgttccatgcctgttgtaacacatgacaatgataaatttttactgctgcttattgacatttgaatcatcatggagcaaaaaaaaaaaaaaaa

SEQ ID NO: 1245 - DNA, 467 bp, Glycine max
  Peptide Sequence Number=SeqID_9520
  Probeset Number=SeqID_11024
caggtacccgcccccaattattcacgtggtaggcccaaaggagggggctacccttctataatatcagttaagccttttctcgctgggttctacttcgggctttggtttcctttctcttttcttttctttcggttttttgatccctaggttgttttcatttggcagggaaaaacgaatttaaagtttgcccaaatcagtttgtagtttgcgtgatgtgctaatgatattttagacttccgtttttatttcttccctcaaactcctatagatgaagagctgctaacatgaccaatttatatatcattttagttccctagcttcaatctgtagatagataattcccagcgtattatatggtgattggagaaaactcaaaaagtgaatacctcttaaactaaactaagtatgaggccgctgccccatttggttacttgtagcaaagaatgaaagcaggctttttttttttt

SEQ ID NO: 1246 - DNA, 422 bp, Glycine max
  Probeset Number=SeqID_11025
ctaatgaggaaggtagggaaattgctgaaaagttaggagtgagaaacctcttttgggattgggacttgcctaggactagagaaggtttttgtgggttcaaaggttcaatgactgcatcagttgttagagggtgtgctttttgtccacatgctgatgatatatggatggtgactgcaagcccatatgtggttgaacgcccatagttattcaatggggttatgtcaaagcacgctcatatgatgctagaatactacctctcttcatgtttaaactgggatgcttttgtaatgagtggtgaacatataaaaggatctattccatagattgccaagtttgggttctttctagccgacctttactgggggaaggcttgatttctatacaattcatatctttaacattttcaaaggatttatgttctc

SEQ ID NO: 1247 - DNA, 1370 bp, Glycine max
  misc_feature (18)..(18): n is a, c, g, or t
  misc_feature (21)..(21): n is a, c, g, or t
  misc_feature (45)..(45): n is a, c, g, or t
  misc_feature (72)..(72): n is a, c, g, or t
  misc_feature (108)..(111): n is a, c, g, or t
  misc_feature (116)..(116): n is a, c, g, or t
  misc_feature (119)..(119): n is a, c, g, or t
  misc_feature (124)..(125): n is a, c, g, or t
  misc_feature (137)..(137): n is a, c, g, or t
  misc_feature (361)..(361): n is a, c, g, or t
  misc_feature (377)..(377): n is a, c, g, or t
  misc_feature (1017)..(1017): n is a, c, g, or t
  misc_feature (1179)..(1179): n is a, c, g, or t
  misc_feature (1246)..(1246): n is a, c, g, or t
  misc_feature (1275)..(1275): n is a, c, g, or t
  misc_feature (1346)..(1346): n is a, c, g, or t
  Peptide Sequence Number=SeqID_9521
  Probeset Number=SeqID_11026
aatgtgtgtctgtttggncgngtgtgtgtgcgcgctgtcgcccantttatatttctatatattataccgcgntactatgtctcatcgtctgtgtgtctctattatttnnnntttcnccntgtgnntaagatattttnccaagtcctcccgctctcgaagaggcgcgcgcggcctctaaagtatgttaggttggcatatcgccacttccctctctgctgtgaagagtttcaccaacgcaggagcactattactctgttctaacagtgccggacagtattcgcaaagagagaatgagataacatatagtctttagtatcgattgctcggcgcgtagcctcccggaggtgggtgtgttctcggnctctctagagttatantgctcttacacttgctcagcctgcaatcttgctctgttactctcaccctgtacacggagcaatccatacccacctgctattctggtaatgagagttaatacgatctcgaggagtgttccccgtatagcatcagactgcggagtagcagcccgtcctgctctcctgctcgcgtgtgtgtgcgcatgccgtatgctcgtatctcttcacctgtctacttgtctaccctcccatcctcgaacccaccccccacctgtaatatatagtgtgtgtggctggccaggacagtccgtttcaatagccggcacccgcctccgcctctactagctcggctcgttgtgtacctcgtcccgcccacccgacctcctcgtgtttcgatcgactctctaggctactagttatactatacaccagcgctcctctctctgtctggtgtggagtagatactaccgcccaccagaactccacatccgacaccacaaatcgtacattatattcaactctctcctcgccactgcactctctctccttacgtcagttgcgtatacggacgtatacgcttattacctcccttctcgcacgcgcgcgctgcgcgatctccgcggccttctacgctcggagtgtggttatgcgcctcaccgcnagagctcagcgaaccgatcgtctagtccttcacgcctcaccacgtgacacaatataccccctcacactccctcacgcaccagactgctcgctctctcgagtcgagtataacactctgcgctccgccggcgtggcgtgcgcactgcagtcacatctccgcganctctcaagcctacactctctctcgatcaccgctacgtgcacgtgactcacgtgtctgtagctagcgnctcgacacactaatcttctactcacgtcncgtcactccagcgagactgctactcgcgccggctctacacaatatccacatatactatgtctccgcatgcncatcatacttgtttatgttgcacg

SEQ ID NO: 1248 - DNA, 768 bp, Glycine max
  Probeset Number=SeqID_11027
ctgatccaaaatttccaaacctcttggaacctctagccggaagaccaaggaccgccaaacaaaagagcctattagcacagaagacagtgagacacttgctgaagaagcattccctcattgaccaagctcaagaggctgatcacttctctatatttgagacttcaccatctgctttacaattgaacattcctcttgacgattctcctgggacccctgacaattatctaaagtccttttccctgcaaaagtacagcgcgagttcttcagcacgtaagagaccgttgtcaaggttgaaaactaagcatgctgaaccgagtccaccagtactgaagcctctaaagaatactgttttgcacgagaagtacattaatcagttgacccgaagagaaggcgcaaaaaagcctcgtaagaaggctgctggcaccaatgcaactgatcctgagaggcctctttyggagcagcgagctggtagtgtgaaggctgcaaagaatgctytcatttcagaagcaacagacttcatagggcagtttaagaagttgcaagccaattcccttgcacacgttytggaaaacagtgaagatgacgaggataattcggtgtagtgtcatactagtggttaaagcagctagatagcatgttatcaactaactttagttagtacaataagactgtaagagactgacgataggtcacggaagttatcgctcaatgcattttgtcaaggaggttatcaacgcatttytagcatatcaaggtcatggttatcgc

SEQ ID NO: 1249 - DNA, 1355 bp, Glycine max
  misc_feature (8)..(9): n is a, c, g, or t
  misc_feature (22)..(22): n is a, c, g, or t
  misc_feature (26)..(26): n is a, c, g, or t
  misc_feature (42)..(42): n is a, c, g, or t
  misc_feature (75)..(75): n is a, c, g, or t
  misc_feature (77)..(77): n is a, c, g, or t
  misc_feature (91)..(91): n is a, c, g, or t
  misc_feature (94)..(94): n is a, c, g, or t
  misc_feature (100)..(101): n is a, c, g, or t
  misc_feature (118)..(118): n is a, c, g, or t
  misc_feature (181)..(181): n is a, c, g, or t
  misc_feature (195)..(196): n is a, c, g, or t
  misc_feature (267)..(267): n is a, c, g, or t
  misc_feature (333)..(333): n is a, c, g, or t
  misc_feature (340)..(340): n is a, c, g, or t
  misc_feature (427)..(427): n is a, c, g, or t
  misc_feature (587)..(587): n is a, c, g, or t
  misc_feature (613)..(613): n is a, c, g, or t
  misc_feature (716)..(716): n is a, c, g, or t
  misc_feature (941)..(942): n is a, c, g, or t
  misc_feature (1265)..(1265): n is a, c, g, or t
  Peptide Sequence Number=SeqID_9522
  Probeset Number=SeqID_11028
tttttttnnttttttttttttntttnttttttatgatgaaangtgaggatagagagtgggtggtgcacgttagtnantgtgtgagagaganggnagagannattaaacgaagggcatnagataacactaaacacaacacaacacatttaatgtgtacatcgacgccgcgacaacacaccgncgcgccacgaaaannttagttacttttattatatatatctgcttatatttgtatgatcttattgataacgtagatctaattatatngacagtatatatatctattcttttctctcttctacttctccgcgtggcccactcgctccgcgtttncgtctcngttctcatgtacgtagcgggcgcgcgggctgacgtgtcgtcgattagatcgaggttgcgtctgcggtctctcttgcgtgctgtaccntgtctgctattcttgtgctattctcttttatgcggtctcgtctccgctattcactttgtgtgcgcctcgcgacgcagcgcgttcgagaccgccctacagtgaccgatgcgcggaggagatgcggcgccgacagtgaggtgtcccgtcagcgcagacgacnccacgcgcagcgtgtaattatgtacnacacatcaatactactacgatcactcatattatttatttgctatctcttctttatctcgctcttgtgctgcggtcgtatgttattatgttagtgtatgatatnctcaccacccgaggtgtgctgcgcggcgcggtgtccgcgctctgtgttgtgtgttgtgttgtggatattgatgtgtagaggtagatgagatagaccagcgctcctcgtatacataccaccacacgcagctgtctcattatggtgctagttgagtcgtgccatcacgtggaatgatgatgccgccccgcgtcgctcttgcattcgccatgctagacacgacgcaanncacgcacagcgccgccgcagctgacgttggcgtcgcgcgccacgcgccggtcggatgacgacgtcagtagctgctctgtgtgttcgatgcgcgtcgtctcgctatgtcaacgctgtcgtttctctactgcgctgcgcgacgctgtctatcgtgtgtgctactcgctctatccgccgtctggctcttcgtctcagcactatctcacgagactcgttatgatatcgaacgacgcacagtatattgtatactgccgcgtcacacatgtgcgtataagttatattcatattaatactgatacactcgcatattgttctccgagactntttatgacttctattgaagcatttatgcacactctctatgaatttatatctcatctagatcatacagagtatgcagaccagcacgaaccg

SEQ ID NO: 1250 - DNA, 1492 bp, Glycine max
  misc_feature (24)..(24): n is a, c, g, or t
  misc_feature (133)..(133): n is a, c, g, or t
  misc_feature (246)..(246): n is a, c, g, or t
  misc_feature (375)..(375): n is a, c, g, or t
  misc_feature (554)..(554): n is a, c, g, or t
  misc_feature (561)..(561): n is a, c, g, or t
  misc_feature (710)..(710): n is a, c, g, or t
  misc_feature (869)..(869): n is a, c, g, or t
  misc_feature (918)..(918): n is a, c, g, or t
  misc_feature (1369)..(1369): n is a, c, g, or t
  misc_feature (1492)..(1492): n is a, c, g, or t
  Probeset Number=SeqID_11029
ttgtctgtagataataagtaatcnagcgcgcaccacatctcttctctaccctctcctctcacatactactacacctcacctccacactgctatcttaaactgtgtttctatcacgccgcgtcatatgtcgtgngcccgtttctctcttcgctcctcatagtgttgttctaacacactctcacaccctcttaatactctatggaatgcggcgataagatgcgcttctaatgcacacttaacacctantaataaaagactaactataaacaacacgatcagtagtgaatcacacccacgcaccacctcctctctacgttacctacggttatcgcgacgaagcgcgccgagccagttgattattgcaatatagatatnatatatctatttattacgatccgatatacgtaatatctatcgtcatgactccgtacacgtctctcgtcatgattgtggtctcatataataagacacacatgtaactcatagaaccaatatccgtatgcatcaccagcgtattgtatagtggtctgactcggtgcacgccgcgcccaccntcactancacacccgtgttattatacattcgccacttcctgatatatcactctgtaacaagtatatccgaccaccgtattcttgtccgcgcacctagtatacgttatatcataactgatctgattccgacaccgtctacccacaactactgtttantaatatctcctcacgctgctctattatcatgctcatctttatttccggcgcttttgcagcatcactatatagttgtctgagcaatgtatttaaaaataacgaacacccccggcttatattatacaatataaatgatcgtcatgccgcttatatgtatcnatgtcgtgccccgacattacagcactcgcgccgcgcgcatctcgagaantggattaattaacagattatactatagttgtttcgacacacggcgctgacgtcaccgatgaatattgtttataaaatcttcgttcatgtcgttatatccacctattacttgacaggagcttgctaaacagcacaccaatcgtgatcagcgatacgtgtgcgtgttgcggcttgcgttctcccgcccgcacacacatgacacacataatttaatatatatcacacagctgctgcgaccacactaaatgtatgatgctctcagtctaatattacatcgattgcatcgactattatcttacggtttgactaccgcaagaatacataatatgtatcttactactgcttgtctcgcacacatatatttatatgtgtctgccggcactgctattcagtgaatgagtgagagtgctgtatgagacgcaacgtgatgtgctgtgacgctgatttgtgcncaagctcacgtcgcgcagtacgacatgatgtttgattattgaatgtacttgtatatcacgctactctattaaagagcgctccgagtacgtacagctcactactgatgtgaatactcctgatan

SEQ ID NO: 1251 - DNA, 1338 bp, Glycine max
  misc_feature (210)..(210): n is a, c, g, or t
  misc_feature (490)..(490): n is a, c, g, or t
  misc_feature (896)..(896): n is a, c, g, or t
  misc_feature (1298)..(1298): n is a, c, g, or t
  misc_feature (1305)..(1305): n is a, c, g, or t
  misc_feature (1307)..(1307): n is a, c, g, or t
  misc_feature (1312)..(1325): n is a, c, g, or t
  misc_feature (1327)..(1328): n is a, c, g, or t
  Peptide Sequence Number=SeqID_9523
  Probeset Number=SeqID_11030
cgtgggcttcgtgactctatgcaatagggaccgtagtcattgattctatagtactgcgaacttggttctctgagctatgttttacgagacacacgcatagtcacatcatggcgattgcgctatgcacgctagactctgccagatagcagttggctgtccgctgacgccaacaggcgttgcgcaactctctcttttcctcacgctcagtgnccgggtccaatggcccagaccgtcgcgcctctgcaccttgctctcctctgtgtgctccgttacttgtccacatctccatttctctctacatctctctcgagcatgtaacactaccatacgcattgcacccggcacgactcgtacacattaacctggcgcttgtacggacgcaggaaaagatcctacacccatcacggacccaccctcatctccggccaccgccccgtctcttctctggacaaggctcgcggcagcaccggtcctcgcaccaaaagagganagttgtgggggtggggtttcttatgtactcactattattccaactccctctcccgccttccagtgtgagactatgactggttgtgactggttcgtccatctcctccggtcctccctgtctagccttatggtcgctttggtcggttagtcgttccatttcgcaccgtgtgactaccttcattaagtgtcttttgttcccccgacctcccccgcccccgctcggcgtccagtgtgccatacagtttacctcctttttgtcatatggatggtagtctgtcggtgggttcccaattgtttttttatatcactagtggattactctactatcaatcgattcccgccgtgggctgttttccacccttcctaactcttacatctcttttcatcgttgcttcttttttcttttnctctccacccctactgcatcccctcccccctcttgtgctaagctcgcgcggggtgctgaggagactcatcttcctcccacagccaccccccccccgccggctctttgtccagtggactccttgatctgaccacttctttttactcccccaaggggggctcctccccccccactcatgcgatcccctgtttgtggggggggtggggggggggggatataaggtaactaaataacttaatattttatctattgtaggggtgttgtgtggttgtgttatttgggtggagggggggtggccataacctccccaatcaataaatcaacagggggccccctacgataactacctctccattcctctccccctcctcctcctctcgccccggggggcaccgaacccagnccctacncnctggnnnnnnnnnnnnnncnngcaaacaaaa

SEQ ID NO: 1252 - DNA, 748 bp, Glycine max
  misc_feature (1)..(45): n is a, c, g, or t
  misc_feature (83)..(88): n is a, c, g, or t
  misc_feature (91)..(91): n is a, c, g, or t
  misc_feature (109)..(111): n is a, c, g, or t
  misc_feature (131)..(131): n is a, c, g, or t
  misc_feature (172)..(172): n is a, c, g, or t
  Probeset Number=SeqID_11031
nnnnnnnnnnnnnnnnnnnnnnnnnnnnnnnnnnnnnnnnnnnnncaatcaactgcaaggggaaagttaagttttgtggatcnnnnnngcncagaaagagtaaaaaagnnnggttcttcaggtagtcaacntaaagaagctcaaagtatcaacaaatcattatcagcactangagatgttattagtgctttgtcttctggtggtcaacacataccttacagaaaccacaagttaactatgttgatgagtgattcacttgggggtaatgccaaaaccctcatgtttgtgaatgtatctccagtagaatcaagcttgggcgcgaggcataactctctaatgtatgcgtcacgagtgagatcaattgtgaacgatccgagcaaaaatgtttcttccaaagagatagctcgactaaagaaaatgattgcatattggaaggagcaagcaggtaggagaggagacgatgaagatttggaagaaatccaagaagaaagacaaactaaagagaggactgatggtaggcattctatgtagtaactctaggcaaataggaacactcacaaatagcccacaaaacaggattttgaaatgttgtgtgatcagttcccactcaacaagatagcacaggcttgataggttgtaatttttctgagggatgcaagatgtatagttgaattatgtacatatatttttagtattttaactcgttcacatataaaaaagacacttgttaaaaaaaagtattaatgac

SEQ ID NO: 1253 - DNA, 1673 bp, Glycine max
  misc_feature (21)..(21): n is a, c, g, or t
  misc_feature (102)..(102): n is a, c, g, or t
  misc_feature (111)..(111): n is a, c, g, or t
  misc_feature (115)..(115): n is a, c, g, or t
  misc_feature (134)..(134): n is a, c, g, or t
  misc_feature (140)..(140): n is a, c, g, or t
  misc_feature (143)..(143): n is a, c, g, or t
  misc_feature (145)..(145): n is a, c, g, or t
  misc_feature (186)..(186): n is a, c, g, or t
  misc_feature (327)..(327): n is a, c, g, or t
  misc_feature (423)..(423): n is a, c, g, or t
  misc_feature (631)..(631): n is a, c, g, or t
  misc_feature (967)..(967): n is a, c, g, or t
  misc_feature (971)..(971): n is a, c, g, or t
  misc_feature (1151)..(1151): n is a, c, g, or t
  misc_feature (1244)..(1244): n is a, c, g, or t
  misc_feature (1264)..(1264): n is a, c, g, or t
  misc_feature (1318)..(1318): n is a, c, g, or t
  misc_feature (1334)..(1334): n is a, c, g, or t
  misc_feature (1336)..(1336): n is a, c, g, or t
  misc_feature (1407)..(1407): n is a, c, g, or t
  misc_feature (1421)..(1421): n is a, c, g, or t
  misc_feature (1427)..(1427): n is a, c, g, or t
  misc_feature (1429)..(1429): n is a, c, g, or t
  misc_feature (1559)..(1559): n is a, c, g, or t
  misc_feature (1561)..(1561): n is a, c, g, or t
  misc_feature (1567)..(1567): n is a, c, g, or t
  misc_feature (1570)..(1570): n is a, c, g, or t
  misc_feature (1639)..(1639): n is a, c, g, or t
  misc_feature (1673)..(1673): n is a, c, g, or t
  Peptide Sequence Number=SeqID_9604
  Probeset Number=SeqID_11032
gagagatagggtggtagaggngggggaggaagaagaggttaaagaggtgcacggcgggtgagtggggcgcggccgtgggagggatgcgcctgctgagtgganaggagaganattntgagtagatggtattgccngcgccnccncngcaacgataggtgtgagagtgaggggacgcacccctattancataacaagcaccaagctatacaagcatgggccgccacaccgcccgcggcgcacatcgcagagcgtggtgtgcgatcgttggtggtgggtctgtgtcatgcaggctgagaggcgcgtctgttagattgtgtgttgtaatgntgaatggacggctatcagtgactaatatcaaatgagatggcagaccaagcatgtgatgacagaggacatttatctcagtgcgtctaatgtcttcgnacaacgcattaagcttcaggataggtgggtcggagaatatgaacggtgagggctggcagtcaccgtccgcattgtctgggggtgtattaaggattacgcggggaagagaggagccactcctaagcggtgagaaagagatgtaggaattatagagtataacagagatacgcgagatagtgacatcagaggactcaaaaccgaacagagncgcgacaagagtatattgatgcagtgtgtattaagtcttatcgctaacacgctagagaattatgtatatgtattgtgcttcgtgagtggtgcaggtatgttagtgtaataatagagccgcatgcacttcgtgcgcgcgacactcagaacgcgatgatgagacatatgagtaatgattactctatgactcgaatgaactcatattgctcgtccgtagtatatgaggggataccagcataagacgcactagtatatatgagatcgagaagaagatgtggagagatgtgactactatatgtcgacggtataagtcgatacgcgcagagagcgaagatangaantgatatacgtgagtcgctgttctgatcatattgagatagagtcgaacgcgatgcgtctgtgcgaggaggttagagaagatatatactcgcagggcacgacgttatatagaagtaggtatatcacgatatacttacggcgcgccgatagctcacgcttgtgacaatcccagctcaagtaangtgtgagagctgtataattgcgccgttgatgatgatgagaactatggcactggcgtgtatatggatgagatgacaaacgtatcatagctgtgncacacgatgtaagtgatcgngcgcgtgcgggaccattcatgtggtgacggcgcacgtcggtatcagtgctcatntctcgatcgatcaatngnactgagcgctacttcagtatgtcgatcatctatagtatacagagagaggcatcgcgatgcatatgatgatnagtcgctgttgatncgtgtncncgatcgatatagatacgcgatgattgacttgtctgcgggatcttatatctgaatgtcatgctgaacgacgctacgtcatcatcagcgcgagaagatagcatagtacatatgtgtgacgcgatagcagtgngncatgcncancgctgatgagcgtgtcgtgcggtgataatctctgatgtcacgctcactaagaatgaatgccacgactgntagtatagacgaactccatgcatctcgatagctn

SEQ ID NO: 1254 - DNA, 1453 bp, Glycine max
  misc_feature (1)..(1): n is a, c, g, or t
  misc_feature (3)..(3): n is a, c, g, or t
  misc_feature (5)..(5): n is a, c, g, or t
  misc_feature (116)..(116): n is a, c, g, or t
  misc_feature (518)..(518): n is a, c, g, or t
  Probeset Number=SeqID_11033
ncntntatggcacgcggcgcgttagcgcggtttagcatagccggcgctcttataacatacatatgagcgcgcgcggaactgcgagtgcgggcgactgccatacgtattgttaccantatttatgtctccgttctcgtgccgcgaggtcgcggtcaacgcgccatgccactgctctctttgaatattgatacccgcacgcgctgccgtcgaccccaatattatactccgtcgccgacgcccatccagcgtgcgcgtccggcgctacacgctagtgagatatgctctattatgtacacacaaggtagtggtcgcagaaattacttaagttacatgataccgcacacgtgtcgatattacaccaacgcgcgtgaggcgggatgagacgggacatatcgcgcgctaagagactctgctgcgtgcgtcgctatctcgaatcgcgggtgcctctcttgcacggacataacaacgtgaatatccgaccgtatgcagggcgggtgtatatctacctacgttgggtnccaatcatgactcgttagttatattcaagtcgcagctcgtcgcgtctggtgtagtttacggccagcgcatcactacaatatatgatacgtggcatctcctcctacaacactagtacctcgcgacagcacgcatacgcggtctatccgtctatctcatagttgatgtgacataccaaccaaagcggagcgcacgaaatagatgtacgtggcgccgcggagcacatcgtttaggtgatactgtgcgcggatatctatacgcgaatatgcggtacggatgacttcctggcgcggcgtgtgctctcacattccgcgtcgcagatcgtacgcacgccggtcgcgcgaatgacgaccaacgtccatccgaccgccgccgccacacgcaatatgcagtaatcgccgccgcacgcgactgaggtccttgttcggcgtcatatactaattcggccctcaataatatacgaagaggctgacgtagaaacggctcagcgcacacgacgtagcgcgtgtctggtttgtcgagtcacgatacgcaagcgtgaatctatacgggttcgacaatgcgaataatatggtcgggtgcagttgtgcgcatgggctcgttataacacagccattttatacggtgtcgctactggtatgagtgtgcatcgcactagaccatgagcgccgctgactcatcgtgttctgttgatttggtaatgaacaattatatataggaggtgctaagtgtgtattgtggttgcggagcggtataagcccagtaaaatacgccctgcccgcgcctgtataagtaatcatgatgcgcacatcaataccgatatcagagaatataagtataggctcaccaccccccgccgcgttatgaaagggcgtcggtgcggcggatcgcgccaccaagtggcgcgcgtgtataatctactggtggggggcgcacc

SEQ ID NO: 1255 - DNA, 513 bp, Glycine max
  misc_feature (18)..(18): n is a, c, g, or t
  Peptide Sequence Number=SeqID_9605
  Probeset Number=SeqID_11034
tcgagtcagctacgtagngccccccccccaaataattatttaaccttcacaatgcaaaacgctgttgccgcattacccaaaggtcatttcctctttaccagtgaagctgttaccaacggccatcccgacaaactctgcgatttcatctcagattctgtcctcgatgcttgccttactgtcgatcctgacgccaaagtcgcttgtgaatctgctgtcaaatccaacgtggtcatggttttcggtgaaatcacctgcaaagccgagctcaactatgaacaaattgttcgtgaagctattaaaaacgtcggatatgactctgtagataaaggtatggactataaaaactgcacagttatcgtcgctatcgaacaacaatctccagaaatcgccgaatctgtccatttacacaaaaaagaagaagattatggcgctggtgatcaaggccttatgattggttatgcttgcaatgaaacccctgaatatatgcctcttacccatcaactttctctcgct

SEQ ID NO: 1256 - DNA, 426 bp, Glycine max
  Peptide Sequence Number=SeqID_9606
  Probeset Number=SeqID_11035
cgggacgcgtgatgaggagtagcgcttgctgacaaagagtgcgtaggtatgatacgatcgactctcgtacaccgggagcgtgggcgtgatacagagaagacgggtggtacgaggcataggagagctggaggagaaaggacatttgactcgaggcggacatcactcgcgaaggcgggtcaaggacacgggggagtgcaagcagccggaggccgacaagagtgcaggagcgcaccggcctgcaacgagtacgcgattaaccgtcggatgtgaacgcggcagtatgcgcggcgggtatggcgccccaccccaaccgaaatgcggcgaggcgacgagaaagcagtcggatggagggcccccacggccgcagcggggggcatcgccgctcgcgaggaggacgacccatccaaaaccttattttggggtttt

SEQ ID NO: 1257 - DNA, 1856 bp, Glycine max
  misc_feature (1)..(1): n is a, c, g, or t
  misc_feature (31)..(31): n is a, c, g, or t
  misc_feature (39)..(39): n is a, c, g, or t
  misc_feature (64)..(64): n is a, c, g, or t
  misc_feature (66)..(66): n is a, c, g, or t
  misc_feature (72)..(72): n is a, c, g, or t
  misc_feature (75)..(77): n is a, c, g, or t
  misc_feature (153)..(153): n is a, c, g, or t
  misc_feature (155)..(155): n is a, c, g, or t
  misc_feature (161)..(161): n is a, c, g, or t
  misc_feature (234)..(234): n is a, c, g, or t
  misc_feature (246)..(246): n is a, c, g, or t
  misc_feature (297)..(297): n is a, c, g, or t
  misc_feature (390)..(390): n is a, c, g, or t
  misc_feature (414)..(414): n is a, c, g, or t
  misc_feature (469)..(469): n is a, c, g, or t
  misc_feature (472)..(472): n is a, c, g, or t
  misc_feature (503)..(503): n is a, c, g, or t
  misc_feature (561)..(561): n is a, c, g, or t
  misc_feature (629)..(629): n is a, c, g, or t
  misc_feature (660)..(660): n is a, c, g, or t
  misc_feature (701)..(701): n is a, c, g, or t
  misc_feature (730)..(730): n is a, c, g, or t
  misc_feature (749)..(749): n is a, c, g, or t
  misc_feature (762)..(762): n is a, c, g, or t
  misc_feature (790)..(790): n is a, c, g, or t
  misc_feature (885)..(886): n is a, c, g, or t
  misc_feature (900)..(900): n is a, c, g, or t
  misc_feature (903)..(903): n is a, c, g, or t
  misc_feature (909)..(909): n is a, c, g, or t
  misc_feature (919)..(920): n is a, c, g, or t
  misc_feature (922)..(923): n is a, c, g, or t
  misc_feature (928)..(930): n is a, c, g, or t
  misc_feature (937)..(937): n is a, c, g, or t
  misc_feature (942)..(942): n is a, c, g, or t
  misc_feature (952)..(952): n is a, c, g, or t
  misc_feature (958)..(958): n is a, c, g, or t
  misc_feature (963)..(966): n is a, c, g, or t
  misc_feature (987)..(987): n is a, c, g, or t
  misc_feature (990)..(990): n is a, c, g, or t
  misc_feature (993)..(993): n is a, c, g, or t
  misc_feature (1015)..(1015): n is a, c, g, or t
  misc_feature (1028)..(1028): n is a, c, g, or t
  misc_feature (1052)..(1053): n is a, c, g, or t
  misc_feature (1057)..(1057): n is a, c, g, or t
  misc_feature (1060)..(1060): n is a, c, g, or t
  misc_feature (1074)..(1075): n is a, c, g, or t
  misc_feature (1091)..(1092): n is a, c, g, or t
  misc_feature (1108)..(1112): n is a, c, g, or t
  misc_feature (1124)..(1124): n is a, c, g, or t
  misc_feature (1164)..(1164): n is a, c, g, or t
  misc_feature (1166)..(1166): n is a, c, g, or t
  misc_feature (1207)..(1207): n is a, c, g, or t
  misc_feature (1215)..(1215): n is a, c, g, or t
  misc_feature (1220)..(1221): n is a, c, g, or t
  misc_feature (1224)..(1226): n is a, c, g, or t
  misc_feature (1260)..(1260): n is a, c, g, or t
  misc_feature (1273)..(1273): n is a, c, g, or t
  misc_feature (1276)..(1277): n is a, c, g, or t
  misc_feature (1280)..(1280): n is a, c, g, or t
  misc_feature (1283)..(1283): n is a, c, g, or t
  misc_feature (1313)..(1313): n is a, c, g, or t
  misc_feature (1323)..(1323): n is a, c, g, or t
  misc_feature (1342)..(1342): n is a, c, g, or t
  misc_feature (1350)..(1350): n is a, c, g, or t
  misc_feature (1390)..(1391): n is a, c, g, or t
  misc_feature (1416)..(1416): n is a, c, g, or t
  misc_feature (1435)..(1435): n is a, c, g, or t
  misc_feature (1449)..(1450): n is a, c, g, or t
  misc_feature (1473)..(1473): n is a, c, g, or t
  misc_feature (1477)..(1477): n is a, c, g, or t
  misc_feature (1498)..(1498): n is a, c, g, or t
  misc_feature (1502)..(1502): n is a, c, g, or t
  misc_feature (1545)..(1545): n is a, c, g, or t
  misc_feature (1549)..(1549): n is a, c, g, or t
  misc_feature (1566)..(1566): n is a, c, g, or t
  misc_feature (1568)..(1569): n is a, c, g, or t
  misc_feature (1607)..(1607): n is a, c, g, or t
  misc_feature (1631)..(1631): n is a, c, g, or t
  misc_feature (1633)..(1633): n is a, c, g, or t
  misc_feature (1637)..(1637): n is a, c, g, or t
  misc_feature (1672)..(1672): n is a, c, g, or t
  misc_feature (1679)..(1679): n is a, c, g, or t
  misc_feature (1718)..(1720): n is a, c, g, or t
  misc_feature (1748)..(1748): n is a, c, g, or t
  misc_feature (1759)..(1759): n is a, c, g, or t
  misc_feature (1774)..(1774): n is a, c, g, or t
  misc_feature (1776)..(1776): n is a, c, g, or t
  misc_feature (1788)..(1788): n is a, c, g, or t
  misc_feature (1856)..(1856): n is a, c, g, or t
  Probeset Number=SeqID_11036
ntttttttttctctccttcctaccttttccntcctccgngtgtcctcgctatcacactacctcnangtaagnggnnngttatttacttctgatgagtgatatgatagataagtggagagcgatacaacaacacataatactaatcctacatancncaacancacactaggactcgcactcggccgacagcccgtctcgctgaacgcttgaagcacgacaatatgcgcatatatngtagccatgctntctaataacctacttctctactatgcactctgctctctatacggaactcgntctctatactcgcatgctatctccacacacacgcgcgtggcacacaccgtcgctagtatatagagtaataattagctggaacagatagacttntgacataccgctgagaagttagtntgtagcttaatataatcagtgtaagatatgaaatatgctcaccatgagcctagangtngagtacagtagttcacaataagatacacaancaatgagagtatagaagctgctcctctctacgacaggaacggccgtactggaggaggngataccatgatcatacataacgatcgtttcatctacgcatagctatcagatgcgagtggcatagcacngcctggctccgccgcactcatgcatcgtctncttcatagtgtgacggtagccggcacgtcttaccgcgcacngccgctgactcatatatgtctctcatacntgtaccagaccatagaggnagcagcaagccangcgtacatatgtgcgcgtacacgtgcgnttgcgtactgcatgactcgtctagacgactcgataacggacatagttgtgatggagttgtatggattgtagtaatgtatattatattatatttannttttgataggggantcncggggnagaaataaannannacgcnnnggacacnagacnagacccaccncaaaangtaannnntaagaaaaacgaacgagatanagngantacatatagatattatatgtantactattgtacgngatgcttttctttctccacccaannacanganacgcgtcgagcacnncatacaaccacgatgnngatgtaccaagcatannnnnctcacagcacgngaggacccgcacacacactactacgtacagcatcactcancntcctgtctcctccctagctgcacgcactccgcatacgcacncgcgcctntatcnnccnnncgtcgatcatcactcataacatatcgaactactnacatgataatcangcnncancangcactagtaaactactctgcgtgcacgcanccgagtatgngttcgcaagtcgacatgtntcatctanctacgctactactcaactagcaagacgacagcatcgtcgnntgctcggctcgatagctcgagtggnaacacattactagcgtaantcgatatcgatacnnatcgtcactactatactgactangttnatacgtgaaaccatgcacacnctgncgcgagttgtcgctgtcgtgttacgggatgtatcatattatanaaantacacggcgatgtgtgngnnatgcatcgctttatgcgatatactatgccgtgtgtcgntgctgtctgactatcatgacgacncngtcntctctatcgtctcgtcgtagcgtacagtacgacanatagctnacatgagtgctgcactacaccacttgtacagcagacacnnnacacacactatctcgcccagatagtggncgactcagtangttactgtcgcaacntnataatcgtttgnggctgtcagcaacgactgcatgcataccgacctacgcgctctgacagctactacgtatggcgcctacn

SEQ ID NO: 1258 - DNA, 1485 bp, Glycine max
  misc_feature (1)..(1): n is a, c, g, or t
  misc_feature (147)..(147): n is a, c, g, or t
  misc_feature (179)..(179): n is a, c, g, or t
  misc_feature (278)..(278): n is a, c, g, or t
  misc_feature (296)..(296): n is a, c, g, or t
  misc_feature (321)..(321): n is a, c, g, or t
  misc_feature (459)..(459): n is a, c, g, or t
  misc_feature (481)..(481): n is a, c, g, or t
  misc_feature (599)..(599): n is a, c, g, or t
  misc_feature (769)..(769): n is a, c, g, or t
  misc_feature (782)..(782): n is a, c, g, or t
  misc_feature (785)..(785): n is a, c, g, or t
  misc_feature (822)..(822): n is a, c, g, or t
  misc_feature (869)..(869): n is a, c, g, or t
  misc_feature (897)..(897): n is a, c, g, or t
  misc_feature (1012)..(1012): n is a, c, g, or t
  misc_feature (1099)..(1099): n is a, c, g, or t
  misc_feature (1232)..(1232): n is a, c, g, or t
  misc_feature (1267)..(1267): n is a, c, g, or t
  misc_feature (1342)..(1342): n is a, c, g, or t
  misc_feature (1355)..(1355): n is a, c, g, or t
  misc_feature (1357)..(1362): n is a, c, g, or t
  misc_feature (1382)..(1384): n is a, c, g, or t
  misc_feature (1386)..(1387): n is a, c, g, or t
  misc_feature (1396)..(1397): n is a, c, g, or t
  misc_feature (1401)..(1405): n is a, c, g, or t
  misc_feature (1407)..(1407): n is a, c, g, or t
  misc_feature (1409)..(1413): n is a, c, g, or t
  misc_feature (1416)..(1417): n is a, c, g, or t
  misc_feature (1420)..(1427): n is a, c, g, or t
  misc_feature (1446)..(1448): n is a, c, g, or t
  misc_feature (1468)..(1468): n is a, c, g, or t
  Peptide Sequence Number=SeqID_9607
  Probeset Number=SeqID_11037
ntgcgccgcttacagcacgcgctcacacgtcatcagcgcagagtcagtgcgcgagtcggacagcgccgcgacagacacacactcgatctcaattgctctatacgcacgacgaggtcacccacgcatcacgacgtcgccagccacacngcgcgcgccgtgtccgctgagacgtgcagcgncgcatccggcgcgtgtgcgcgttgcgtggggtgtcatcctaggggtgtgggagtgtatgtggtgagatgtgtaggagacgctgctgtgtcgacgcgcgntagagagtgggacgtagnaagataggttgtgttacgtgacttngtggtgatgcagtataatgcacgtattcgagccgggcagtgtgcgcgcggtgagagggcgccactatcatatcggagttgggtggcgtgtgcgcgtcacttgtgcgagtggtgaggatgcattcagtcgcagcgggcncctgctcacgtgcgtctctgcntgcctcggtagcgctgtgtgcggagggtgtgcgagatagactcttctcacacatggtgggtcgggccgcgtgcggtgtggggtggtgttggtcctgccgtcagcgtgtggcaccgcancgcccgttctccgcggactatggcgggtgtggtgtgtcgtctacacttcatcgtcagcgtccgcgggaggggtccggctcgctcgcatctagtgatgtgcgtcgtcttcatcttgtacgtgattgaaattagtacttcatcacttatattgtgtaaagaatgaatacccnttcgttctcgctnttnttagctacctacctctctgccacttctcttcttcatnttcctctctacctccctctgcgtgtatagtattagataattattatntttatatgttataattttatcctatctntacctctttctctctttctcactgttctctctccgttgttggtgctcgtcttggccgctgctgcgtttgtgccctctcgtcagtgcgctctccagtatcattagtataattgtantttatattatatattgtatataatacctacaggcggttatgacttatattatatacttccttcagagatacctattagagatatatnatgccatacttatttctatgcgtactaatagttctaactcatccaccgcgttttcgcgcgcgagtttcctcgctggttgcctgctactgccgcgaaactaaatatttgttgagaccaccactcaccaccatanctcatggaccaacctgctacaacaacacacactangccggctgagcgacgtgctccgcccccctcgccgcccaccaaagagaagacacacacacaaaatataataagaancaaaacacaaccntnnnnnnaaataataaatacactatcnnnannaagtcgtcnnctgnnnnngngnnnnnacnnaannnnnnnnaacaccaaaaaccaaaccnnncaccacaccaccaaacaccnccccacaccccccccac

SEQ ID NO: 1259 - DNA, 834 bp, Glycine max
  misc_feature (426)..(426): n is a, c, g, or t
  misc_feature (428)..(428): n is a, c, g, or t
  misc_feature (432)..(432): n is a, c, g, or t
  misc_feature (441)..(442): n is a, c, g, or t
  misc_feature (444)..(444): n is a, c, g, or t
  misc_feature (449)..(449): n is a, c, g, or t
  misc_feature (452)..(452): n is a, c, g, or t
  misc_feature (465)..(465): n is a, c, g, or t
  misc_feature (468)..(468): n is a, c, g, or t
  misc_feature (474)..(474): n is a, c, g, or t
  misc_feature (481)..(481): n is a, c, g, or t
  misc_feature (483)..(484): n is a, c, g, or t
  misc_feature (487)..(487): n is a, c, g, or t
  misc_feature (489)..(489): n is a, c, g, or t
  misc_feature (496)..(496): n is a, c, g, or t
  misc_feature (500)..(500): n is a, c, g, or t
  misc_feature (506)..(506): n is a, c, g, or t
  misc_feature (508)..(508): n is a, c, g, or t
  misc_feature (517)..(517): n is a, c, g, or t
  misc_feature (528)..(528): n is a, c, g, or t
  misc_feature (532)..(532): n is a, c, g, or t
  misc_feature (537)..(537): n is a, c, g, or t
  misc_feature (542)..(544): n is a, c, g, or t
  misc_feature (553)..(553): n is a, c, g, or t
  misc_feature (557)..(558): n is a, c, g, or t
  misc_feature (561)..(561): n is a, c, g, or t
  misc_feature (566)..(567): n is a, c, g, or t
  misc_feature (569)..(569): n is a, c, g, or t
  misc_feature (571)..(571): n is a, c, g, or t
  misc_feature (576)..(576): n is a, c, g, or t
  misc_feature (581)..(582): n is a, c, g, or t
  misc_feature (585)..(585): n is a, c, g, or t
  misc_feature (587)..(587): n is a, c, g, or t
  misc_feature (599)..(599): n is a, c, g, or t
  misc_feature (602)..(602): n is a, c, g, or t
  misc_feature (607)..(607): n is a, c, g, or t
  misc_feature (609)..(609): n is a, c, g, or t
  misc_feature (618)..(618): n is a, c, g, or t
  misc_feature (624)..(625): n is a, c, g, or t
  misc_feature (633)..(633): n is a, c, g, or t
  misc_feature (640)..(640): n is a, c, g, or t
  misc_feature (644)..(645): n is a, c, g, or t
  misc_feature (649)..(649): n is a, c, g, or t
  misc_feature (652)..(652): n is a, c, g, or t
  misc_feature (674)..(674): n is a, c, g, or t
  misc_feature (685)..(685): n is a, c, g, or t
  misc_feature (687)..(689): n is a, c, g, or t
  misc_feature (691)..(701): n is a, c, g, or t
  misc_feature (703)..(703): n is a, c, g, or t
  misc_feature (710)..(711): n is a, c, g, or t
  misc_feature (714)..(714): n is a, c, g, or t
  misc_feature (721)..(721): n is a, c, g, or t
  misc_feature (723)..(723): n is a, c, g, or t
  misc_feature (725)..(725): n is a, c, g, or t
  misc_feature (737)..(737): n is a, c, g, or t
  misc_feature (739)..(740): n is a, c, g, or t
  misc_feature (743)..(743): n is a, c, g, or t
  misc_feature (750)..(751): n is a, c, g, or t
  misc_feature (767)..(767): n is a, c, g, or t
  misc_feature (770)..(770): n is a, c, g, or t
  misc_feature (773)..(773): n is a, c, g, or t
  misc_feature (790)..(790): n is a, c, g, or t
  misc_feature (795)..(795): n is a, c, g, or t
  misc_feature (798)..(798): n is a, c, g, or t
  misc_feature (807)..(807): n is a, c, g, or t
  misc_feature (814)..(815): n is a, c, g, or t
  misc_feature (826)..(826): n is a, c, g, or t
  misc_feature (830)..(830): n is a, c, g, or t
  misc_feature (833)..(833): n is a, c, g, or t
  Probeset Number=SeqID_11038
actgagggactctctagctagcacctctctctattctctccctaagtgactcctacttcataatcagagggcatgcctgaatgtccagagaaagggagagatttgatgagatagggaagaagatcaagagggaaggagatgtttcatctcaaatgggaagaagacacatgttaggccctccaggaaccctaaatactatcaccccttgtgcggcatgtaagttgttgagaagaagatgtgcccaagaatgcccccttttttcttatttttccccccatcaccccggggaatgggggtcggttcccatacctgttccccccagctcctttcgcaagccgcgcatgcctcttcaaaagtatgttataccggtacccccccacaggctctcatatgcgcgttaatgtcgtcccacagacatcctgcgtnanttcnaggcctttnncngcctncgntccccacgatccntcncctccncttcctntnntcncnacgcgtncccnttcccncntgtttctcntccccttcgcnagcnttttnatctnnntttttccanccgnncanttcannantncgccnttctnngancngtataccccccnccnacccntntaccccctnccttcnnccctcttnttctccncctnnacantcncatttttcttcccgcctctatnttttcccccgncnnntnnnnnnnnnnntnactcttnnccncattctntncnactccctctcgntnnctncttttannaccttgttcccgtcantcngcncgtccgtatcccgcttnctctnttntgcacctcnacttcanntctattattcncccntcnc

SEQ ID NO: 1260 - DNA, 1450 bp, Glycine max
  misc_feature (1)..(1): n is a, c, g, or t
  misc_feature (11)..(11): n is a, c, g, or t
  misc_feature (267)..(267): n is a, c, g, or t
  misc_feature (583)..(583): n is a, c, g, or t
  misc_feature (1288)..(1288): n is a, c, g, or t
  misc_feature (1290)..(1290): n is a, c, g, or t
  misc_feature (1323)..(1323): n is a, c, g, or t
  misc_feature (1376)..(1376): n is a, c, g, or t
  misc_feature (1417)..(1421): n is a, c, g, or t
  misc_feature (1424)..(1426): n is a, c, g, or t
  Peptide Sequence Number=SeqID_9608
  Probeset Number=SeqID_11039
ncacatatctnctgcgcgtgtggttgatagcctccgcgcctggcgctccgctactccggttgatgtgcttcacgacatacatgtgtatatgtccagtagtattgagagcgtgcggcgagcaactgcaggtgagtagatcgcgcgaggcaggaagggcacgcgccatcgacattctcgcgcagcgtagcagctacttccatgtgatcgcagatagtacgggtgcgcggtctgtagctcattattagttctacacaccgactgacggcnctataggtgtgtctcatgtgtgcttcggttgcgctgtttgccgttcttatgttttctcttgccacactcggccggagggcggggactggcggtggagcgctacacatctcgatagcttccggtactaggtggatctcttatatgggcagtgccgcggcaagaaatacggcgtctgtacatacagaaacactattcttacatcattctattggcacagtgttcggtatcttagtgtgcgggattctgtgttctcgtgtgcacagtcctagagcacatatggttatgtgattggtggtgggcgggtgctgtttcacantaactgttcagcgcacataggtatcacgccggataagtcgcgtgtggatgagtgagcgtcgccgaccacactcgtcctcggcggttggtgcgcgttggtcatcgttggctggctgttacgcttggtccgcacgtttctgctggagcggccttcttgatgtatgtggtgttgttttttaatattgtacgccacgacacccaacacggatcagaggcggtgaccagctgctccgcaccctatctcttgtatagagagtggcggtggggacgtcagattgtgagatgtcaggtgtggtggggtggtcgctcttcttccgcccccccggtgcgctccgccccgcgcctcgtgtcttctagttttatctgttattcctttttttctccaattgttgagatattattctgaacactgatgattttcatacagataatatcgcgtaaacaaaagagaccgtcggcgagcggaatcgtcacagtaaaacaaataagtcatggaatatcaatgcgtgccagagcccgcttgacacagctctggggagcgggacgggtttgggttgctttttgggtggggtgtgagttatcatctatgaggtgttaattacaatatgcaccccttcccaccacgaccacgagaacaaaccgactatgatacatatttatgcaatggaaggactagacgttgtttctgtgtctcgaccccgcttgntntgtgattgtttattttggtggttgtggccccgnggggcagtatatacagtggcatactcttgtgttttttgggtgggtgcgtggtnggggggcagcgccccacggaagggaagagaacggggaaaannnnnaannnggcggcccggcggacacaaaaaca

SEQ ID NO: 1261 - DNA, 1634 bp, Glycine max
  misc_feature (1)..(28): n is a, c, g, or t
  misc_feature (1634)..(1634): n is a, c, g, or t
  Peptide Sequence Number=SeqID_9609
  Probeset Number=SeqID_11040
nnnnnnnnnnnnnnnnnnnnnnnnnnnncgcggccgcccgatggagatcgacccgctcgtcaccgtggtgcaggagatgggccgcttgaccggtcgcccgacgccggcgctggattcggtgctggcgatggtgacccagcgcgcccgcatcgccggcctctatgacggcgtctccgcgcccgcggatcctcgcgcgctggcggtggcgtgatggcgggcgagacaaaaaagtggctgcgcttccgccacgccggcaccaccggcttcggcacgctctccgcatccggcatcagcgtgcatgagggcgagatgttcggccgcaacgccgccaccggcaggatgctggcgctgccggaggtcgagctgctggcgccctgcgcccccagcaagatcgtcgcgctctggaataattttcacgcgctcgcggccaagctcaaccagccggagccgcctgagccgctctatctgctcaaggccaccacgaccatcacgacaccaggcgccgtgatccgccgcccgtcctattacgacggcaagaccacctatgaaggcgagctcggcatcatcatcggcaagacctgcgcgcgcgtctcgcccgatgaagccgacagcttcatcttcggctacacctgcgtcaacgacatcaccgccaacgacatcctgaccagcgaccccacctttccccaatgggcccgcgccaagggcatcgacgattacggcccgttcggccctgtcatcaccaccggcctcgatccggccaggctcaccgtccgcaccatcctcaacggcgccgagcggcagaactatccgatctccgacatgattttttccgcgcaagccctggtgagcaagatctcccatgacatgaccctgcttccgggcgacctcatcgcggtcggcacctcggtcggcgtcggcgtgatgaaggagccggtcaatacggtgacggtcgcgatcgacggcatcggcgagctgaccaacgagtttcggttgtagccccgacgtcattccggggcgcgcgtagcgcgagctacggtgccaattgcgaacctgagaatccactcccctaccgtctctgctgctcgatggattccgggctcggcgctttcgcgccgccccggaatgacggctaagccgcccacctccacccgaccggccgacgcaaccagccgtggatcgcgcctccggacacgcccagcaacccgtccgccccttgatctcggttccactctccaatagcaatcatggcgaaaatatgcaccggcgtggggcgtcgcgatgtggctgtttttcctggctgcctggtttgtcctgctcgccgccatcgcgctggtcgccccgcaggcgtttggcctggacatcacccatttgcccgccctgttcgcgagccagccgatgccacagcgcatcgcgatcggtgcgatcctcgtggccgggctgacgctgatcggcgcctcggcctggcggctctcgcgccaggaccggcgcctcgacacgctccgtgatcgcctcaagaagacccgggaagacgtcgtcgtcgcccatgccttacagaaccatctcgacaccacggtccagcacctgatcgagagcgatccccgggaggccgtgtccgcactgcacgacaagctcgn

SEQ ID NO: 1262 - DNA, 1774 bp, Glycine max
  misc_feature (16)..(17): n is a, c, g, or t
  misc_feature (19)..(19): n is a, c, g, or t
  misc_feature (28)..(28): n is a, c, g, or t
  misc_feature (30)..(32): n is a, c, g, or t
  misc_feature (43)..(43): n is a, c, g, or t
  misc_feature (56)..(58): n is a, c, g, or t
  misc_feature (72)..(78): n is a, c, g, or t
  misc_feature (80)..(80): n is a, c, g, or t
  misc_feature (82)..(85): n is a, c, g, or t
  misc_feature (87)..(88): n is a, c, g, or t
  misc_feature (106)..(106): n is a, c, g, or t
  misc_feature (703)..(703): n is a, c, g, or t
  misc_feature (872)..(872): n is a, c, g, or t
  misc_feature (920)..(920): n is a, c, g, or t
  misc_feature (1099)..(1099): n is a, c, g, or t
  misc_feature (1124)..(1124): n is a, c, g, or t
  misc_feature (1198)..(1198): n is a, c, g, or t
  misc_feature (1238)..(1238): n is a, c, g, or t
  misc_feature (1311)..(1311): n is a, c, g, or t
  misc_feature (1491)..(1491): n is a, c, g, or t
  misc_feature (1496)..(1496): n is a, c, g, or t
  misc_feature (1572)..(1572): n is a, c, g, or t
  misc_feature (1596)..(1596): n is a, c, g, or t
  misc_feature (1774)..(1774): n is a, c, g, or t
  Peptide Sequence Number=SeqID_9610
  Probeset Number=SeqID_11041
tttttttttttttttnntnttttttttntnnntttttgttttngtttttttttatnnnattatgtatttaannnnnnnantnnnnannaaaaaaggaaatctattnaatactaaaatattataagtagttttattatttattattacattagtgtattatatttttattatatttatatgtagatagtgtataaataaactatataagtgagttgtcttaatgtatctactaaatatcaatgtatactatcgatcaccgcttatatatcgtacatgttatttgctcgctttacagttgtacggtacaatagatatagacgcgtgtcctgttatgatcatacgatgcgatcactcattgcgttctgcctctcgcccgtgtgactcctcaatctacatggtctctcttctgcagcccacgcgccccacgccgcgcacttccgcgcctgacatccgccaccgcaccggcgcacagactccaacacttacaacggccgacgagcagcaatctagagactgtgactcatgtacttgaatatctgcgcgcggagggaaatcttctagtatatcaggtacgcgctgcactctagtctgtgggtggtgcgctgtagtctctagtggtaattgtctgctatgtctctctatctcgccctcgcgctctcgttcgtatcacacgccacacgtcccatacctcctaggatgttcnatgaattttctcgcagtgagtcgacagtctatctcgcacgctcttcactatgtattaccatctcgacggatgcacataagatgcttatgtagtcgcacgattgctgtacttcgatctctctatctatacgtctccatgaacggtcgacatatagtgtgcatactagtgnctcacctcacacgttgcatctcactcctcacgcccgcgcacgccgtantcgagcgcatgatgatatctattcgacgtactgacaccgtcacgattgacacatgcactcgcactgcgcactcatccatatgtactctcgtatctggatgctctgattgctgtgtcttctgtactgtctcctgttctatctctcgttgtcgatattatgctgctgtgtgctttgtattncgtacgcttatatacacgtgtgtgnatgcgctgtcgtctctgctgtcgcttgagtctcgatctgctggtgcgctctctgtctgtgctcagtctctatgngccgtacgtcatctgcgtgctcgcgcgcggtggcgccacngcggcgcgtactctgcgtcatcgtctctatcgcgcgtgtacacattgctgtgctctcgcgtgccttgcctgcngcgcggcgcgaccgccgcgcgcgctcgatctccgcgcctgccgtcatcgacactatctccctctccgtcgtgcgttgcgatcgcgatgacgacacgaggtgcacgtgtacacgacactactcgtcgatccagatgatatacacaatattagtgcatcggtgtgtaggaaagcagctgagntgctnagtcgtgaggatacgcggctactacgtagttcgctactgacaagtatagacgtcattccatcctacacacatcaangatatatcatactcatcacatatntatcactgtcctacgttatcatacgacccgcgacatgacaagcgatcactctgatatgtcgacgacccctactctttcgctcgcggtctactctcgtcgcgtccactctcacctgatgcgcctgcctatcatcactcctatcgtcttgcgcggcgcatacctcgcctactatctatcn

SEQ ID NO: 1263 - DNA, 1464 bp, Glycine max
  misc_feature (1)..(1): n is a, c, g, or t
  misc_feature (17)..(17): n is a, c, g, or t
  misc_feature (19)..(19): n is a, c, g, or t
  misc_feature (638)..(638): n is a, c, g, or t
  misc_feature (713)..(713): n is a, c, g, or t
  misc_feature (875)..(875): n is a, c, g, or t
  misc_feature (897)..(897): n is a, c, g, or t
  misc_feature (960)..(960): n is a, c, g, or t
  misc_feature (982)..(982): n is a, c, g, or t
  misc_feature (1022)..(1022): n is a, c, g, or t
  misc_feature (1081)..(1081): n is a, c, g, or t
  misc_feature (1302)..(1302): n is a, c, g, or t
  misc_feature (1327)..(1327): n is a, c, g, or t
  misc_feature (1390)..(1390): n is a, c, g, or t
  misc_feature (1416)..(1416): n is a, c, g, or t
  misc_feature (1464)..(1464): n is a, c, g, or t
  Probeset Number=SeqID_11042
ntttattttccctttcntntcgtctcccgtcccacgccgaccacaccgccctctacttctttgcacttcatctcttttgttgttatttttgttttgtgatattattccccctctccacaccactccacgaatacacaaaacaacttaactcagcaaacacactaataacacaccaagactatataatagaatgtctctccgtcgttggccgagacagcgcaggggccgtcagtttggaattaagtgataggctggatgagaggacggcgcatgtcttagtgttggggtgagagtaggaaggtacacaagataactcacgagacataccatattaacaatccactaaaagacaaaagcaatccagacaggacagccgatagatccagcgacccaccctcctacgctcagcgagaaatgatgatactcgaataaagagcaagcgcgaatgcagaaatgtagatattctaaaatacatcgtacgcgacggtgtgttggtggaaagagtgttatgtaggttattgttgtttgcgtctcgtttgttcaccgtgttcgggcattcgcgtcgtctttcgacgcgctcctgactcttctacgtcagtttgttgtgattggtgtatcgtataagtaatgtatagaanaaggacagtcatacgatatattcacagaaagacacaataacaataaacatacttaacactcactcacaagctcgnatatatatatataatgagtatatcgatacagagactaataagatgaatgtagagcgagccagaaatcgaatataattcaaattgaaatagacgcgcattatgataaatatgaattgatgaacgcagttcgactcgacgtgttcttgttcgcgctacgcgacngcaatacgacaccgcgacactncgctacaacgcacagatggaaagcgctactaactcgacgcgtcacaacacataacgatacacnacgcgatatatacgcattctgnctattactgcggtacgcgctctccctgtttcgttgcgtantactggatatgcagcataatatgtatcaccttacacacacacttacaacacgagtatcnaatcgcaatagagattagcgctgctctacatttcgtctctgtctactattctcatatagcgtgcgttaccgtatatgagacatgcagtattaattataagtgaccatagtatagaggaatagtaatatggagtgtctcgcggacgatgcgagtgtctgtgtacgattacgcgccgtgcgtgcgctatatgcgctaggatgtgcgagtgtggtcgggcgtgnatagcgagcgcaaacctatgcgccncgcgagcatgggcgcgaggattactcgtccgcactgccatccacacgccgaccgacgagccanctcaaccgaacgcacatcgtagtcanagagcgtcgttgtcgtgatgttcgaccacagaatacgagatgtcttgn

SEQ ID NO: 1264 - DNA, 215 bp, Glycine max
  Peptide Sequence Number=SeqID_9611
  Probeset Number=SeqID_11043
attacatacattatctttctttgcacgctcttactcgtttcctttgtctttgtctttctctttcggctttttcttctgctccactgtttctatcccttcctttctgtatgcaatgtaagtgttggttactctcctctcttcctgccaatggatttctttgccacacatcgccttcattgcttctttctttttttcccggtgcttctcgtgccggc

SEQ ID NO: 1265 - DNA, 625 bp, Glycine max
  misc_feature (321)..(321): n is a, c, g, or t
  misc_feature (589)..(589): n is a, c, g, or t
  misc_feature (625)..(625): n is a, c, g, or t
  Probeset Number=SeqID_11044
tcgagtcagctacgtaggcccccccccccttctttatctgactctcttatttcttctcctctcttcttctatagaatccacttctaactccacctccttcaattcttcttcctcttccaattcttctattccttctaattcttcttctactccttctcccaataaacctacaagtttaccctggaaaccaagggtgagagatttaatttgcaaacctattccaaagatgaaagagagactcatgttttatcacatgccaaaaacaggaggagcttttttaacagaacatatttatctcgaatataattacacaaatactgnattggcaagtgggacacgttggatttaacaaatacatagcaacagtaaaagagagaaacgtgaaagatccatttttattcaccttggtgagagatccagttcagagagtagtttcagaatataatcacatgattaataatattggggtggattattcaagttacactcttaatttattaccgggggatcacaatagtatttattatgacgtggagtttgtccgcaaagtcattgacaggaagtacaattttacctcttttcttcaatngggagacttgaacccaatgaataacagactcacaan

SEQ ID NO: 1266 - DNA, 1724 bp, Glycine max
  misc_feature (24)..(24): n is a, c, g, or t
  misc_feature (31)..(31): n is a, c, g, or t
  misc_feature (868)..(868): n is a, c, g, or t
  misc_feature (1143)..(1143): n is a, c, g, or t
  misc_feature (1198)..(1198): n is a, c, g, or t
  misc_feature (1271)..(1271): n is a, c, g, or t
  misc_feature (1335)..(1335): n is a, c, g, or t
  misc_feature (1354)..(1354): n is a, c, g, or t
  misc_feature (1500)..(1500): n is a, c, g, or t
  misc_feature (1654)..(1654): n is a, c, g, or t
  misc_feature (1684)..(1684): n is a, c, g, or t
  Peptide Sequence Number=SeqID_9692
  Probeset Number=SeqID_11045
ctccaccctcacgacatatccccncaccacnatctatatatctccttacgacctacaccaactaatttctttgtttttaggcgctacccgggcttcctcctgctcgtagttcatgttaacgatagtgctctctaccaccatcttttataattgtattgcatggcatatattgctcatcagacaagcgcacaacacgaccatgatcataattaagtcaaataaactacatcgagagttaaggtagaatgcataatatataatcgacatactatactcgaaaattactatggaagagaaattagtcaaaacacactaatattatctcccttcgtctcacttcgctcgacgtctatacgactcctcgagtcttcttttctattaattgtagtagaattacttgtcatgcgtctggatgctagtagatactcaagtcggcactcatctcagcatgccacagacagcgaaacactggtggtcatgtgtattgtccacgcgtgttctgctcatcgatacgttctctgtttcggatatacctctgactcgtccatatctatgtctcttctatgatggtcattatcgaaactagatcatacctcattctgtgttcatatgtactcatcactcatcgtcttcttccttctcattcatgtgtatctgtatctccatttaagctacttaagctacttctatctttgtctagtggtagatctcttgtgcgtactcctctatactcacatacttctcgttcagtttgtcttacgtagctctcctccagcgactatatgcatcatatatcacacattgatttctctctattatgtatctacacgcaaccaacttgtctttgcacacacatcaatatcatgtntatctcgactaacacaattctcgatgatatgtatattagctatttatcgcatcaccgcacatctacattacgtcgttgtacaaccgttcttatagagtgatgaagatagtgatgattttgcgctatctgtcgctatgtaagtgataccgtagttacatgcttacgtctatctgctccgacatgtatatacacatcatcgcatagtactatatacatacgcagtgaatgcgagagactctagtgtcacaccctgcgtacaatcatcatagtacacntacgtacacactgtcatactatctctctctcgtgcgcgtgattgtgctacatcantgatgatatccatcgatcgcacatcgaccccgacacacacatgtactgctccgcatgatgctagtgacagcantgctctgtagcatcaatcatacgccactacctagctgctctcatatcgtctacgctgcttaacntacttatacatcaatctanaacttgtactatatcacataattacaattcgatatactataatacacatatgtgatacgctgtactcactaatatgactcactacatactcgtatatcacctaccgccagacacattcacatcactcagcactatactctcctatntcatatatcacgcgctaccgtcccttcacgtctcgccgaactacgcgcagcgacatcaccgtatgcttatcgtacgtctcacagttagcgaccggtactattctctctctgtcatctcatgctctctctatttataactcgagtgcgtgtgctntctctacggctggatattatctcacttatnctctcagtcgtgtgtacattctatcatcactcatcatcgg

SEQ ID NO: 1267 - DNA, 1666 bp, Glycine max
  misc_feature (59)..(59): n is a, c, g, or t
  misc_feature (69)..(69): n is a, c, g, or t
  misc_feature (71)..(72): n is a, c, g, or t
  misc_feature (75)..(75): n is a, c, g, or t
  misc_feature (77)..(78): n is a, c, g, or t
  misc_feature (150)..(150): n is a, c, g, or t
  misc_feature (194)..(194): n is a, c, g, or t
  misc_feature (252)..(252): n is a, c, g, or t
  misc_feature (258)..(258): n is a, c, g, or t
  misc_feature (298)..(298): n is a, c, g, or t
  misc_feature (546)..(546): n is a, c, g, or t
  misc_feature (595)..(595): n is a, c, g, or t
  misc_feature (759)..(759): n is a, c, g, or t
  misc_feature (788)..(788): n is a, c, g, or t
  misc_feature (823)..(823): n is a, c, g, or t
  misc_feature (843)..(843): n is a, c, g, or t
  misc_feature (863)..(863): n is a, c, g, or t
  misc_feature (962)..(962): n is a, c, g, or t
  misc_feature (1031)..(1031): n is a, c, g, or t
  misc_feature (1302)..(1302): n is a, c, g, or t
  misc_feature (1405)..(1405): n is a, c, g, or t
  misc_feature (1436)..(1436): n is a, c, g, or t
  misc_feature (1469)..(1469): n is a, c, g, or t
  misc_feature (1508)..(1508): n is a, c, g, or t
  misc_feature (1599)..(1599): n is a, c, g, or t
  misc_feature (1606)..(1606): n is a, c, g, or t
  misc_feature (1634)..(1634): n is a, c, g, or t
  misc_feature (1646)..(1646): n is a, c, g, or t
  misc_feature (1666)..(1666): n is a, c, g, or t
  Probeset Number=SeqID_11046
agacgcgactgcacatcttctctgctacactgacttactaacaggctcaccggcccccncgcagccccncnnccntnntcctagaattttatagtatatgtatatatcacgtgtgcgtttctctcagtgtgcaggagagcgacgagagcnacgaagataagttggtatatgaacaccacagcctcgtagactcntcgaccagagtgtagtctgtgaagcagtgctactccggcgctatttttacatatctcngctagnctactatgagggagagagtgaagtctcactgcttcacttnatatataagtgagtaggagttggagcgctaggggcgtgtaactgtcgagtagctatactcccttcactaaatcagcgccctgtcacggtacatgcttcctctctatatcagtagaccgtagattcagatcctcgctgtgacttacttccaggtggagcgcgtgctgtcgatgtactctccgtgttcacgcttagtatatagccggtgtgtcatctctcttactatgtagatactttgtttgctcgtancacctatgacatgctctgtctcatatctcctctctgtcgccgacctccntccatacccatatatgttctatgatgaggatgtgcagaggagacacacagtgtatgcaatgcacaatactgcgtcgatgaggcatgggtgggttggacgatctggtagtgcatactgtgatgacgtagcgccatgcacgcgcggtgatggcagagtgactgttncagagagtaattagtctgttcgcactagntcgcctcgcgtcgtgtcgacgtcgtctcgctcgcntgacgttatgcgacgcacantgtgtcacgatgagatggantatgcatatgcgcctctcctgcatacggtgtttgtgtgtatcttgatctgctctatcagcacctctgtgcgctagatgatgtctatgatactgtcccanctcatcacgctactgcgatctctcctcatcatcgctacaagatcactataccgccgggacctagtgcanctactaagtgcaactagtatcaatacataatgattcgtgctactatgagagagtgagtgtagtgtgtgttccttgcctataatacgctacgctgcgttgttcgatcgtcgcatgagggcgacctatgaccggctcggctgagacttacgcctatgcgtggcgattatcttcagcgtggcggtgtgaagcggcatagatactctcctagtggcctgctacgtacactacacgacacctacgacataatgtgcatactgtcgcgttatatgtnatagatggcagtctcatcatataatatgaggccgtgcagctgactctcctctctccatatcacagcgatagtataggcgctacgtctcctcctacgtatattnatcgttttggatggagcgatcgggtacagtnacgtctatacgtcggactcatgctatttgtaanagagtaaagatcagagtacgacggtcgatcgtctaatcnctgacgagcgcaagatcgacggtgtctagtgtatgccgtatggcgtgaatatgatgtcaccgctacgctacgtctagtgagttctactccnacatctntctcatacatctttcactacgtttaatngagcatacgtcngcgtactctccgcgacgcgn

SEQ ID NO: 1268 - DNA, 2513 bp, Glycine max
  misc_feature (11)..(11): n is a, c, g, or t
  misc_feature (13)..(13): n is a, c, g, or t
  misc_feature (15)..(22): n is a, c, g, or t
  misc_feature (25)..(32): n is a, c, g, or t
  misc_feature (34)..(39): n is a, c, g, or t
  misc_feature (46)..(49): n is a, c, g, or t
  misc_feature (57)..(57): n is a, c, g, or t
  misc_feature (71)..(72): n is a, c, g, or t
  misc_feature (74)..(74): n is a, c, g, or t
  misc_feature (81)..(86): n is a, c, g, or t
  misc_feature (93)..(94): n is a, c, g, or t
  misc_feature (96)..(96): n is a, c, g, or t
  misc_feature (98)..(98): n is a, c, g, or t
  misc_feature (104)..(104): n is a, c, g, or t
  misc_feature (127)..(127): n is a, c, g, or t
  misc_feature (131)..(131): n is a, c, g, or t
  misc_feature (178)..(178): n is a, c, g, or t
  misc_feature (180)..(180): n is a, c, g, or t
  misc_feature (192)..(192): n is a, c, g, or t
  misc_feature (197)..(197): n is a, c, g, or t
  misc_feature (249)..(249): n is a, c, g, or t
  misc_feature (256)..(257): n is a, c, g, or t
  misc_feature (288)..(288): n is a, c, g, or t
  misc_feature (319)..(319): n is a, c, g, or t
  misc_feature (323)..(324): n is a, c, g, or t
  misc_feature (337)..(337): n is a, c, g, or t
  misc_feature (458)..(458): n is a, c, g, or t
  misc_feature (493)..(493): n is a, c, g, or t
  misc_feature (519)..(519): n is a, c, g, or t
  misc_feature (615)..(615): n is a, c, g, or t
  misc_feature (618)..(618): n is a, c, g, or t
  misc_feature (628)..(628): n is a, c, g, or t
  misc_feature (665)..(665): n is a, c, g, or t
  misc_feature (667)..(667): n is a, c, g, or t
  misc_feature (714)..(714): n is a, c, g, or t
  misc_feature (716)..(716): n is a, c, g, or t
  misc_feature (718)..(718): n is a, c, g, or t
  misc_feature (729)..(729): n is a, c, g, or t
  misc_feature (733)..(733): n is a, c, g, or t
  misc_feature (735)..(735): n is a, c, g, or t
  misc_feature (754)..(754): n is a, c, g, or t
  misc_feature (797)..(797): n is a, c, g, or t
  misc_feature (800)..(800): n is a, c, g, or t
  misc_feature (874)..(874): n is a, c, g, or t
  misc_feature (877)..(878): n is a, c, g, or t
  misc_feature (902)..(902): n is a, c, g, or t
  misc_feature (908)..(908): n is a, c, g, or t
  misc_feature (913)..(913): n is a, c, g, or t
  misc_feature (925)..(925): n is a, c, g, or t
  misc_feature (941)..(941): n is a, c, g, or t
  misc_feature (943)..(944): n is a, c, g, or t
  misc_feature (948)..(950): n is a, c, g, or t
  misc_feature (952)..(952): n is a, c, g, or t
  misc_feature (957)..(957): n is a, c, g, or t
  misc_feature (972)..(972): n is a, c, g, or t
  misc_feature (982)..(982): n is a, c, g, or t
  misc_feature (985)..(986): n is a, c, g, or t
  misc_feature (1002)..(1002): n is a, c, g, or t
  misc_feature (1019)..(1019): n is a, c, g, or t
  misc_feature (1037)..(1037): n is a, c, g, or t
  misc_feature (1039)..(1039): n is a, c, g, or t
  misc_feature (1041)..(1041): n is a, c, g, or t
  misc_feature (1057)..(1060): n is a, c, g, or t
  misc_feature (1062)..(1063): n is a, c, g, or t
  misc_feature (1065)..(1065): n is a, c, g, or t
  misc_feature (1071)..(1071): n is a, c, g, or t
  misc_feature (1073)..(1074): n is a, c, g, or t
  misc_feature (1077)..(1078): n is a, c, g, or t
  misc_feature (1080)..(1082): n is a, c, g, or t
  misc_feature (1096)..(1096): n is a, c, g, or t
  misc_feature (1099)..(1099): n is a, c, g, or t
  misc_feature (1101)..(1102): n is a, c, g, or t
  misc_feature (1108)..(1116): n is a, c, g, or t
  misc_feature (1118)..(1118): n is a, c, g, or t
  misc_feature (1123)..(1124): n is a, c, g, or t
  misc_feature (1137)..(1137): n is a, c, g, or t
  misc_feature (1162)..(1162): n is a, c, g, or t
  misc_feature (1170)..(1170): n is a, c, g, or t
  misc_feature (1176)..(1178): n is a, c, g, or t
  misc_feature (1182)..(1185): n is a, c, g, or t
  misc_feature (1188)..(1188): n is a, c, g, or t
  misc_feature (1193)..(1194): n is a, c, g, or t
  misc_feature (1196)..(1197): n is a, c, g, or t
  misc_feature (1200)..(1200): n is a, c, g, or t
  misc_feature (1204)..(1204): n is a, c, g, or t
  misc_feature (1212)..(1212): n is a, c, g, or t
  misc_feature (1214)..(1215): n is a, c, g, or t
  misc_feature (1217)..(1218): n is a, c, g, or t
  misc_feature (1220)..(1220): n is a, c, g, or t
  misc_feature (1222)..(1223): n is a, c, g, or t
  misc_feature (1232)..(1232): n is a, c, g, or t
  misc_feature (1236)..(1238): n is a, c, g, or t
  misc_feature (1240)..(1240): n is a, c, g, or t
  misc_feature (1249)..(1250): n is a, c, g, or t
  misc_feature (1252)..(1252): n is a, c, g, or t
  misc_feature (1257)..(1258): n is a, c, g, or t
  misc_feature (1264)..(1264): n is a, c, g, or t
  misc_feature (1277)..(1278): n is a, c, g, or t
  misc_feature (1282)..(1282): n is a, c, g, or t
  misc_feature (1294)..(1294): n is a, c, g, or t
  misc_feature (1296)..(1300): n is a, c, g, or t
  misc_feature (1306)..(1306): n is a, c, g, or t
  misc_feature (1311)..(1313): n is a, c, g, or t
  misc_feature (1318)..(1318): n is a, c, g, or t
  misc_feature (1320)..(1322): n is a, c, g, or t
  misc_feature (1325)..(1325): n is a, c, g, or t
  misc_feature (1328)..(1328): n is a, c, g, or t
  misc_feature (1337)..(1337): n is a, c, g, or t
  misc_feature (1340)..(1341): n is a, c, g, or t
  misc_feature (1344)..(1345): n is a, c, g, or t
  misc_feature (1349)..(1349): n is a, c, g, or t
  misc_feature (1357)..(1357): n is a, c, g, or t
  misc_feature (1364)..(1364): n is a, c, g, or t
  misc_feature (1366)..(1366): n is a, c, g, or t
  misc_feature (1378)..(1378): n is a, c, g, or t
  misc_feature (1382)..(1384): n is a, c, g, or t
  misc_feature (1386)..(1386): n is a, c, g, or t
  misc_feature (1388)..(1388): n is a, c, g, or t
  misc_feature (1404)..(1405): n is a, c, g, or t
  misc_feature (1407)..(1408): n is a, c, g, or t
  misc_feature (1414)..(1414): n is a, c, g, or t
  misc_feature (1419)..(1424): n is a, c, g, or t
  misc_feature (1442)..(1442): n is a, c, g, or t
  misc_feature (1447)..(1447): n is a, c, g, or t
  misc_feature (1449)..(1450): n is a, c, g, or t
  misc_feature (1453)..(1455): n is a, c, g, or t
  misc_feature (1459)..(1461): n is a, c, g, or t
  misc_feature (1464)..(1464): n is a, c, g, or t
  misc_feature (1466)..(1466): n is a, c, g, or t
  misc_feature (1469)..(1469): n is a, c, g, or t
  misc_feature (1472)..(1474): n is a, c, g, or t
  misc_feature (1483)..(1483): n is a, c, g, or t
  misc_feature (1486)..(1486): n is a, c, g, or t
  misc_feature (1489)..(1489): n is a, c, g, or t
  misc_feature (1491)..(1495): n is a, c, g, or t
  misc_feature (1498)..(1499): n is a, c, g, or t
  misc_feature (1502)..(1503): n is a, c, g, or t
  misc_feature (1510)..(1517): n is a, c, g, or t
  misc_feature (1519)..(1519): n is a, c, g, or t
  misc_feature (1521)..(1523): n is a, c, g, or t
  misc_feature (1525)..(1525): n is a, c, g, or t
  misc_feature (1531)..(1532): n is a, c, g, or t
  misc_feature (1536)..(1540): n is a, c, g, or t
  misc_feature (1550)..(1551): n is a, c, g, or t
  misc_feature (1553)..(1553): n is a, c, g, or t
  misc_feature (1560)..(1562): n is a, c, g, or t
  misc_feature (1564)..(1564): n is a, c, g, or t
  misc_feature (1575)..(1575): n is a, c, g, or t
  misc_feature (1587)..(1587): n is a, c, g, or t
  misc_feature (1592)..(1592): n is a, c, g, or t
  misc_feature (1597)..(1597): n is a, c, g, or t
  misc_feature (1599)..(1600): n is a, c, g, or t
  misc_feature (1605)..(1605): n is a, c, g, or t
  misc_feature (1607)..(1608): n is a, c, g, or t
  misc_feature (1610)..(1612): n is a, c, g, or t
  misc_feature (1614)..(1615): n is a, c, g, or t
  misc_feature (1620)..(1620): n is a, c, g, or t
  misc_feature (1622)..(1624): n is a, c, g, or t
  misc_feature (1628)..(1628): n is a, c, g, or t
  misc_feature (1635)..(1635): n is a, c, g, or t
  misc_feature (1641)..(1641): n is a, c, g, or t
  misc_feature (1670)..(1670): n is a, c, g, or t
  misc_feature (1674)..(1674): n is a, c, g, or t
  misc_feature (1678)..(1678): n is a, c, g, or t
  misc_feature (1680)..(1683): n is a, c, g, or t
  misc_feature (1701)..(1703): n is a, c, g, or t
  misc_feature (1706)..(1707): n is a, c, g, or t
  misc_feature (1709)..(1709): n is a, c, g, or t
  misc_feature (1719)..(1719): n is a, c, g, or t
  misc_feature (1721)..(1721): n is a, c, g, or t
  misc_feature (1724)..(1724): n is a, c, g, or t
  misc_feature (1734)..(1734): n is a, c, g, or t
  misc_feature (1736)..(1736): n is a, c, g, or t
  misc_feature (1748)..(1748): n is a, c, g, or t
  misc_feature (1750)..(1750): n is a, c, g, or t
  misc_feature (1762)..(1762): n is a, c, g, or t
  misc_feature (1764)..(1765): n is a, c, g, or t
  misc_feature (1777)..(1777): n is a, c, g, or t
  misc_feature (1783)..(1783): n is a, c, g, or t
  misc_feature (1792)..(1792): n is a, c, g, or t
  misc_feature (1795)..(1796): n is a, c, g, or t
  misc_feature (1798)..(1799): n is a, c, g, or t
  misc_feature (1802)..(1805): n is a, c, g, or t
  misc_feature (1808)..(1808): n is a, c, g, or t
  misc_feature (1811)..(1812): n is a, c, g, or t
  misc_feature (1820)..(1821): n is a, c, g, or t
  misc_feature (1831)..(1831): n is a, c, g, or t
  misc_feature (1835)..(1835): n is a, c, g, or t
  misc_feature (1837)..(1838): n is a, c, g, or t
  misc_feature (1840)..(1841): n is a, c, g, or t
  misc_feature (1843)..(1843): n is a, c, g, or t
  misc_feature (1859)..(1860): n is a, c, g, or t
  misc_feature (1863)..(1863): n is a, c, g, or t
  misc_feature (1868)..(1868): n is a, c, g, or t
  misc_feature (1889)..(1889): n is a, c, g, or t
  misc_feature (1898)..(1898): n is a, c, g, or t
  misc_feature (1900)..(1900): n is a, c, g, or t
  misc_feature (1907)..(1908): n is a, c, g, or t
  misc_feature (1914)..(1914): n is a, c, g, or t
  misc_feature (1916)..(1916): n is a, c, g, or t
  misc_feature (1920)..(1920): n is a, c, g, or t
  misc_feature (1924)..(1924): n is a, c, g, or t
  misc_feature (1955)..(1955): n is a, c, g, or t
  misc_feature (1974)..(1974): n is a, c, g, or t
  misc_feature (1977)..(1977): n is a, c, g, or t
  misc_feature (1994)..(1994): n is a, c, g, or t
  misc_feature (2002)..(2002): n is a, c, g, or t
  misc_feature (2009)..(2009): n is a, c, g, or t
  misc_feature (2011)..(2012): n is a, c, g, or t
  misc_feature (2017)..(2017): n is a, c, g, or t
  misc_feature (2035)..(2035): n is a, c, g, or t
  misc_feature (2055)..(2055): n is a, c, g, or t
  misc_feature (2058)..(2059): n is a, c, g, or t
  misc_feature (2068)..(2068): n is a, c, g, or t
  misc_feature (2071)..(2071): n is a, c, g, or t
  misc_feature (2086)..(2087): n is a, c, g, or t
  misc_feature (2089)..(2090): n is a, c, g, or t
  misc_feature (2096)..(2096): n is a, c, g, or t
  misc_feature (2099)..(2100): n is a, c, g, or t
  misc_feature (2107)..(2107): n is a, c, g, or t
  misc_feature (2109)..(2110): n is a, c, g, or t
  misc_feature (2118)..(2118): n is a, c, g, or t
  misc_feature (2121)..(2121): n is a, c, g, or t
  misc_feature (2124)..(2125): n is a, c, g, or t
  misc_feature (2127)..(2127): n is a, c, g, or t
  misc_feature (2130)..(2132): n is a, c, g, or t
  misc_feature (2158)..(2161): n is a, c, g, or t
  misc_feature (2166)..(2167): n is a, c, g, or t
  misc_feature (2175)..(2175): n is a, c, g, or t
  misc_feature (2180)..(2180): n is a, c, g, or t
  misc_feature (2187)..(2187): n is a, c, g, or t
  misc_feature (2193)..(2193): n is a, c, g, or t
  misc_feature (2196)..(2198): n is a, c, g, or t
  misc_feature (2216)..(2216): n is a, c, g, or t
  misc_feature (2225)..(2227): n is a, c, g, or t
  misc_feature (2229)..(2229): n is a, c, g, or t
  misc_feature (2231)..(2231): n is a, c, g, or t
  misc_feature (2234)..(2234): n is a, c, g, or t
  misc_feature (2243)..(2243): n is a, c, g, or t
  misc_feature (2245)..(2245): n is a, c, g, or t
  misc_feature (2255)..(2255): n is a, c, g, or t
  misc_feature (2257)..(2257): n is a, c, g, or t
  misc_feature (2259)..(2259): n is a, c, g, or t
  misc_feature (2262)..(2264): n is a, c, g, or t
  misc_feature (2268)..(2268): n is a, c, g, or t
  misc_feature (2274)..(2274): n is a, c, g, or t
  misc_feature (2283)..(2285): n is a, c, g, or t
  misc_feature (2313)..(2313): n is a, c, g, or t
  misc_feature (2317)..(2317): n is a, c, g, or t
  misc_feature (2323)..(2323): n is a, c, g, or t
  misc_feature (2331)..(2331): n is a, c, g, or t
  misc_feature (2339)..(2339): n is a, c, g, or t
  misc_feature (2350)..(2350): n is a, c, g, or t
  misc_feature (2370)..(2370): n is a, c, g, or t
  misc_feature (2377)..(2377): n is a, c, g, or t
  misc_feature (2380)..(2380): n is a, c, g, or t
  misc_feature (2384)..(2384): n is a, c, g, or t
  misc_feature (2389)..(2389): n is a, c, g, or t
  misc_feature (2391)..(2393): n is a, c, g, or t
  misc_feature (2404)..(2404): n is a, c, g, or t
  misc_feature (2406)..(2406): n is a, c, g, or t
  misc_feature (2415)..(2415): n is a, c, g, or t
  misc_feature (2417)..(2417): n is a, c, g, or t
  misc_feature (2432)..(2432): n is a, c, g, or t
  misc_feature (2442)..(2443): n is a, c, g, or t
  misc_feature (2469)..(2469): n is a, c, g, or t
  misc_feature (2480)..(2480): n is a, c, g, or t
  misc_feature (2490)..(2490): n is a, c, g, or t
  misc_feature (2492)..(2492): n is a, c, g, or t
  misc_feature (2498)..(2498): n is a, c, g, or t
  misc_feature (2505)..(2505): n is a, c, g, or t
  misc_feature (2513)..(2513): n is a, c, g, or t
  Peptide Sequence Number=SeqID_9693
  Probeset Number=SeqID_11047
aacacaccccncncnnnnnnnncgnnnnnnnncnnnnnnaaataannnnaagaaganataacacgacccgnnangaccacnnnnnnaaatgcnnananatatgnaacgcacacgctctccgtgtccntagngatccgcgcgactgtagcgacgcatagtggcgagagagcagtgtgtngngcagcgccgaangagtntctgcagtgcgagccaaatcgccgtcggcttatacagataggtttcacgtanggtgggnngagaagagaatatgtgagggtatgacgctanaccataagatataggcaaacatcataatatncaannaactacactcatnactttagtctctccaacatctcactctcactacttactctcttcactcctctctaccactcagaccatccacacacacggtcactcctcaccatagttgtaagcatacggtatctactacncgatagtgatccacatagattactatgttgtgctntgttgtgagtatgatgtgtgtgtatntcgttatatcgatccctaatataccgaagttatatggatacagcaatgactgaagaatagtagtatcagtcgatgttctgtatgatactattatanctnttctctctantacatctctcggtatactctacgttattatctatgcnanagcttcatcacataacaccacgatatgtttatatctatcacctaccncngnctcgcgattcngacncnggcagacataaactactcncgtctacgcggctaggtcgcgtgtactgctcatctagtgaaantgnttctaactctcgatttatgatatgtgttatgatgtgtctcatatctctatatctcaacgcacacatgacttctntcnntcttctactgactatgcacaccanacagangaganaacgttagtatncgcgccagcagtgacnanncgcnnncngtcangaaacttgtgtcgtnagcgctctancanntgacttcaatagatangagtaatgaactctctnaacacacacattgatatntngnctgtcatctcatctannnntnnanaataantnngcnntnnngtcgtactatccanctncnntattgnnnnnnnnncntaccnnattactagagccngctgtctccactcgcggcggtcccntgctgctntacgannnaagnnnngtnctgcnncnntangatntcaacgcncnncnncngnnccagcgcgnctcnnnantactcagtnntntgtcnntctagnttttctacctgcnntcgnttcgatacgttntnnnnnataatnttcannnacaangnnntancgngaatttganganntanncagnataccaanagctagngnagctcatcgcancacnnncngnctgaagcggatgaagnnannagtaangtagnnnnnncgtagcgtctacatcgtngcganannagnnncttnnnccncntcntcnnnttcatctangcngcngnnnnngcnncgnnccaaccnnnnnnnngnannntntacgannaatnnnnnacgtccaacnnancccggannncngccgaattccngagagttagtgnaacangaagntnnttatnannannnanngcagnannngagntacgaancgactngtactgttgactcagtcacagctgcgcancaanaagngnnnnacaagctcataattaatnnncannanggacgaccangnacntgctgcacgncncatactagtacnanttaccatttagntnnctttcttaacgncatcancattaatancanngnnagnnnncanagnnaagagcannacgacaaagnaatngnngnnangcgcgtcgactggaanngangtagngtgtcgttgagtatgcctagncaatccagnantctgacnngctggncnacgnagtncaatagcagagtcttatcgacagagacgccnactgaactatctacgtgtntangatgcgtgatggaaacnctagctcntacgatnanntgatntgcaatccagtgctcctncgactccactgcgcgagtcnatnngtatactantangtagtcgctttcgcnntnnctacanatnnctacaancnnttcattanctncanngnagnnntttgacagagatcagaagcgtcgacnnnncgtcnntgatcgancgaangatctgntgaagntannncgtgcgtaatgatgctcncttctcacnnngnanagnacgacgacncntcacagagantntncgnnnatgntatcgntccagatgnnnatgattatctagtgattgtcgcgactangacntatacntgcagcantttcagcntgatgggtcgntttagtaatttaattagacnaatcagntcngagncacgnannntgaagtcgttngntatcactgngntcaactcgtaatatncgatcgatannctactagagctgatactcatgatatntgatgatcggnacgtgacgancngactanatgatgnctgacccn

SEQ ID NO: 1269 - DNA, 1531 bp, Glycine max
  Probeset Number=SeqID_11048
atgatttttagttttggaaaattgtgatgactagttatacaatacattatttcccatactcttactagtcagtcagcatacatatattacctaatcaccgtactttgcttgacatgactcggtcttttcaatcaagactctatgaattaatacgaaatcagagcactaatcattcaacagagctcatcacgcaacattgacatgttgtcagtcatcacatatccaagacaagagaagaaaaaatcatccacacaaggaaggatttgccatagccatacaataaaatcaaggatcttcttattacatgttcctgatttttatttgcttaaaggcaagcatataataaggttcaagacccgtactatggcaaagcaagcctgccataatagctctgattactgctatacattattttaattgatgtttcactttcactacaactgagcaaaggatccaatcttgtcagatctcaactacattatcaagaatttttgagaagataaatatatgaaaagtcttttgaggtaaaagaacaaccaataaggtcttgcctatgatccagaaaagtactcgctggagtacgacaagtaactactagacaagcccctatttgctgctatcaaaaaacttcaagctgacctcttgtgtaaaaataattaaaagagtttcaatgtcttccaaaaactaaaggaaaacaaatttactcaagagtgatgacctcctaaagaggagacctcggatgcatgatctccttcttaggttctgatcctccaaaagtctttttgctatcatacattatcaatttcagagtgtcttggactcacaagtactttgtacttcagattttggtccatttttgcaatttcttcaaaattttgtctttttattattcttcgtcagccttgaaagctcacaaccaacttatttggctacggctacaagaactgtcagtgtcttttatttttgtgctattatgcttttgctccccttaatatcatcagcactttgatgtggcaggagccttgatttgaagcaaaaaacaaaggttattatcactatactattatttcatgtaccactatcgaatcaactcatgttgatacaaataacctaaagatgtacataaatcatgccttatatgtttttgtaatccgagatcagatttcaaaacaaacctgagatacgaaggacaagatgaactccaatttgccagatattacacatacaaaaaacaaaaagaagataataagcttttggcgataaacaagccaaatgtaccttatgtgatgctatccagttatattattttacttatcacattatgaattttaactacttgtgattgactctacactgtactctcttactctatataggtattattcgatattacctctatctttagagtcatacctgtttacttatctatacttgatatgatatgatacattattttgttgtacctttcatttgatggagatagagaagtacctctttctcccatatgattgacactactactacaaaaact

SEQ ID NO: 1270 - DNA, 480 bp, Glycine max
  Peptide Sequence Number=SeqID_9694
  Probeset Number=SeqID_11049
atctatcgacccgccctcgccgccatccccgtcgcgctagccgccagtccccggcgatggctccgtaccttctgcgttccgccgtcgccatcctccgccgatcgaccccgcaagtgtcggacgtcctccgccgctccagcccccgctccttctccggtggtgctctgagagttgaagccacaaaggggtgctgcatggacaaggatatggaaaagcttgctgcagacttgcgtgaagtgaatgcgcaactcgattttctgttggagcaggagagacgcttcgagcgtggccaggagctgcaaaagaagctgtcgtgcgtccttgttcctgccaccatcgcattctacatctttggcccgaagaagaagggtaagccgtcggaggaggagcaaccagacatttagccttgtgcgtatccatgtgcatatgccgtagcttcggtgtactgaactatgttatgtagccttttatagcggtgaa

SEQ ID NO: 1271 - DNA, 1821 bp, Glycine max
  misc_feature (1)..(1): n is a, c, g, or t
  misc_feature (41)..(41): n is a, c, g, or t
  misc_feature (88)..(88): n is a, c, g, or t
  misc_feature (162)..(162): n is a, c, g, or t
  misc_feature (165)..(165): n is a, c, g, or t
  misc_feature (194)..(194): n is a, c, g, or t
  misc_feature (278)..(278): n is a, c, g, or t
  misc_feature (280)..(280): n is a, c, g, or t
  misc_feature (297)..(297): n is a, c, g, or t
  misc_feature (328)..(328): n is a, c, g, or t
  misc_feature (348)..(348): n is a, c, g, or t
  misc_feature (351)..(351): n is a, c, g, or t
  misc_feature (355)..(355): n is a, c, g, or t
  misc_feature (362)..(362): n is a, c, g, or t
  misc_feature (366)..(366): n is a, c, g, or t
  misc_feature (372)..(372): n is a, c, g, or t
  misc_feature (386)..(386): n is a, c, g, or t
  misc_feature (462)..(462): n is a, c, g, or t
  misc_feature (492)..(492): n is a, c, g, or t
  misc_feature (546)..(546): n is a, c, g, or t
  misc_feature (563)..(563): n is a, c, g, or t
  misc_feature (574)..(574): n is a, c, g, or t
  misc_feature (578)..(578): n is a, c, g, or t
  misc_feature (618)..(618): n is a, c, g, or t
  misc_feature (679)..(679): n is a, c, g, or t
  misc_feature (681)..(681): n is a, c, g, or t
  misc_feature (683)..(683): n is a, c, g, or t
  misc_feature (697)..(697): n is a, c, g, or t
  misc_feature (706)..(706): n is a, c, g, or t
  misc_feature (735)..(735): n is a, c, g, or t
  misc_feature (737)..(737): n is a, c, g, or t
  misc_feature (739)..(739): n is a, c, g, or t
  misc_feature (758)..(758): n is a, c, g, or t
  misc_feature (766)..(766): n is a, c, g, or t
  misc_feature (785)..(785): n is a, c, g, or t
  misc_feature (794)..(794): n is a, c, g, or t
  misc_feature (862)..(862): n is a, c, g, or t
  misc_feature (959)..(959): n is a, c, g, or t
  misc_feature (996)..(996): n is a, c, g, or t
  misc_feature (1013)..(1013): n is a, c, g, or t
  misc_feature (1028)..(1028): n is a, c, g, or t
  misc_feature (1035)..(1035): n is a, c, g, or t
  misc_feature (1087)..(1087): n is a, c, g, or t
  misc_feature (1089)..(1089): n is a, c, g, or t
  misc_feature (1091)..(1091): n is a, c, g, or t
  misc_feature (1093)..(1093): n is a, c, g, or t
  misc_feature (1123)..(1123): n is a, c, g, or t
  misc_feature (1218)..(1218): n is a, c, g, or t
  misc_feature (1328)..(1328): n is a, c, g, or t
  misc_feature (1358)..(1358): n is a, c, g, or t
  misc_feature (1360)..(1360): n is a, c, g, or t
  misc_feature (1407)..(1407): n is a, c, g, or t
  misc_feature (1421)..(1421): n is a, c, g, or t
  misc_feature (1447)..(1447): n is a, c, g, or t
  misc_feature (1484)..(1484): n is a, c, g, or t
  misc_feature (1500)..(1500): n is a, c, g, or t
  misc_feature (1503)..(1503): n is a, c, g, or t
  misc_feature (1572)..(1572): n is a, c, g, or t
  misc_feature (1613)..(1613): n is a, c, g, or t
  misc_feature (1620)..(1620): n is a, c, g, or t
  misc_feature (1627)..(1627): n is a, c, g, or t
  misc_feature (1636)..(1636): n is a, c, g, or t
  misc_feature (1720)..(1720): n is a, c, g, or t
  misc_feature (1726)..(1729): n is a, c, g, or t
  misc_feature (1731)..(1731): n is a, c, g, or t
  misc_feature (1735)..(1735): n is a, c, g, or t
  misc_feature (1741)..(1741): n is a, c, g, or t
  misc_feature (1745)..(1745): n is a, c, g, or t
  misc_feature (1747)..(1748): n is a, c, g, or t
  misc_feature (1756)..(1756): n is a, c, g, or t
  misc_feature (1776)..(1778): n is a, c, g, or t
  misc_feature (1781)..(1796): n is a, c, g, or t
  misc_feature (1798)..(1800): n is a, c, g, or t
  Probeset Number=SeqID_11050
nagcagcgcgcgcatcatgaaggcactacacgagacagggngggtacggaaagagacgaagagtagagagaagtaagacagagatatnatagatatacagcaaacataatgacaagagcacacatacacatgagcaacgtgcagtggcgcgaagacattgangantacacacaatctatacatcactactcgantatgatgaccgcagtatgactgtatctacgtatcgtgagagagatagcagcactgggagcatattaatgtgtatatagtatacntntcagcgcgaccagtctncacgactgtacgttccgtacgtcgatagtcngcgacacgacagctagcacncgntagntctgtgngatntctcancgcaggtccgtcantctgcccagcgcgtcgtgtacaatcatgagacagtacagatgctcgtcttcacagtagccgtcgtgcgtgctccgntcactctcgctgtactatatacagtgtgtnacgctgcgtatgtctctcactcactactcacgtcatgtcatatatctatcactncacacgcacatccgctngcgcacgtgcnggcngcacaccgctaccacgcgatcacgaccattacacctacgnttcagcacacacacgcgtcagcgcgctacagtgccacgcgctgccgcacctcgcacgagtntntnctgtagagcagccntagatactnacgagagcacacatcacatcgaacgtgtngngngggagtggggtggtagagntgggtggntggaggacgacagtattgntatagatantagatactgatatagtaagtacgtctctcatcttagttagattgtcatcaactactcgcaccaaacantacagacacagacaacacagcacacgatcagcatcgcagacaggagtatgcattactcgtcgtctctctactgctgtgtggagagtagtcgtatctntatgtgatgctagtgtagatagagatgcggcgcttgngtcgctctagtcttatntacatactataattntaaactntctcatacttatacactcacaacatatatataataatcttaacaaagaatgntngngngggtggacgacgatgcggaggcggacgcgngcgcgcgtggacccatgctcgcgcccgcaggcctctacatcatagtgagagaggttgtatatgatatatctttctatatataccatgtctctctntgcgtgacttcgcgtgtcgcgctgtctaatcatctctctattgctgagtgtcatatcatgtgtatatcactggcagagtggcgacgaagacacgacacgtagtcaaatgnaatatagtatatcgcacagcacatcactangnctctcgtgtcgtcgacgacgaagcgacgccgacacgcactgaagagnatactatatatatnatatatacagtatctacatattctcntttcgtccgttgcagtctcgtgatatataatgaaagnataaacacaactgcgntgngtagcacagagtagactagtagtaagattgtggtatagatgacgcagcacgcagcagagaggatgggangtgttctatcattcgttactggaacacacagtatacatctntatatanatagtantttcttctnccacacatcatacgaggaacactccctctagcgccgtcgcttggttagtgatattagttaactgcctcctctacactacctgtngtgtannnntnatanctcagngcgncnnagacaagngaggtggagaggagtgttgnnngtnnnnnnnnnnnnnnnntnnnccggcggggcacaccccccca

SEQ ID NO: 1272 - DNA, 1910 bp, Glycine max
  misc_feature (123)..(123): n is a, c, g, or t
  misc_feature (174)..(174): n is a, c, g, or t
  misc_feature (187)..(187): n is a, c, g, or t
  misc_feature (230)..(230): n is a, c, g, or t
  misc_feature (477)..(477): n is a, c, g, or t
  misc_feature (605)..(605): n is a, c, g, or t
  misc_feature (900)..(900): n is a, c, g, or t
  misc_feature (903)..(903): n is a, c, g, or t
  misc_feature (1344)..(1344): n is a, c, g, or t
  misc_feature (1521)..(1521): n is a, c, g, or t
  misc_feature (1627)..(1627): n is a, c, g, or t
  misc_feature (1728)..(1728): n is a, c, g, or t
  misc_feature (1748)..(1748): n is a, c, g, or t
  misc_feature (1795)..(1795): n is a, c, g, or t
  misc_feature (1806)..(1806): n is a, c, g, or t
  misc_feature (1812)..(1812): n is a, c, g, or t
  misc_feature (1829)..(1829): n is a, c, g, or t
  misc_feature (1834)..(1834): n is a, c, g, or t
  misc_feature (1910)..(1910): n is a, c, g, or t
  Peptide Sequence Number=SeqID_9695
  Probeset Number=SeqID_11051
cagcggcgcgcgctcttgtacctcgtcgctctccgacacacgagctaccgcggcagacagcaggcgcgccgcgagagcatcttaaacacctattgtctttagtcgtagtaggtatggtgtagnagactcgtacactgcagagtagcacgacgcgagttcttcctttctcatccnacatctctactcngcgcgtatgtgtagctgcgcgccaatgtagtatttattcggcntcagccctactcacctcataccaccaacaaccggccaacagcatcgtgtctctcatagctctctcacccgcatcgaccgccgcgtcgcgcaccattgcgtgtataacagcctcactcatatataccctcgacgctcccttcggagcatcatatggttatgatcaggtgtgatcatacccgtttgtcatctgcctgatgctagccatctaatatgttatcgacgcctgacgctcccgtctctctcctnccacctcgaggctctcgtcattggttcgacctcgctactcgtcccctcgccactttcggcgcacatacaagcgctcgacccgatatatgcgcctcaagtctcctctctccatctctcgtcactacccncatcgcaccgtcactgtcgctctataatcccgcgccgcatcgaaggccacgctagacgaatgcagtcatcatacattctatctgacgccttatttacaccataccacgcccccaccactaggtgagcccacgcactgctcaaatctcacatacactgtcctctatcggcctcctcacatataactatcgatcactcttaatacacaactcattgatactaaacagtatacaacgctcctcattcgtagttcaaagacatatgaagtgcctgcgctctagagccgtataacaccgncgncttcactatgcatacgacgcctctctcgacgacgacccctatatgcgctctagatgtagatcgcgtcaccttactcgtcgctcaaataacaccgctctgcgatatcattacaactatctctctccacatccactctccacctctcctcctcttcgtcggacgttatattcacatgtcgcgccgtgtggcgggagctctctcaactcgtgccgtctactcactagcgtcgcactatgagcaacgttcttagtttccgtctcgtgctaacgacgactatcatgacacactagtgcacagcgtcaaacaacagattcgactctgcctcctacgaactacactactcattcaaacgattgatcacgcggtgtcatctactgtatctctcgacatagccgtgccagcgcatgcgctgtctctcgtgacacgcaatctgacatctgnacgcgcatctgccagcctgacaccctcccctgtgtatctacacgctatgtagatagtatattagagtgcttacagtcgtcccgagatacgagacgtctactatcccactcgacacacataacataatcttgtgtctcactctaatgaatatctcctgcaatacatatacacatatangatgatacacaaccatccgtgtcatgctcgtctctctgtagactacgcggccgagacgcagcatacaccgagatactacttatcgactgtgcttctgtgtcagtcntcaccgtgctcactcacatcgcatctcacctacgccgctctatcccgtcctcacgtgcatcactctcagctcgctcagcatgatgagtcgtcacgcacacnaccagtgctagcactatctnatcacgagactccatacagaacacggtcgatgcgttatctaacacgntcactcgatangtgagntgcacgatcatctctcnatcancgagtcgcactaactagaccagtacgcgcatctatcgacgtacatatcttgtcgtcgtgtagctatacgtaagctn

SEQ ID NO: 1273 - DNA, 501 bp, Glycine max
  misc_feature (365)..(365): n is a, c, g, or t
  misc_feature (495)..(495): n is a, c, g, or t
  Peptide Sequence Number=SeqID_9696
  Probeset Number=SeqID_11052
cgaggcgtttaatatcgattcccgcgaactcatttcaccatcaatctcctccttcagaaagctccagaaccctaaatccacaatccttcgaacaagatgttggaacttcgtttggttcaaggctctctcttgaagaaggttctagaatcggtcaaggatctggtgaacgatgccaacttcgactgctccagcactggcttctctctccaggccatggactcgagccacgtggcgctggtgtctcttctcctgagatccgaaggtttcgagcactacaggtgcgacaggaacctctccatggggatgaatctcggcaacatgtccaagatgctcaaatgtgccggaaatgatgacatcatcaccancaaagccgatgacggcggcgacaccgtcaccttcatgttcgagagccctacacaagacaagattgcggattttgagatgaagctgatggacatcgacagtgagcatttaggaatccctgacgctgagtancactct

SEQ ID NO: 1274 - DNA, 2096 bp, Glycine max
  misc_feature (30)..(30): n is a, c, g, or t
  misc_feature (87)..(88): n is a, c, g, or t
  misc_feature (102)..(102): n is a, c, g, or t
  misc_feature (115)..(115): n is a, c, g, or t
  misc_feature (149)..(149): n is a, c, g, or t
  misc_feature (155)..(155): n is a, c, g, or t
  misc_feature (158)..(159): n is a, c, g, or t
  misc_feature (368)..(368): n is a, c, g, or t
  misc_feature (382)..(382): n is a, c, g, or t
  misc_feature (551)..(551): n is a, c, g, or t
  misc_feature (700)..(700): n is a, c, g, or t
  misc_feature (819)..(819): n is a, c, g, or t
  misc_feature (1009)..(1009): n is a, c, g, or t
  misc_feature (1049)..(1049): n is a, c, g, or t
  misc_feature (1113)..(1113): n is a, c, g, or t
  misc_feature (1168)..(1168): n is a, c, g, or t
  misc_feature (1234)..(1234): n is a, c, g, or t
  misc_feature (1458)..(1458): n is a, c, g, or t
  misc_feature (1566)..(1566): n is a, c, g, or t
  misc_feature (1604)..(1604): n is a, c, g, or t
  misc_feature (1657)..(1657): n is a, c, g, or t
  misc_feature (1719)..(1719): n is a, c, g, or t
  misc_feature (1721)..(1721): n is a, c, g, or t
  misc_feature (1877)..(1878): n is a, c, g, or t
  misc_feature (1961)..(1961): n is a, c, g, or t
  misc_feature (2073)..(2073): n is a, c, g, or t
  misc_feature (2088)..(2088): n is a, c, g, or t
  Peptide Sequence Number=SeqID_9697
  Probeset Number=SeqID_11053
gtttttttgctgttctgtctccctctactncttactcctttcgtcagtctccactgtctgtactctggacgtttgcgttggtattgnntgtcctggttatgngtgtttgtcttcngtatattttgttactgtgagaattcgcatcgacnccttcnganncgagtcgccagacgcgccgtatacgacgaactgggcgttatcttggcgcgtcattgttatctcagcgtctcttctcttctgttgcgcgaagacgagaggattatgacatcggccctctcgatgtagtcctgttctagaggagcggtgagaggcgacccgagctcagaagccgcgcgcgctggtgtcatcatctattgagtatattaaanacaatactaatatntaacgtcactatttagtatagatctgctgctctcccaacgtccgacgcgaggtgaacggaccacggtagttagtcgtaaacgcgactggcgtcacgagaagagcgccgctagaggtagtcatgaatgagagacacactataggatgactccgacctcgctttatgctancctccacgcgcgcgcgcgcgcgtctgcactgcggctggcgcttcggcgcagttgataggtgtgtgcgagctgctgtgtgcctcgtgatctgggcgcgcgagtgccgtggtacggtgttgtgctcatcgctgctggctatgattctttcnacacgttattttcatgtcatcgccggccgctcctcattgctccgatatgcctccttatgtcggccggcataacacaaaatcatccaacatcatattgtatcacgttatatcaccaaacncataccttaaacaattactatatattatgctattagtgtaaatgacatgattgcggtgacgagccgaattagggagtggaggagcggacgatccttgagagcgcaacgtgttcgctacagccgactctccgcgtgacgctacagtgtagtctcggatcgagcgacgtaccgtgcacgcacgcaccgcganccacggcgacgtacatcgatgttgtaggtcatcgtggaanacggagacctgtgattattcactcaggactgtctgctgtggtgcgcttacacgtgccgcgtacncgacacagccacacagcgccgcgggagacaacttgatgtacgcatatacgtactnattacacatctgttggtgcgtggacctgtccgtcacacacgctcgacgtaggcggtaaccgacgangcgcggctagtgtcgatacctctcgctcgattgtctaggaccggccatctaatctgtggtatcgctgggctcgttccacacgagagcagtgtgagagatatgtcatgttgcgccacgtatgtccgtctcttgcttcatctagcttcgtaccctgcgcgcggcgggcgtatgagaatcgatgaccgcgctgtatgatatgttaaatcatagcatcacattacganagcgacatagacgtatcagtgacgagtgcgtgtgatagagagctctctccaacatcacacctgacgctaaatgagcgcagcgcatctaagaacgacgtcacgatacgncctctgctcgtcttctattgcgactcgcgttagagacngatcagcgttgtgtgtgagaaatatgtcgtaatatcgtatgatagcgcgactntgtgtgatcagagcgacgcacgagctgcgtgctacacgacttcggctccgcgctcctactgngngaggtgcatactgcgacctgcgacgtgaggtcttatcgagggtcggagagacacacatgtcagcagacgctgacgagatacattgctatgatttgtgtgcggtgataccacgtatcgcgcgcgcgcggtcgatcgtgctgtgcacgcaggtctgcnnctgcttcgcggatggaagaaagacggacgaggcgcgtgtacgtgcgcgtgagccgatgcgttctcgtgcgcgacactctcttnagcgacgtctgctgcggtgaagcgtggacagtctatatgtatgggctagccgaggagagaactggcagataactaacactacaatgaccgtcaatgatgaacgcaccatggnaaccaccgcccgtgncacgacgc

SEQ ID NO: 1275 - DNA, 508 bp, Glycine max
  Probeset Number=SeqID_11054
aaaagaacaagttttgcttggaggtcttcctccaagttacttatatttgtaatggaaagaaaattctaacagctcccacttgcagaagtttaataaatggtatgatccaccatctgttaactcatgcatatggagctaatttatgctcacaagtttcaacaaacaaaatcgaaaaattctacgtcgcgaggtggttttggttgtggaggtggctacaatcccaatggttgatgtggtggtgcttgtgttcatgaaatgacgtggctttgcaaactttcagtgccaggtttgcttcaagtatggatatcgcttctcactgccatggtaggtttccaatgagatcttgcttcaaggctctgttggacctgacagactctattcatttactattttaacgcgtcaaagcttcacagtcaagtcttcaacttcagcttcatgttttgtttctaattctagcaattctaattctgttttccctagttgttctaattctattgcatttatggaa

SEQ ID NO: 1276 - DNA, 453 bp, Glycine max
  Peptide Sequence Number=SeqID_9698
  Probeset Number=SeqID_11055
gcattacggaaggcgtggggttcttgttgctggttatctcggtttcttcggccaggggggccccggtggccatccaggggctctgtcgccggcgctgctgcaaccctgtttgccctcatccgcaggctggtgaccacggcaaattgcctgcctgcccgtcgatggtcgggacacttctgtttcttccgcacgacggggacccgttgcctgcccggagcccagtcgctgcccctcctgctgctgcttcaagcctgactgctgcacgatttccgttctcctggttaacatttttggcatattttggtgtttctttaacttctgtcccctcccatgttagcagctgtattctcacaaccttaaggtgttgattaagtcaaattttcctgtctattcttctatggtggaaacacaagtaattaattctgactactatgaaacattgtttgaccaaag

SEQ ID NO: 1277 - DNA, 1543 bp, Glycine max
  misc_feature (110)..(110): n is a, c, g, or t
  misc_feature (132)..(132): n is a, c, g, or t
  misc_feature (148)..(148): n is a, c, g, or t
  misc_feature (157)..(157): n is a, c, g, or t
  misc_feature (234)..(234): n is a, c, g, or t
  misc_feature (269)..(269): n is a, c, g, or t
  misc_feature (299)..(299): n is a, c, g, or t
  misc_feature (329)..(329): n is a, c, g, or t
  misc_feature (333)..(333): n is a, c, g, or t
  misc_feature (338)..(338): n is a, c, g, or t
  misc_feature (352)..(352): n is a, c, g, or t
  misc_feature (377)..(377): n is a, c, g, or t
  misc_feature (386)..(386): n is a, c, g, or t
  misc_feature (402)..(402): n is a, c, g, or t
  misc_feature (611)..(611): n is a, c, g, or t
  misc_feature (675)..(675): n is a, c, g, or t
  misc_feature (889)..(889): n is a, c, g, or t
  misc_feature (1006)..(1006): n is a, c, g, or t
  misc_feature (1008)..(1008): n is a, c, g, or t
  misc_feature (1084)..(1084): n is a, c, g, or t
  misc_feature (1231)..(1231): n is a, c, g, or t
  misc_feature (1337)..(1337): n is a, c, g, or t
  misc_feature (1345)..(1346): n is a, c, g, or t
  misc_feature (1384)..(1385): n is a, c, g, or t
  misc_feature (1397)..(1397): n is a, c, g, or t
  misc_feature (1502)..(1502): n is a, c, g, or t
  Probeset Number=SeqID_11056
cacggcgagagtagcgtacaagttacggagtgcatcacagactacagacagttgaccaccacgcgagtcaacgctcaatgacaacagtccatcacctcatactccagccntcggtgcgcgtcgacgcatctntgatccgcagtcatcntacgctgcncgccgtctacatgctaggtacaccactcacgcaacatgagtcctacatcatctccgtgtatgatactgagcgagcgnggtcgcagtcacgtatgtcacgtgtcgagatatgntggcgagatcagccgtcatatagtgatggnagtatcgtagatagagtattagagtagatncatnatatncccgtgcatcctanatacagacgcagtcacgaagcgcangagacaganttcagcactccacagnacatcgcgccactcgtctcgtcatgcgacgatcagtgcatgctctccgccatcagggatcggcacgatacgtcatatccacaccgcgttacgcgtattcactcgcagagagcgtaccgccagcatctgcacgctcagctcacactatagatctatcacctcgtagcgaagtcgcgacacgaatgatgagcatacacgcgcagccgcatncatataacacggcgcatacacctcacatcacacacgtatctcatctgcacgctgtctagctatncgtcgcggcgctatagactaatatcagtaccgaacgcgtctcactacactcttacgacatcaagaccacagcactatcacaacaacacacactactacagttcaacacgcactcgacacaatcaacacctgacatatactatctcgtctcgtcgagtaccggagagcgcgcgccactcgagcacaagacccgaccacagcgaacgcagacacanactatctcgcatacaacacacacgcacagtcataaatatcataccgaacacagcaggagtgcggtatattactctgatatatattcagatatagtttgcaacacatctcatgtaatntnttggtatgttgtgggtgctagggttatgatatagacggcgcagcatccatgtataatgtacgatacaaataacatntcaactagcagctacaatgagcgaaaacgctgtctcagatgtgcggtgatagactcgaagcgggtatcagatatataaatactatgaagccgaatctgataggcgatcgagcggtatatgagtgagtgagcggctaagatatacagnagaataatgagaagaaaagacaagcatcagtaagaccaaaacacacatcactcatatctctatcatgtgtgctagaggttcgcatatgatgatcattataattgtncggctagnngtaatttgttcgcggtgtgggagcgtgtgggagtactnntccctcctgctntgtcccgcgcgcggcaccctctcgcacacacacccgccgcaccaacacacacaactatgagcacatcagaactgacacgataaccatacaacacatacaaaactntctcctattattaagtacgagatttatgaaactacacgata

SEQ ID NO: 1278 - DNA, 1784 bp, Glycine max
  misc_feature (1)..(1): n is a, c, g, or t
  misc_feature (17)..(17): n is a, c, g, or t
  misc_feature (19)..(19): n is a, c, g, or t
  misc_feature (26)..(40): n is a, c, g, or t
  misc_feature (42)..(44): n is a, c, g, or t
  misc_feature (46)..(49): n is a, c, g, or t
  misc_feature (60)..(61): n is a, c, g, or t
  misc_feature (77)..(78): n is a, c, g, or t
  misc_feature (98)..(108): n is a, c, g, or t
  misc_feature (110)..(114): n is a, c, g, or t
  misc_feature (116)..(116): n is a, c, g, or t
  misc_feature (118)..(120): n is a, c, g, or t
  misc_feature (122)..(124): n is a, c, g, or t
  misc_feature (129)..(130): n is a, c, g, or t
  misc_feature (134)..(134): n is a, c, g, or t
  misc_feature (136)..(138): n is a, c, g, or t
  misc_feature (141)..(141): n is a, c, g, or t
  misc_feature (144)..(144): n is a, c, g, or t
  misc_feature (146)..(146): n is a, c, g, or t
  misc_feature (151)..(151): n is a, c, g, or t
  misc_feature (154)..(155): n is a, c, g, or t
  misc_feature (178)..(178): n is a, c, g, or t
  misc_feature (180)..(180): n is a, c, g, or t
  misc_feature (207)..(207): n is a, c, g, or t
  misc_feature (211)..(211): n is a, c, g, or t
  misc_feature (213)..(213): n is a, c, g, or t
  misc_feature (221)..(221): n is a, c, g, or t
  misc_feature (223)..(223): n is a, c, g, or t
  misc_feature (226)..(229): n is a, c, g, or t
  misc_feature (264)..(264): n is a, c, g, or t
  misc_feature (268)..(269): n is a, c, g, or t
  misc_feature (290)..(290): n is a, c, g, or t
  misc_feature (293)..(293): n is a, c, g, or t
  misc_feature (295)..(302): n is a, c, g, or t
  misc_feature (304)..(306): n is a, c, g, or t
  misc_feature (310)..(311): n is a, c, g, or t
  misc_feature (313)..(313): n is a, c, g, or t
  misc_feature (316)..(316): n is a, c, g, or t
  misc_feature (318)..(318): n is a, c, g, or t
  misc_feature (329)..(329): n is a, c, g, or t
  misc_feature (355)..(355): n is a, c, g, or t
  misc_feature (375)..(375): n is a, c, g, or t
  misc_feature (393)..(394): n is a, c, g, or t
  misc_feature (398)..(398): n is a, c, g, or t
  misc_feature (444)..(444): n is a, c, g, or t
  misc_feature (459)..(459): n is a, c, g, or t
  misc_feature (462)..(463): n is a, c, g, or t
  misc_feature (468)..(468): n is a, c, g, or t
  misc_feature (481)..(481): n is a, c, g, or t
  misc_feature (516)..(516): n is a, c, g, or t
  misc_feature (529)..(529): n is a, c, g, or t
  misc_feature (558)..(558): n is a, c, g, or t
  misc_feature (560)..(560): n is a, c, g, or t
  misc_feature (688)..(688): n is a, c, g, or t
  misc_feature (696)..(696): n is a, c, g, or t
  misc_feature (756)..(756): n is a, c, g, or t
  misc_feature (765)..(765): n is a, c, g, or t
  misc_feature (1010)..(1010): n is a, c, g, or t
  misc_feature (1116)..(1116): n is a, c, g, or t
  misc_feature (1121)..(1121): n is a, c, g, or t
  misc_feature (1124)..(1124): n is a, c, g, or t
  misc_feature (1133)..(1134): n is a, c, g, or t
  misc_feature (1136)..(1136): n is a, c, g, or t
  misc_feature (1157)..(1157): n is a, c, g, or t
  misc_feature (1300)..(1300): n is a, c, g, or t
  misc_feature (1347)..(1347): n is a, c, g, or t
  misc_feature (1354)..(1354): n is a, c, g, or t
  misc_feature (1574)..(1574): n is a, c, g, or t
  misc_feature (1583)..(1583): n is a, c, g, or t
  misc_feature (1688)..(1688): n is a, c, g, or t
  misc_feature (1696)..(1696): n is a, c, g, or t
  misc_feature (1744)..(1744): n is a, c, g, or t
  misc_feature (1750)..(1750): n is a, c, g, or t
  misc_feature (1784)..(1784): n is a, c, g, or t
  Peptide Sequence Number=SeqID_9699
  Probeset Number=SeqID_11057
nttttttttcgcctctnanccctacnnnnnnnnnnnnnnnannnannnnaactctactcnnaacattaccttcatcnnacatcaccactcacatatcnnnnnnnnnnnannnnncncnnntnnngcccnncttngnnngcnagngngttgncgnngggatgactgatggagtggagtngngacgcgccagcgacgagatatatgaanagangngagagtgntngtnnnncccgtcgtggcgcgtggctctggtcgcggtgtcgncgtnngtgcctgctcggcttctgcanagngnnnnnnnnannnaggnnanggnanagcgagagcangacgggagactcctaggagggaggcnacaccacaatacaatgacanacaccgattatgattttnntccngctatggccccatcacccccgtctctctctctcgaacagactctcntctcaccgttctganacnncaccnactgcttccgcancagtaactcgacatatacacgagatggaatgtcanttaagaacataanaaatgaagctatatactatatcatctgtntnatcgcgcctacagcatgttgtagaggggtgtgggtcgtgtggattcgttcgtggtgtgtgttgtatgtgatcattgtcggctggctcactcgtctcgctctcgcactctgctacgacacatcacatantacgtagnatatcccatactagaacgtatggataagtaataagatagtttgcggcggtgtgtgtgcgncgttgtganttgctgacagctggtgtgattgatcactctagacctctggctgtagacattctactatatatacgacgtatcgtagtacacagcactcatacgcaacgtagtagcaacattgatctactgactatctacgttcctacaccttccaatcaatgaattgttttgctattatctgtggtatgtttgttgagtggagttgtgagggagaatgatgtgtaggtacttatcgtatctccctgctgccgcgntcatgcgcgcgctagtgctagcagttatgcattatatgtgtacatgtaagatgcacgtatgacatcgtatacgcacactgtcaatctctattgactttatatattnctttnacncccgtccannanacacgcaccgcacgctcgctncgactcactgcagtgcacgactgcagagacatacgacaacgtatatcaatgagtgacctatataataccatgtatgtatcatgtcgtgtctcttgtgacttcctgagctgtgcgctgattctgttgttatgtctctcctcgancacgcggatgcgaggccacggatatgtgtatatgtagtatataatanagatgcngcaggtgcactgtcacccactgacctcgtcagtgctaccaccatgcgtcgctatcagcgacatccatgcgacttagcgatcaatgcatccggtgtccgagcagtgagcgacgtgtcggtcgacgtgatgaactctctgaacttcacgcacccgacgctatgaacacacacaacacgacacaacagtttgagcttagaatatgtagctcagacacgtctcncgctctagngcttacatctgctcagcgtgtcgttagttgatatctgtagcatacctgataatgtgacgttctatctcactgtagtgtgggtctacgtatatagatgactgtatntgtcgaantagacgacgtatgggagagacgtattctcatgggagtacgcgacgcgngtacancatactctacacatacgatcctaactgacaccgn

SEQ ID NO: 1279 - DNA, 544 bp, Glycine max
  misc_feature (58)..(58): n is a, c, g, or t
  misc_feature (465)..(465): n is a, c, g, or t
  misc_feature (537)..(537): n is a, c, g, or t
  Probeset Number=SeqID_11058
aaaagacttcccctttgcaagtcttcctcaacttccgtctgctgcaatccttatcatnggagcagactctgtcaattggaaactccaccacccccctactgtagatcctcgtgtgagaggctcaaacctgaagaccgagctcccagtgaaagtagccaaccagagcttagagggtcgctcagcacgaacggtgaaggcgactgtgaaggaaatgggcaatggtgtaaacttgcttattgggagcagtcacagaggataggaagacagtttccagtcgaaaacaaattcgtcaacgtcttcggcaatcttccacgaggtgaagggctatcgctggcgacgctagcgcagcaaaaacctccgaatcccgatatattaaaagctcgggagaaaatcggccgaggcgtaacgctgagtaaagaggaagatggcgtttgggcgtataacagatcggaaaatccccttttngtgaattcgccagcgctcgacgacccagactcgagtttcttcatcgtctacagagttccgcccggtcactgncttaacg

SEQ ID NO: 1280 - DNA, 499 bp, Glycine max
  misc_feature (33)..(33): n is a, c, g, or t
  Peptide Sequence Number=SeqID_6008
  Probeset Number=SeqID_11059
attttgcacaaggaaagggagaaccgccatcgnacgcgctctctatcaagatgtggatgaattctacggagtctgggatccagataaggagaaattgtgggtatatggagataagaatgaaacatgggaggtgactttgttgggagaggaagtacgtccggagcttccggagcgtgaactcggaaaaaagggagagagggatggttttttttgtagggacaggataaaaaaggaggaagtgaaaagtgattcgaggcagatcaaagaggagttaaagaatggaggtagggcgaacggaaaagaaaggaaaagagaaattaggttgatcaatgatctgacaactgtagaagaaggagagactgaaaggaaagcaggaaaggacaagggcaatgtagaaaatggaagaaaagagagaggaaggaggaagagatgaagggatggggaagagaagagaaaaaaggagggtgcagaggatgggaaagaagaagaggaagaagaa

SEQ ID NO: 1281 - DNA, 1542 bp, Glycine max
  misc_feature (5)..(5): n is a, c, g, or t
  misc_feature (36)..(36): n is a, c, g, or t
  misc_feature (75)..(75): n is a, c, g, or t
  misc_feature (110)..(111): n is a, c, g, or t
  misc_feature (118)..(118): n is a, c, g, or t
  misc_feature (140)..(140): n is a, c, g, or t
  misc_feature (180)..(180): n is a, c, g, or t
  misc_feature (208)..(208): n is a, c, g, or t
  misc_feature (231)..(231): n is a, c, g, or t
  misc_feature (237)..(237): n is a, c, g, or t
  misc_feature (269)..(269): n is a, c, g, or t
  misc_feature (296)..(296): n is a, c, g, or t
  misc_feature (330)..(330): n is a, c, g, or t
  misc_feature (344)..(344): n is a, c, g, or t
  misc_feature (346)..(346): n is a, c, g, or t
  misc_feature (352)..(352): n is a, c, g, or t
  misc_feature (365)..(365): n is a, c, g, or t
  misc_feature (373)..(373): n is a, c, g, or t
  misc_feature (389)..(389): n is a, c, g, or t
  misc_feature (437)..(437): n is a, c, g, or t
  misc_feature (443)..(443): n is a, c, g, or t
  misc_feature (455)..(455): n is a, c, g, or t
  misc_feature (464)..(464): n is a, c, g, or t
  misc_feature (469)..(469): n is a, c, g, or t
  misc_feature (487)..(487): n is a, c, g, or t
  misc_feature (489)..(489): n is a, c, g, or t
  misc_feature (508)..(508): n is a, c, g, or t
  misc_feature (545)..(545): n is a, c, g, or t
  misc_feature (562)..(562): n is a, c, g, or t
  misc_feature (576)..(576): n is a, c, g, or t
  misc_feature (644)..(644): n is a, c, g, or t
  misc_feature (698)..(698): n is a, c, g, or t
  misc_feature (705)..(705): n is a, c, g, or t
  misc_feature (710)..(710): n is a, c, g, or t
  misc_feature (712)..(712): n is a, c, g, or t
  misc_feature (715)..(715): n is a, c, g, or t
  misc_feature (766)..(766): n is a, c, g, or t
  misc_feature (785)..(785): n is a, c, g, or t
  misc_feature (788)..(788): n is a, c, g, or t
  misc_feature (791)..(791): n is a, c, g, or t
  misc_feature (803)..(803): n is a, c, g, or t
  misc_feature (811)..(811): n is a, c, g, or t
  misc_feature (822)..(822): n is a, c, g, or t
  misc_feature (846)..(846): n is a, c, g, or t
  misc_feature (879)..(880): n is a, c, g, or t
  misc_feature (884)..(884): n is a, c, g, or t
  misc_feature (947)..(947): n is a, c, g, or t
  misc_feature (952)..(952): n is a, c, g, or t
  misc_feature (1007)..(1007): n is a, c, g, or t
  misc_feature (1090)..(1090): n is a, c, g, or t
  misc_feature (1144)..(1144): n is a, c, g, or t
  misc_feature (1205)..(1205): n is a, c, g, or t
  misc_feature (1216)..(1217): n is a, c, g, or t
  misc_feature (1464)..(1465): n is a, c, g, or t
  misc_feature (1471)..(1471): n is a, c, g, or t
  misc_feature (1478)..(1479): n is a, c, g, or t
  misc_feature (1494)..(1494): n is a, c, g, or t
  misc_feature (1507)..(1508): n is a, c, g, or t
  misc_feature (1515)..(1516): n is a, c, g, or t
  misc_feature (1524)..(1542): n is a, c, g, or t
  Peptide Sequence Number=SeqID_6009
  Probeset Number=SeqID_11060
cacanagcagcaatccatatagtgacaacacatccnacagacttgtactagtactcctgtcttatttaagcgtanataggagaggtaactagtgtatctgtaacaccgcnncctcggncgtgatcgtcgatcgaagtgancacgacgcgatacttacgtagacgtacaccagtgctacanacgctcatatactgtatactatcttctnttacagctattcgcgcgtttgtngcgganctcttgcgtggctctctggcgcgtgtctctangcttcggagacgcactaacgatcgcangcgatgtgtcgcaatgagtcgcgtgttgatcctnggactgctcacttncncgtatnggtctcttgatangcgctgancgccatgcgctggatnttcgttgtccgtctcgattatgagtgtgctcgtcgtcgtgcatatcanatttgnttggtgtggcangtgtgatancatcncgagtgaggtggcgatangncactctgcgtagtgcgctngctttcatactatgtcatggcgagcatatggtgtgtngtggagttgggtcgacntctcagacgaggtntgtgagagacggacgaccacgctcgcgtgcttgttgtcctctaccataacaagtcgtcgctagagatngtactcacatctataactatatataatgtatagagtcctgagtgtgctcccatngtcgggnaacancncanagatgcgtcatgacgcagcgaacgacgtaacccatatttccattctctcantctacttctacctctcctnctnctntatatataccanaatacaancaatacaatancacaattcacaccacacatctcanacactctatgctttgatagttatccttggactnncgcnccacggcccgaacgcgatcggcatcatactgtctctcgcgcacgccaagagatgagaaggganaggtnaataacatatactagatgtacaacatgagacaaagtacaagcagggagagagatnggggagaggtaagggagataataatacaaagcagcgcagaatagtgtagggaagatgtgaaccacactcgtctatcagcatanccttcacctcatggagttatgcaatgcggggcgccagactcacccctaccacanctacttcatattacctcagcatacgacattatacagtagcatcgaccgagaccgagaaccngtatgaacacnnacctctcagcgtgtatatctgcatgttgtataactgtggtcttgacacgcagatataagacttccacaccttcatgtgagttcatttctttagtgatgagataagatagagtgtatgcggttgtcacctttctcccgcttgcctcgcgcgcgcggagaagggccacccttattatgataagataaagcgtctccctccgcacccctcccgtggaggatggtgtcaataccctttttttatcatcctnncgcggngtgggtnnggagcgcccggcgangtggtttatgggnnccccccnngggggccnnnnnnnnnnnnnnnnnnn

SEQ ID NO: 1282 - DNA, 945 bp, Glycine max
  misc_feature (1)..(344): n is a, c, g, or t
  misc_feature (945)..(945): n is a, c, g, or t
  Probeset Number=SeqID_11061
nnnnnnnnnnnnnnnnnnnnnnnnnnnnnnnnnnnnnnnnnnnnnnnnnnnnnnnnnnnnnnnnnnnnnnnnnnnnnnnnnnnnnnnnnnnnnnnnnnnnnnnnnnnnnnnnnnnnnnnnnnnnnnnnnnnnnnnnnnnnnnnnnnnnnnnnnnnnnnnnnnnnnnnnnnnnnnnnnnnnnnnnnnnnnnnnnnnnnnnnnnnnnnnnnnnnnnnnnnnnnnnnnnnnnnnnnnnnnnnnnnnnnnnnnnnnnnnnnnnnnnnnnnnnnnnnnnnnnnnnnnnnnnnnnnnnnnnnnnnnnnnnnnnnnnnnnnnnnnnnnnnnnnnnnnnnnnnnnnnnnnnnccacaagttgtccacacacacacagtgtggaggctaaaggattataatttttcaaaataacattgttttgcaacacctggtggtgatttcggcaaccccggttcgcaaaccctggcgaattggttcaagattgagaagtatgaggatgcttacaagttggtttactgtccaagtgtgtgcaacgattgcagttatccatgtcggtgatattggaatataccaggttgaatatggcaagcttcttgttccaagtttctaacccatacaaagtgaagttccaagggggattgacaatggaattgataacagaattgattaaagaataatttataaaattaaggataagttttatgcatttgctgaatattatggtatttctcttgttgtgctcctgtcgagttacttgcctaaaatattaaaacaaatcataatgtggcaatttcaataaatgttttagttacatagaggatcatatcacgttttattcttagaattcacaaggaatcaatgttttaaatatcggtcgcggtcgtgttgtcatttggtcacattagttgatacagtgagaaatcaaattttgtaaaaaaaaaaaaaaaaaagn

SEQ ID NO: 1283 - DNA, 2072 bp, Glycine max
  misc_feature (22)..(22): n is a, c, g, or t
  misc_feature (27)..(27): n is a, c, g, or t
  misc_feature (31)..(31): n is a, c, g, or t
  misc_feature (36)..(40): n is a, c, g, or t
  misc_feature (43)..(43): n is a, c, g, or t
  misc_feature (54)..(54): n is a, c, g, or t
  misc_feature (99)..(100): n is a, c, g, or t
  misc_feature (103)..(104): n is a, c, g, or t
  misc_feature (128)..(129): n is a, c, g, or t
  misc_feature (132)..(134): n is a, c, g, or t
  misc_feature (172)..(173): n is a, c, g, or t
  misc_feature (242)..(242): n is a, c, g, or t
  misc_feature (261)..(261): n is a, c, g, or t
  misc_feature (265)..(265): n is a, c, g, or t
  misc_feature (305)..(305): n is a, c, g, or t
  misc_feature (363)..(363): n is a, c, g, or t
  misc_feature (369)..(369): n is a, c, g, or t
  misc_feature (446)..(446): n is a, c, g, or t
  misc_feature (575)..(575): n is a, c, g, or t
  misc_feature (708)..(708): n is a, c, g, or t
  misc_feature (835)..(835): n is a, c, g, or t
  misc_feature (902)..(902): n is a, c, g, or t
  misc_feature (954)..(954): n is a, c, g, or t
  misc_feature (1066)..(1066): n is a, c, g, or t
  misc_feature (1150)..(1150): n is a, c, g, or t
  misc_feature (1187)..(1187): n is a, c, g, or t
  misc_feature (1202)..(1203): n is a, c, g, or t
  misc_feature (1522)..(1522): n is a, c, g, or t
  misc_feature (1566)..(1566): n is a, c, g, or t
  misc_feature (1620)..(1621): n is a, c, g, or t
  misc_feature (1651)..(1651): n is a, c, g, or t
  misc_feature (1653)..(1653): n is a, c, g, or t
  misc_feature (1702)..(1702): n is a, c, g, or t
  misc_feature (1868)..(1868): n is a, c, g, or t
  misc_feature (1910)..(1910): n is a, c, g, or t
  misc_feature (1938)..(1938): n is a, c, g, or t
  misc_feature (1971)..(1971): n is a, c, g, or t
  misc_feature (1989)..(1989): n is a, c, g, or t
  misc_feature (2016)..(2016): n is a, c, g, or t
  misc_feature (2040)..(2040): n is a, c, g, or t
  misc_feature (2053)..(2053): n is a, c, g, or t
  misc_feature (2062)..(2062): n is a, c, g, or t
  Peptide Sequence Number=SeqID_6010
  Probeset Number=SeqID_11062
tatagcgaaatatgaacgcagngagangagnagaannnnntgnggttgtgtttngtgttgtgacgtccgtgcggagtcgctgggcgcgtgcggaatatnnatnncttaatttatattatattgttcgnncannncgccggcggagggagggtaggcgaagtttctgttcatnnctcttgcgctgccgctccgtcgcagcgcgctgcggggagggacggtgtgcgcgtggcttgtcgctctcngcgctgctcgccgtcgccnacangagtggggtgttggagacgcttattctcgctaacactgtnatctcacctctgttgtctcttctcgactgcgcgtgtagtcgcggctgacgaggagagncacggncagcgagtggggcgtgagcggtgctggggagtgagagggtgtgaggcgggtgtgcggtggtgccacttatcttccanatgtatcctcctgctcacatcttctctcctcacctaccacctgctcgttctctactcctctcgcactctacgctctgctatgctctcccagctatcgccagacacatcgcgatatctccctctccgcgnctcaccgcgcgcgcgcactgcctctgcgtggcgctatgtgtcacagtgatgatcttgctctacgctgccctcgtactgtctcatctactcacacacactctaccactaacactctctgtacaccacacacatnatttctgttcagttatagtagaacaagcgacacaccagagatgcggcgcgcgacacggcgggcgacacaagggtggggtgagagagtgctacacgggtgtagactaccggaatcgcccgccgcactnggtgttgttgtctgctctcgccgcccccgttcccgtggctgcgtgctgtgctcgtgtgagggacgtngtcgtgcctacaactaatatatatgtatgctcatagacacactagcaacttnatatcgcatagagtcgttgggtgttgacatgtcgagtcttcaacacaacgacacacatgtggtatcactcacacgccgacccgtagttcctgtgcctatcatcttgcgccangagatcgattcgagagtgatccgctcgcccgtggtgcgtggcgtgtcgcgcgccgctagagtagtagctacggagtagcgaggnagctcgtgacgcatagtactacgctccgcatgacagngctcatcttctcttnntgatcttctctagcctcactcactcgcatcctagctctctccatctctctcccgtcactcgcggtcacgctcacgcgcgactcgccgctgccactcaccgccgcgacgcgcacgccgccgacgcgcgcaagagcgtggtcggagaggcacgcgacctcacgcggcaccgcgataggacgagagacgcagggacgctcacgaccaggaacgagatatgttgtaggcacatgttaaactcgatctgcttgctctgtcgtctcgtgtcggctgccgcatcctctcctctcgtctcgtgtgtggacgtgcgcgttgtgcgtgngcctatgtacattacacgcgcgcgtctgtgcgtgtgcacgctcntgtgccgtccgtaccgtctgcgagactatcgaagcgatctgaattcctacacgnncctcgtgcacccgacacgcctgcacatccncngccgctgcctccactctctgctagatgctgatgtgtctgtgacgtgtangacgtggcatactgttcgattatgtgatgttctgtctacgcgtgtgtattgtgactacagccgtagtttaggactgagtctacgcgcgcctcgcggcctctatgttatggttccataactctgagcgcttctgagcggcgccggcccaaccgcactactcgatatnagatgagaaggcaatcaagaattaaacacacgccgggcgatnacattgctgatacaggatggcgatgatngctgtgtgctggtgtcctcgttatgtggtgtcncttcgcgtctgatgctgngaccagcatgtgaggacgtagggagantgtggtgcggagcgtcgcggcggngcacgacgaggtngctgcatantgtgtagcgg

SEQ ID NO: 1284 - DNA, 1034 bp, Glycine max
  misc_feature (867)..(1034): n is a, c, g, or t
  Probeset Number=SeqID_11063
gcattcttgttctctaaattctcttctgagcgcgtgtctactattgtgtgttcatcaccattgaaatcaccagttaattttgtgctgctttctgatgtgtcgtgtccttccgctgttgtgtgttttgtactgacattcgacacgctcgattcttccgattggtggtctgcttgttcttctttcaccacgctgatgttgtccatgttttcgggttgttcaggttcctcaacaacagtggaccaacaacgcgtttcagctggctcacacattcttaatttttttggctggcctatagtaaaaactcatatcaatgtcctcaagaacgttgaggagaagactccagctggggatgttgatggcaaaaggcaggagcatttggagacttcgggattagattcgttgagtgagcccttgggagatgatgattatattgagaattttttgttatgtactcttgaagatctatgggatgatgagaggaagaaggcccagtttcattggacattcatattctcaaacctcattgcacaatgggcacagtggttagcaaatgttgtactaggatctggatctattcttgggcgtcttctatcttttccttctgctgctttaaacatgcaaaacaataggatgcttcctccatctctaagccctctgcaggaagacaggctaagaaacctacggcaacggcttgaagtcccctttgatggttctaaagcagagcaccaagatgcacttaaattatctgttgaaattgtcatatcacctgacagttgccactatttcctgcttcaaatctgtttatttttggcttgtttttatgttgctatcatcttcatctgtaacttttgatatcaattcatgaannnnnnnnnnnnnnnnnnnnnnnnnnnnnnnnnnnnnnnnnnnnnnnnnnnnnnnnnnnnnnnnnnnnnnnnnnnnnnnnnnnnnnnnnnnnnnnnnnnnnnnnnnnnnnnnnnnnnnnnnnnnnnnnnnnnnnnnnnnnnnnnnnnnnnnnnnnnnnnnnnnnnnnn

SEQ ID NO: 1285 - DNA, 2085 bp, Glycine max
  misc_feature (9)..(9): n is a, c, g, or t
  misc_feature (59)..(59): n is a, c, g, or t
  misc_feature (64)..(65): n is a, c, g, or t
  misc_feature (73)..(73): n is a, c, g, or t
  misc_feature (83)..(83): n is a, c, g, or t
  misc_feature (109)..(109): n is a, c, g, or t
  misc_feature (172)..(172): n is a, c, g, or t
  misc_feature (179)..(179): n is a, c, g, or t
  misc_feature (181)..(181): n is a, c, g, or t
  misc_feature (195)..(195): n is a, c, g, or t
  misc_feature (208)..(208): n is a, c, g, or t
  misc_feature (214)..(214): n is a, c, g, or t
  misc_feature (246)..(246): n is a, c, g, or t
  misc_feature (271)..(271): n is a, c, g, or t
  misc_feature (315)..(315): n is a, c, g, or t
  misc_feature (332)..(332): n is a, c, g, or t
  misc_feature (337)..(337): n is a, c, g, or t
  misc_feature (352)..(352): n is a, c, g, or t
  misc_feature (403)..(403): n is a, c, g, or t
  misc_feature (406)..(406): n is a, c, g, or t
  misc_feature (408)..(408): n is a, c, g, or t
  misc_feature (419)..(419): n is a, c, g, or t
  misc_feature (497)..(497): n is a, c, g, or t
  misc_feature (518)..(518): n is a, c, g, or t
  misc_feature (598)..(598): n is a, c, g, or t
  misc_feature (615)..(615): n is a, c, g, or t
  misc_feature (621)..(621): n is a, c, g, or t
  misc_feature (629)..(630): n is a, c, g, or t
  misc_feature (636)..(636): n is a, c, g, or t
  misc_feature (657)..(657): n is a, c, g, or t
  misc_feature (736)..(736): n is a, c, g, or t
  misc_feature (787)..(787): n is a, c, g, or t
  misc_feature (791)..(791): n is a, c, g, or t
  misc_feature (820)..(820): n is a, c, g, or t
  misc_feature (850)..(850): n is a, c, g, or t
  misc_feature (947)..(947): n is a, c, g, or t
  misc_feature (1058)..(1058): n is a, c, g, or t
  misc_feature (1178)..(1178): n is a, c, g, or t
  misc_feature (1265)..(1265): n is a, c, g, or t
  misc_feature (1272)..(1272): n is a, c, g, or t
  misc_feature (1394)..(1394): n is a, c, g, or t
  misc_feature (1410)..(1410): n is a, c, g, or t
  misc_feature (1443)..(1443): n is a, c, g, or t
  misc_feature (1458)..(1458): n is a, c, g, or t
  misc_feature (1505)..(1505): n is a, c, g, or t
  misc_feature (1516)..(1516): n is a, c, g, or t
  misc_feature (1539)..(1539): n is a, c, g, or t
  misc_feature (1613)..(1614): n is a, c, g, or t
  misc_feature (1638)..(1638): n is a, c, g, or t
  misc_feature (1644)..(1644): n is a, c, g, or t
  misc_feature (1658)..(1658): n is a, c, g, or t
  misc_feature (1670)..(1670): n is a, c, g, or t
  misc_feature (1785)..(1785): n is a, c, g, or t
  misc_feature (1834)..(1834): n is a, c, g, or t
  misc_feature (1863)..(1863): n is a, c, g, or t
  misc_feature (1877)..(1877): n is a, c, g, or t
  misc_feature (1881)..(1882): n is a, c, g, or t
  misc_feature (1894)..(1894): n is a, c, g, or t
  misc_feature (1906)..(1906): n is a, c, g, or t
  misc_feature (1934)..(1934): n is a, c, g, or t
  misc_feature (1936)..(1936): n is a, c, g, or t
  misc_feature (1946)..(1946): n is a, c, g, or t
  misc_feature (1952)..(1952): n is a, c, g, or t
  misc_feature (1956)..(1960): n is a, c, g, or t
  misc_feature (1962)..(1964): n is a, c, g, or t
  misc_feature (1966)..(1970): n is a, c, g, or t
  misc_feature (1982)..(1982): n is a, c, g, or t
  misc_feature (1986)..(1986): n is a, c, g, or t
  misc_feature (1988)..(1988): n is a, c, g, or t
  misc_feature (2000)..(2001): n is a, c, g, or t
  misc_feature (2004)..(2004): n is a, c, g, or t
  misc_feature (2006)..(2009): n is a, c, g, or t
  misc_feature (2023)..(2023): n is a, c, g, or t
  misc_feature (2044)..(2044): n is a, c, g, or t
  misc_feature (2054)..(2054): n is a, c, g, or t
  misc_feature (2066)..(2070): n is a, c, g, or t
  Peptide Sequence Number=SeqID_6011
  Probeset Number=SeqID_11064
cgttcacantcgtgcaagacgtgtgtgctcacatgacatcgcatcagggctggtgagtnagtgnnatgatagnaagataatgntgcggtatcgagtagttggatggtgnttcgatatgatcgagtgacggcgtcggtcggagtgcacggtagacgctcatacgaggagtcgnagtagancnagaagcagacgcgnaggcgtcgtagcngtatangtgcatcgagccgtcagcgtagcgcactagcngcacgacatgtataagggaaggagnaaaatgacgtagtagagagcacgactcgacatcatctgtatatnggaatcgctcgtacacngcagntaccatcagcgatcnttctccgcggtgcctagtcactgcagtggagatctaagatagtaagatganggngnagatgagatangaatactagaagcgccacaaacgcgtgctgggcgatacagtacagtcgggaagctcagcgcatgtacgcatggtcatngtatgtcatccgtacgtgagncactgctctctacggcgttagatcctatagtagtgtactacctcccgcactgcgagtcctatttcacaatcatcggtgtntctcgtgcatgggtagntgagtnctagtcgnntgtgtntgtgtacgcgcatctgtcgtncatgtaatgacaccgctataaccacacttcgacgtcatactacagtatgtcgatggcgatgtcgcatcatccggagtantctgcgcatatcattatgatcagtatgtaagcattgacagtagagcgtagnatgnacagttgcatatatagttgagtatagtancgagcgtgtgcgacaagttgtgtggtgtgngagggtgctgctgatgatcgctacaccactggtctggagtcgtgtgtgctgtatgtatgatcttcaataacagcgatatgcgtattcacataccatntttttctcgtcatcgtcatactatagcgttcaactacgtatgatacgtatgaagcttcagagatatcagcactaacactcatgtgtcgtgcatgggtctcagtgagaagcntattatgacaatctgatagtaatatagatttgtctattgctgtaatatgtgagaaagtgataatgtggtagatgtactgtgtccgtctgtcgcacgctgctgtgtgcagtggttgggtgntggtgtgacatactattgatgtactgtctttatcttccacttagcagtctcagatacctgtaagagttttgatcagtgtgcatcgtnagacatncttccataagaccgagcgttactatgtgggtgtatacttaatatatatacatacgatatgatagcttgatgattatatataataatagacgcttagataatcgtgcccgagtgcattcagangtactggcactcaggncggcggcgggcgcaccgggtgtgtcctcacgcnctcggcgcctcgcgncacacgccaccacgacgacttccacatcggccacctctctcgcactntccaccagccnagtggaagacaacgaatagaganataacaacacatcgcaagaaagatgaagagcgaaaccgacaatagcagacaagccgtagaataataacccactnncggcagagccggcgagacggacgncagatngcagagagacacgncgcagagagaancgatcacaccaagcgacaacgcggcggagccatctaaccaccatacaagaggggcagagagtagcacacagccgggcgagccggccggtacatagagataggagattataaaaanagatgaaagatgaaagtgaagcgcctctcttctccctgttgcccaccgncacacaagaaagaggggagaagatacganacaaagagagaatnatanncgcccagccccncgcgacgacgangagatcacaacgagcccacatccgccgncntctccccctngcctcntttnnnnncnnngnnnnngggggggggggnccgngngcaaaggggggnngangnnnnaaacacggaaaggngcgcacacgcgacacaaccancagcaccccncccccccccaannnnnaaaccaaacacaaac

SEQ ID NO: 1286 - DNA, 433 bp, Glycine max
  misc_feature (189)..(189): n is a, c, g, or t
  Probeset Number=SeqID_11065
tgcaattgttgctgcttcatgggacaggaccggtaaggtttggaacctgaccaactgcaagctgaagaacacccttgctggacacaatgggtatgtgaatactgttgctgtttcccgtgatgggtctctctatgccagtggtggcgaagatggggttattgttctgtgggatgtggctgaaggtaagcntgtttactctctcgatagtagctcgatcatgcatacactctgctgcagccccgacaagtgctagctctgcacgaccaccggtcagaacatcaggatctagaatttgaacaacaagactatcgttaaagatttgaaaggtaagctgaagactgaggctaataccagctggcatagtgataacggcaacgagagcagagtgattgattacgcaagtgttgactggaggtcggatggaaacgctgtg

SEQ ID NO: 1287 - DNA, 1388 bp, Glycine max
  Peptide Sequence Number=SeqID_6012
  Probeset Number=SeqID_11066
gaacagaagtaatttagttcgtaaagaaaacagtttgtggtgtgtagcaatataaataatttaataaaaattgtaacaagatggctttgcgttggggtatttcatgtgctggattgattgccaacgatttcgttaacgcacttcaaacattaaatccagacgatcatcaaattgttgccgttggttgccatgatattaaagaatcagaaaaattggcaaccaaatttgaaattccaaaagcttatggaagctatttggaattggcacaagatccaaatgttgaacttgcatacgttggtacattgaatccatggcattacgaagtatctaaattgatgcttgaacatggtaaacatgttttgtgcgaaaaaccattgtgcatgaacttgaaacaaggccaagaattaattgcacttgccaaagagaagggtgttttctttatggaaggactatggtgccgtttcttcccatcatatcaacatgttcgtaaacaaatccgtagcggtgctgtcggtgaaattctatctgttaaagctgaatttggtattaaggatttggtcaaagttggacgtttatcaaaaaaagaaatgggtggtggaaccattttggatatgggagtttatacaattcaagcgtgtcaatgggtgctcgaacaggaaccaattgcaattaaagctaaaggaaaactcaatgaagaaggtgttgatgtcgaaatgtcagccgatcttgattatggtgataataaaaaagttcaaatcaacacatcagccttgaatcaactcagcaacagcgtgaaaatcgttggaacaaaaggcgaaattacgatccaccaaatcttctgttcaatctcagtgaccgatgttgatggaaaagtgcacgaatggccattgccatcggccaaatttgatttccattatccaaacagttgtggtcttagatacgaagctgaagagatccgtaaagcaattcgtgctggtaaattggaacacgaaaatgtaccacacacagacagtttaggaattgcccgtattcaagatgagttgagacgacaacttggcgttcactacgaaggacatgatgattgaataatttagatcttgttacaatttttattttaaactaaccaaatttcaattggccaaccaccacaatatatatagatagtagttgaatagattcgatttttttttagtcaatttttctgcaatttaggatattatatagtgggcccgaccataggaaataaataacaacatagattttccatttattgttatgaccacaaattgttttatcgattagaaaacaaacatacacaaacaaaaatattgtaaacatttacattaaatacgaacaattacttttagaaaataaattcattttatgtc

SEQ ID NO: 1288 - DNA, 422 bp, Glycine max
  Peptide Sequence Number=SeqID_6013
  Probeset Number=SeqID_11067
agtggagcatgatggtcatgcaaactatgaaagaggtcatgaaattcttgaaaagatggcgaagcaaaatgaagaacctgaacatataattgagcagctcaaggtagaacttcgagaacaaaaactgaaagcaaaggaggatgcagaagatctcactcaagaaatggctgaattgaggtaccagataactggcatgcttgaggaagaatacaagcgccggtcttgcattgagcaagcggctattcagcaaattcagcagctggaggttcaggtctccaaagagcaaaggaaattgagtggagcactaagacgactgcaggaatcgcatgagctagctgacacgcaagctacggagattaagaaactgaaggatgctttaggggtatgtgcatgtaggttatagcatcccaccaaaaatgaac

SEQ ID NO: 1289 - DNA, 1651 bp, Glycine max
  misc_feature (7)..(7): n is a, c, g, or t
  misc_feature (64)..(64): n is a, c, g, or t
  misc_feature (68)..(68): n is a, c, g, or t
  misc_feature (103)..(103): n is a, c, g, or t
  misc_feature (107)..(107): n is a, c, g, or t
  misc_feature (123)..(123): n is a, c, g, or t
  misc_feature (162)..(162): n is a, c, g, or t
  misc_feature (212)..(212): n is a, c, g, or t
  misc_feature (223)..(223): n is a, c, g, or t
  misc_feature (303)..(303): n is a, c, g, or t
  misc_feature (308)..(308): n is a, c, g, or t
  misc_feature (334)..(334): n is a, c, g, or t
  misc_feature (399)..(399): n is a, c, g, or t
  misc_feature (425)..(425): n is a, c, g, or t
  misc_feature (472)..(472): n is a, c, g, or t
  misc_feature (518)..(518): n is a, c, g, or t
  misc_feature (676)..(676): n is a, c, g, or t
  misc_feature (680)..(680): n is a, c, g, or t
  misc_feature (702)..(702): n is a, c, g, or t
  misc_feature (718)..(718): n is a, c, g, or t
  misc_feature (720)..(720): n is a, c, g, or t
  misc_feature (723)..(723): n is a, c, g, or t
  misc_feature (842)..(842): n is a, c, g, or t
  misc_feature (850)..(850): n is a, c, g, or t
  misc_feature (853)..(853): n is a, c, g, or t
  misc_feature (864)..(864): n is a, c, g, or t
  misc_feature (866)..(866): n is a, c, g, or t
  misc_feature (868)..(868): n is a, c, g, or t
  misc_feature (973)..(973): n is a, c, g, or t
  misc_feature (1117)..(1117): n is a, c, g, or t
  misc_feature (1222)..(1222): n is a, c, g, or t
  misc_feature (1291)..(1291): n is a, c, g, or t
  misc_feature (1413)..(1413): n is a, c, g, or t
  misc_feature (1417)..(1417): n is a, c, g, or t
  misc_feature (1449)..(1449): n is a, c, g, or t
  misc_feature (1453)..(1453): n is a, c, g, or t
  misc_feature (1465)..(1465): n is a, c, g, or t
  misc_feature (1503)..(1503): n is a, c, g, or t
  misc_feature (1565)..(1566): n is a, c, g, or t
  misc_feature (1602)..(1602): n is a, c, g, or t
  misc_feature (1607)..(1607): n is a, c, g, or t
  misc_feature (1620)..(1620): n is a, c, g, or t
  misc_feature (1625)..(1627): n is a, c, g, or t
  misc_feature (1632)..(1632): n is a, c, g, or t
  misc_feature (1651)..(1651): n is a, c, g, or t
  Peptide Sequence Number=SeqID_6014
  Probeset Number=SeqID_11068
gagtgangcatgagtagagcatcgtcaaatcatcgacacactctcatgaatgaagtactgcgantacnacatcgacacacatatcgcctcactcatcatacanccanattatatcactatctnatcgcaccgacaccagccactctacgcgtcacgcgcacntatcactcaccacgcgcactgtctctccatcctatcttctgccagactgnttgagtagtgntgagggagtgatagaccgcgtgtagtatacatgctcactctcaccgacagacatgagcggtgaagagatatatgcgtacnagcgntactgactgaagtgcggatcgtacanagcacgcgcgcacatgatagagcgctataactatataatatacatcacacagcgtcgcacactgnctatcggcacatcagcagcgacgtancctggattatgcacgctcacacattcactctagcatctcacaatacnagtagaggagcagtgatggtagcaagacagctagcacaatgaatgngaatgcgccaagcatacgttgggagagcatgatgtcgtagactgtggcatacgtggagccgcttttgaagacagataggtatacttaatatcgcgtgatacagtagctatcaatcattgcgtactcgctcatcctacctctatgctctctcgcggggngggntgttgcggtcggtcgtgtaatnatctctgttactatcncntanaaatctctctggcgctatgcgtataccgcacgcacgctcgtcctcatcccacaacagccgagaatcatgcgtgagacaaggtgcgtacatagtctgttttttatttattcttttttttnctaacatngtnttacacccaantntnataataattacacaacctcactctctacaacacaactctatcttatacacagtgctacgccgctgacaccgtatgtatcgataagagatatgttgagaataaatnacgagcactaacgagcgatactgctgtcaccgaccttaacatagtggcgggagtggtcgggcgtgcatagtcaagaagtagtcgtctgcagagtacgtatgcgcgatgtgaggatccctccaacagaagtatctatatatctantctctcgtgttcttctttatgagtatgtgagtgtatacgcaggttagaccacagcagccacaggtacgcggcgcgaaggtctgcctcgcgattacataaacaatnccgcccgcgccagcacatgctgctcgctgtgcgttcgagaagagatagacactctcaccagacgcggcntccacccgcgcacattaccctccgctactctgatggatatatatagagcgcgagtgtaggggataaatacccacgacgatgtatagtatacgcagatagaggcttaggtcaccaccatgtgncatncaacacacaataacataattataaggagtgangatngagagcgccggnatctatccacagactttagatgacggtttttctcttcnacatctcgcagacctgccgtagtgcgagaggccactaataaaatacatagttcgagagaggnnatatacttaatttatgagttagtgggcgttagaggntgggntacacgtaagaanagaannnagaangggcgggaaaaaaaaaaan

SEQ ID NO: 1290 - DNA, 2023 bp, Glycine max
  misc_feature (71)..(71): n is a, c, g, or t
  misc_feature (213)..(213): n is a, c, g, or t
  misc_feature (345)..(345): n is a, c, g, or t
  misc_feature (473)..(473): n is a, c, g, or t
  misc_feature (600)..(600): n is a, c, g, or t
  misc_feature (992)..(992): n is a, c, g, or t
  misc_feature (1052)..(1052): n is a, c, g, or t
  misc_feature (1143)..(1143): n is a, c, g, or t
  misc_feature (1196)..(1196): n is a, c, g, or t
  misc_feature (1232)..(1232): n is a, c, g, or t
  misc_feature (1256)..(1256): n is a, c, g, or t
  misc_feature (1306)..(1306): n is a, c, g, or t
  misc_feature (1344)..(1344): n is a, c, g, or t
  misc_feature (1355)..(1355): n is a, c, g, or t
  misc_feature (1372)..(1372): n is a, c, g, or t
  misc_feature (1408)..(1408): n is a, c, g, or t
  misc_feature (1431)..(1431): n is a, c, g, or t
  misc_feature (1501)..(1501): n is a, c, g, or t
  misc_feature (1513)..(1513): n is a, c, g, or t
  misc_feature (1515)..(1515): n is a, c, g, or t
  misc_feature (1517)..(1517): n is a, c, g, or t
  misc_feature (1549)..(1549): n is a, c, g, or t
  misc_feature (1573)..(1573): n is a, c, g, or t
  misc_feature (1623)..(1623): n is a, c, g, or t
  misc_feature (1641)..(1641): n is a, c, g, or t
  misc_feature (1681)..(1681): n is a, c, g, or t
  misc_feature (1696)..(1696): n is a, c, g, or t
  misc_feature (1704)..(1704): n is a, c, g, or t
  misc_feature (1710)..(1710): n is a, c, g, or t
  misc_feature (1745)..(1745): n is a, c, g, or t
  misc_feature (1779)..(1779): n is a, c, g, or t
  misc_feature (1791)..(1791): n is a, c, g, or t
  misc_feature (1807)..(1807): n is a, c, g, or t
  misc_feature (1813)..(1813): n is a, c, g, or t
  misc_feature (1857)..(1857): n is a, c, g, or t
  misc_feature (1861)..(1861): n is a, c, g, or t
  misc_feature (1874)..(1874): n is a, c, g, or t
  misc_feature (1884)..(1884): n is a, c, g, or t
  misc_feature (1893)..(1893): n is a, c, g, or t
  misc_feature (1895)..(1896): n is a, c, g, or t
  misc_feature (1899)..(1899): n is a, c, g, or t
  misc_feature (1915)..(1915): n is a, c, g, or t
  misc_feature (1922)..(1922): n is a, c, g, or t
  misc_feature (1984)..(1984): n is a, c, g, or t
  misc_feature (2001)..(2001): n is a, c, g, or t
  misc_feature (2014)..(2014): n is a, c, g, or t
  Probeset Number=SeqID_11069
gtgctaatgtgtcatggcgcgaagaagcgacgagagaaggtgagagagggagaggtagaggatagagaaanacaccgtatgcgtactcttgatcataaacctcataaagccactcacatacatgcactatacaacgagatggatgtgggcggctagcatcccttacttatactcctagaatgagacagatgagatgcgcgaacacctcgctcntcagcagttatgtgatcacaatcgtgcagtgagctgcagaacattgtttgtcgccacccctgacaattctctgtcacgcctgaacctacggtagatgtatgtgtaagctaacaatggacgagtgcccctaancacagacgagcgtcgtcaagctatcgtactcagctccctccgccacatgaagctcgaacgtccatgcttgtcattacgctctttctctgcgctcatcatcgcttgtgccgcgttaacaccgccagccntatattctgttatattcttgcagccgacgctgacaacggcgcagcgttggaggggagccgacggtgtgcccgtatctggtacggcacgtctcgtgtcgcaatccactaccgtacgacatcattcganatcatattataacgacttaccgcgcgcacgccgacgaacgcgctgtattctggccgatgataattatcctacgctaacgtaggtgcctatcaacataattacacaagcgtatatcaatgatgatagcgcgtagatatattacaatagcgaagtacatagttaacgttccatagcgacatgacgtcgacacgcatattgacgacaacagcccgtgtcacgaccgacacacacagatcagtaccgtacgctaagaataactaccgaaggaagcaggcgagaagtgtcacggtcacatcttcgaccgacgccaaagaagagacgatgagatcatagtgtaaccggtgacatacgtatcggtagcctacggtcgaacgacagcgcgtacgccagangatcggctacggctactaagaggccacaatgttcgctgcgtgactctcccatgatggacncgtggcaccgcatcggtctaactaatactccagtgcatgtccgtcaatgtgtgtgaggtctatctgtatacacgcgcatacgacgagctcnactctctacgaagcgcgcctagtgatgtgtgtgccgagagctacagatctctngaagacggacggccgctgctctctaatctcgtgctngcacgtgcatgtgagtcgctgcgnagcgcatgcatgagatatctgtactgtgagcgctatatcacgaaacacgncgccatcacgaacaatgtattacatatagacatgacanagcgcgcgagnagatgagcacatatatntgtcgcgtcttatcgcgcacgtactctctgttcganacgtgagatgaagctcacctgcncgatacgtgtcgatgtagctacgcacatcgagacgatgtgatgagagtagtgctatgctgatacatcaantgcgctcaactngncncacgagtgtgcgtgcgtgacgctgtagatacnagccgcatcatcagcgctcatcancaacgtcatatatgtctcgtactcatgactctagcttactctgatgacancgacgacgtgtgcgcgcntacgacgcaaaggcatacgacgcgacacgtagcgtcgtcntacgcaggtacgatncggctcancgctgngcactgcgtcacgctcagtgctcgtcgtcgtctancgtacgacgactgtgacacgtgctagttctcaangaatggctgatngcgacgtagcatactngtacanacgcgttgacgactaggactccaaccgtcatcggcgtctcggangtcnatgctatagtcantagcagaacntccgtgctnannatncgaagcgtccgatgcnacgagantacgcagcagagcattgcgacgggggagcgtactcgtcgcgatggactcgacatcgatgatnctagtaatcaggaggtnacggcggtgcganggcgacagg

SEQ ID NO: 1291 - DNA, 594 bp, Glycine max
  Peptide Sequence Number=SeqID_6015
  Probeset Number=SeqID_11070
acttcagcatcctcatcatcctccatcttctccttcacccctaaaaccctaaccatacccccacagcaacctcgcttcaccgtccgggcccactccaaaccccccattctccccaacctcaaaccctcgccggcgccgcggccttcacgccgtcgcgctccattcccctccaccggaggggcctcccctccgcgtcctctcaaaaccaaccaccgctcaaccggcgaggggaccctctcccctgtctgcggccgcggtatattccaacgccgagaaccccagcccgcctccagaccctcgcccaggagaagaccccgagctctgcaaaaaccaccgaaggaagcacgacggatgtcgacgaaaaataaagggggagaggacgagcggaaaagaaaaaagggaggtgggaggaggaggagaagaagacgaagaaggaagagagaagaggagcggggggggggagaagggggggcggagagccggcgagaggaacagaacccgcgggcgcgggagggcgaggagaaagagcgaggggagagaaggaaaagaaaacaaagaaaaagggagaggaaggaagagggggagggggggcga

SEQ ID NO: 1292 - DNA, 1563 bp, Glycine max
  misc_feature (50)..(50): n is a, c, g, or t
  misc_feature (56)..(56): n is a, c, g, or t
  misc_feature (143)..(143): n is a, c, g, or t
  misc_feature (190)..(190): n is a, c, g, or t
  misc_feature (212)..(212): n is a, c, g, or t
  misc_feature (214)..(214): n is a, c, g, or t
  misc_feature (241)..(241): n is a, c, g, or t
  misc_feature (274)..(274): n is a, c, g, or t
  misc_feature (280)..(280): n is a, c, g, or t
  misc_feature (286)..(286): n is a, c, g, or t
  misc_feature (313)..(313): n is a, c, g, or t
  misc_feature (318)..(318): n is a, c, g, or t
  misc_feature (460)..(460): n is a, c, g, or t
  misc_feature (834)..(834): n is a, c, g, or t
  misc_feature (914)..(914): n is a, c, g, or t
  misc_feature (1100)..(1100): n is a, c, g, or t
  misc_feature (1125)..(1125): n is a, c, g, or t
  misc_feature (1215)..(1216): n is a, c, g, or t
  Probeset Number=SeqID_11071
cactcctcaccccctcccacacctctctctaccgctcctctctctactgnagtggntgattcactcgcctagcagcctacacacattacagataagcgcgtcctcgctagcctcctcacgcggcggagcgaggagccacgacnggctatccaattgagaatactgtcgccgcgcagccacacccgcaggngatcgtcgaccagatgtcctcncnccgatgtttagctgcgcgttgctgctnacgcaggggatgtagactcagactactcccctngtaagnttcctntgctgctagagtctggacactaagaancgggncgtctgtaggtcctctcgtcgtcttatcagccgtcgagcgcctgtagtatcgctcgcgatgttagtactatagcgcagagacggaatccttgattgtcgctatcacattcatcctttcacatgcctaccatggcagctcttncacttctctacagatcttagtctcgagccgtagatctcatacgctgtagtatcgcctatctctagatcatgagatacgagcctcgcgcttactaccccggagcggagctcgcatgttcattatcagtgtagtatctagcatagtaactccttgagagataatactatagtcgtgtttatgccgcactggaatgacacttagatcctagcccacagacgaacgcctctatcacatcagcagttgatgttctctgacttgggacgagaccggagctgtgactatgccgaatgtcatagcatgtcgaggagtagcggtatactctctctatgtataggtttatcttctaccctgcgctctccgcctgtgcgagcctnatcttaggagaagtaggacctgctatgctcctcgctcgatgctgctatcgcgcgcatacctccctgatgcgcccattcgncgtgtactcacagaggttgactatcactgcagacctgtgtggtgcagtaagatgagacggaaagtacatcaatcacattcaactcctctcagtatatgaactatatgtctcctacgtatggacactacctctctcattctaggtgtacgaatcatccttcgatctacgctacacatactaacatantgtaactatcgatagtgtagcgtcnctcgccactcgaatacgtcacgatatctgtctctcacgtgttgtcctcatatgtcatcattacgacgtgaatctgccctctgtctcgtgnncgtgcgttcgacattatatatgtattgagggatcacgtctgcatgagtagagtgctagtacctgtactacgagctctctacatcatccaaccagctcgaggatcatcttctctctgacatgcataatatgtatagatgagatgtaatgcgtggtactgtgcggctacatctcactgatactctgagcgtcgcgagcggacgcgtgtgcctcctcatcgttctcggcgagtagtggagcgaatcggtagttgttactgccatgtgcctcctactcgacgcgccgagcgcgctgtgcgactattactctatgtactcttagtacgcgtgatatctcactagcatcttcg

SEQ ID NO: 1293 - DNA, 1409 bp, Glycine max
  misc_feature (1)..(1): n is a, c, g, or t
  misc_feature (80)..(80): n is a, c, g, or t
  misc_feature (138)..(138): n is a, c, g, or t
  misc_feature (285)..(285): n is a, c, g, or t
  misc_feature (735)..(735): n is a, c, g, or t
  misc_feature (954)..(954): n is a, c, g, or t
  misc_feature (1166)..(1166): n is a, c, g, or t
  misc_feature (1369)..(1369): n is a, c, g, or t
  misc_feature (1371)..(1371): n is a, c, g, or t
  misc_feature (1383)..(1384): n is a, c, g, or t
  misc_feature (1390)..(1390): n is a, c, g, or t
  misc_feature (1398)..(1398): n is a, c, g, or t
  Peptide Sequence Number=SeqID_6096
  Probeset Number=SeqID_11072
natctatgtcgatagcgtctcgactcctcgctctatgttatcaattcaccacgttagcacgcgctggcaaggatagaagnacagaactaagagagagagtcgtatatgagaacacactgtcatagttacacagtctcnattggtcgtactagacatacacggcgtaactcgtcgtgatggtctctgtctgttccgagggatggtgtagtggacatctatcgtgtaatctgtattcgaacgcatctcgctctgctgctgtgactatctatcatctgcgagtgccgncgccatgcgcacgagtgactacatgatcttctgtacgtgtagtgtatcccatcgtcttgatatgtatctcgtggattcgtggtagctgtggatcagcgtgagactagcgtgttagagaataagggaccgtgctcgcgcagcaggagcgtcgggcagtgtgctatgcatctgctctctcgatcagacgagactataaactagatgactcgatactatgtatgtatagagtgctcaatctaagtaagagtgagtgtagagcgcgcccgagatacagggttgatgtctctgcaggcgggattgaatgcagcgagagcatatattagtactcacacgactagctcatcctcgattacgtggttcggatatatactagcattaaacagcgtcataatagcgtgtgcgtccggtgagatgagattattacgccgcatgagatggttattaagaganactaattatatatatttatactcttagcgttgcgtattatgcgcggtagtcgtacggctgtagtatgtgccccttcgtagatgtgcatgccgtgatattggtccttcgtcttgttatctcaagctcttgattctgagttgacgtagtactagtatattagcatatctatgtataggcatgcaggcgttgcgccatagcgtgctgcggacgcgggatgtnatgtcacaatatgtcgcggtctgtgtgctagactgcgtctgatgattattttagtgtcgatgtcgaacgtgtctcgttaccgtaattgtctagtattgttattgctcgtcgtgcgtatgacgtggagcacagtcagttgatagactcactgatctctcttcactcgcgcgacgcaatcggccgagcgcaggataacacataacccatcgtcncacgcttaacatccgctcagccttcctactctctagctcctacatacactttaactttcaaactacaataagttactctataggagaataagacaaagtcctggattctcttctctcggtctacgcatgagaagggggcgcgtcccccttcttcttagtttgggtttatcactcattccgtcttggttgtgcttgcgagtcgnangggggggggggnngggggngggggggnaacaaacaaca

SEQ ID NO: 1294 - DNA, 626 bp, Glycine max
  Probeset Number=SeqID_11073
aaacataccaaactctttcaacacctgtaaaatcggcaagcttcatcaaatcctcccaacacatccatggcgatttctcacgctcagcctctgcttcttctcctcttctcactcttcctcttaccttctctgcgcgccacttctttccacaactgcgataagaggctcgatcccgttaaggtcacaggtgtggagatctctcctgaccctgttgtgagtggcaaagccgcaacatttaagatcactggttctactgatgaagacatctctggaggagaagtagtcatcagtgtttcactctatggagttcatatccataccgaaactcatgatctctgcgatgagtcgtcctgcccgatcgcacctggcacctttgtcctttctcattcccaaacactgccttctattacaccacccggtacttatacgcttaagatgacgataaacgacaagaatggcgggcgactgacctgcatcagcttcaagttcaagatcacattgttttccacggtttctgctagttaagttttccggtgcaaatatgtttcctcttttgtaaaactctctcctagacttgtgtggtgtccaaataaaatgcccctttgaggcttgtctttgatctcctt

SEQ ID NO: 1295 - DNA, 1572 bp, Glycine max
  misc_feature (20)..(20): n is a, c, g, or t
  misc_feature (38)..(39): n is a, c, g, or t
  misc_feature (47)..(53): n is a, c, g, or t
  misc_feature (55)..(61): n is a, c, g, or t
  misc_feature (63)..(64): n is a, c, g, or t
  misc_feature (67)..(67): n is a, c, g, or t
  misc_feature (69)..(69): n is a, c, g, or t
  misc_feature (80)..(80): n is a, c, g, or t
  misc_feature (87)..(87): n is a, c, g, or t
  misc_feature (96)..(96): n is a, c, g, or t
  misc_feature (109)..(109): n is a, c, g, or t
  misc_feature (111)..(111): n is a, c, g, or t
  misc_feature (124)..(124): n is a, c, g, or t
  misc_feature (164)..(164): n is a, c, g, or t
  misc_feature (169)..(170): n is a, c, g, or t
  misc_feature (173)..(173): n is a, c, g, or t
  misc_feature (180)..(182): n is a, c, g, or t
  misc_feature (190)..(191): n is a, c, g, or t
  misc_feature (216)..(216): n is a, c, g, or t
  misc_feature (221)..(221): n is a, c, g, or t
  misc_feature (345)..(345): n is a, c, g, or t
  misc_feature (402)..(402): n is a, c, g, or t
  misc_feature (425)..(425): n is a, c, g, or t
  misc_feature (436)..(436): n is a, c, g, or t
  misc_feature (444)..(444): n is a, c, g, or t
  misc_feature (447)..(448): n is a, c, g, or t
  misc_feature (588)..(588): n is a, c, g, or t
  misc_feature (611)..(611): n is a, c, g, or t
  misc_feature (642)..(642): n is a, c, g, or t
  misc_feature (743)..(743): n is a, c, g, or t
  misc_feature (868)..(868): n is a, c, g, or t
  misc_feature (975)..(975): n is a, c, g, or t
  misc_feature (979)..(979): n is a, c, g, or t
  misc_feature (1008)..(1008): n is a, c, g, or t
  misc_feature (1206)..(1206): n is a, c, g, or t
  misc_feature (1306)..(1306): n is a, c, g, or t
  misc_feature (1421)..(1421): n is a, c, g, or t
  misc_feature (1572)..(1572): n is a, c, g, or t
  Peptide Sequence Number=SeqID_6097
  Probeset Number=SeqID_11074
tgggtggtggtgtgtgcgtntcttgtgctccttctctnnctctcctnnnnnnnannnnnnntnnttntnttcgtgttgcncttcatngctcccccnttctatctattcntntatttgtgtggancgcgtggacgcgcggcaggtggtcctcttttcttattgtnttttnntgncccaccnnngttctctnnttttgattgtttcgctctgcttttnttgtntgatgtggggcgagtggactctttgtgaatagcggatgtgactcgagcgcttgtgctctcctctccgcggtgttctcttaactcactgtttcactgtactgtcgtcctgactccgtcgcagttntgatcgctcagattgtcctattctgtcatgatgtctacgaccacatccactgagtgnggatgatggcgcgtatactgtgnctctgtgtgtnttgtgttntgnntgttgtttgatttgatccttattgcattaattcctctcatgctgtttcgtgtttctcttatctcttataatttctctctataagtataaattaggaccacaccctcttgtaataaaaatactcatccactcattgatgtnatgtttgagttgggtgagtgctngtgccagttttcatagtctatatctctgctnctatattagagatagttatagtaagaactatatattcttgacctatcatgttttgcttgattatgtggtcggtgttgtgactgttctttactcgtgcatangtgatactgttccgttgcgtgtgtagtatctgcgagtacagagccgcgcatacgaggctcttgctactatctgtagtatcgagttgtatttccttacccgcttgttgcagttgtgttgttgattngttatttggtcatatactacgaacaacgcagactcgtgtcatcacctctcttattcttgcttctcattatatctctcttcattcatttgttatctactcctcgcttnattncgtactctcccagcattatgttattcttntaactttataatacctcgacacacgcctcgactcttctcttgtgctctttgactgccatatttcgttgctgcgttctatggatctcgcgctgcgcgctgctcagtgtatatctagtgttgtaaaagcatattccgagtgtgtgttatatgtgtctcgacatcgcgccattgccacatctctactctgatcctctcgtnttacatgttctcctctctaagctgctccgatagcgcagacgctgtactcaacgtactgtggcgagattatatgatgtgtatcgttgacatgatctctatncactgcacgttctgcaggtgtatgcgtttcagcgtcgatgtcatagagcattgctcactatcatctattatctctcatattacctcatataatggctaccactactgactcactnttatacttacatatactcataccactcggacaccgttacatgggtatgttgatctgtctggacatatatagtgcagatgtcataatgactctatcttagtgtctctggatcacggtgcgtatcgtcttcacgctcacttacttctatctgn

SEQ ID NO: 1296 - DNA, 424 bp, Glycine max
  misc_feature (96)..(96): n is a, c, g, or t
  misc_feature (259)..(259): n is a, c, g, or t
  misc_feature (292)..(292): n is a, c, g, or t
  misc_feature (387)..(387): n is a, c, g, or t
  misc_feature (403)..(403): n is a, c, g, or t
  Probeset Number=SeqID_11075
ttttttttttttttttttgttttatttatttttaatgtaatagataataggtaattaaaatcatacagcatataaaatttgaataaagaggcttanagttgttgattatttgaaacaataaaaatattcattttttcttcacaatcaatgtgtttttttcaattataaaatatatcctctatcctacaaatctttctttgaaatatttagctatctcctttccctctctgcattctcaaagtaatcataatcctctagngccagcgaatccacactcacatcaaatccttgngattgactcgctcctattatatcctcacttgaattatacattgccttcttatctctaccagtaccttcatcttcttctaaatcctcaaccaattnttcctctacattctcnaatacttcatcatcataattt

SEQ ID NO: 1297 - DNA, 651 bp, Glycine max
  misc_feature (555)..(555): n is a, c, g, or t
  misc_feature (601)..(651): n is a, c, g, or t
  Peptide Sequence Number=SeqID_6098
  Probeset Number=SeqID_11076
atgcagagtcgcagatcgacacagctaccatagcgcataccaaagggccaataatatctccggttcttgattagcaaagcgtagcaatggcgaagcgtctggatgtcgcgctcctgctgctgctggtggtgatggtgctcgcgccctgcgacgggagggagctgaaaggcaatggcggcgccggtggcgacgtcgacgaggtgaaggatgtggtgcccaggtttgcccgacgctgccgccctcctggtacccactaacccaaaattggttgcttggcggttgcccccccgtggaccccgggaatacctccccggctgcttggcggattcctcccaaaagaaaaaaaaagtcccccatggatgattgccccctggccctttgaaccacctttgtttgtttcgccctggaagactttcttacaaagctttaactccccgccccggaaaaaaaaaaaataccgccccggcgcgtttccccttaaaacatccgcgggggcccctttacattcgtgcaaaaaaattatcatggcgcccccccaatggtttctccttttcnaccccccgtgcccccgcggcccccatttggctcccccctcttctcnnnnnnnnnnnnnnnnnnnnnnnnnnnnnnnnnnnnnnnnnnnnnnnnnnn

SEQ ID NO: 1298 - DNA, 599 bp, Glycine max
  Probeset Number=SeqID_11077
attgcttctcttcatcctctctccgttcttgagtgttgtcagccatcgccgccgggaaacggggatcagcttgctgttgggacttgagacgggaaggatgtcttcatcgcctccggcgccgacggtggcggacgcgccggccgcgggcgcccccccctcgcggcgggccctcagcctccgcgcgctgctcgcggcccgcctgttcccctgcctggccctcctcggcgtccccccccccgaccgcttcgccctgcgcgccccgggggccgcccccccgccctccggcgcccgccccccctcctcccccgcctgcgccgtcggcggcgccccgtgccccccccgccgccggccggcggccctgcgccggccccgccccgtggccgtctaccccggcgccgccccgcccagggcccccggcggcccccccgcgggcctgtgcgccgcggcgcgcgagggcgcagcccggccctcgtggcggagtgagggaacttgagagaggcgcgctgtaaggcacccgaggttcgcgcgggtcgatgacgacgtaactgtggcgccggctgaggggcggacgggcggtaccggcatgtggtcgctcgccc

SEQ ID NO: 1299 - DNA, 1729 bp, Glycine max
  misc_feature (1)..(1): n is a, c, g, or t
  misc_feature (347)..(347): n is a, c, g, or t
  misc_feature (831)..(831): n is a, c, g, or t
  misc_feature (833)..(833): n is a, c, g, or t
  misc_feature (1201)..(1201): n is a, c, g, or t
  misc_feature (1447)..(1447): n is a, c, g, or t
  misc_feature (1500)..(1500): n is a, c, g, or t
  misc_feature (1600)..(1600): n is a, c, g, or t
  misc_feature (1659)..(1659): n is a, c, g, or t
  misc_feature (1690)..(1690): n is a, c, g, or t
  Peptide Sequence Number=SeqID_6099
  Probeset Number=SeqID_11078
ncccaacttaaatttattttttcaactatatctcttatctgaccatgaccacaaacagacagccggatgagagtaactactgttacgatggatggcgacgtttgcacgcagcacggacgcggggctcttttttgctcctacgactaaggcgcgcgagcgcgcgcggccgcactggttttgttcccatgcataatgtaggtgcggagggacccgcttcgtgtaccgtcatcggtcgggtgcgcacgccgcccgcccgaccacgcgatgacgtataccacaaggcacacagtgagtgtagtaggtcggatgtgaatatgatcgtgatttacgtcagtgcagattgatgnatttatctgataatgaggtgtaagcgtcacatatacgagtgttcggcgctggatgcgctagcggagggccctggtgacgagtgtgcggacccgtttctaacgcacacgtattatgtcttaatgtaactcctcttttctcttcgctcgtcacctttctcgttgctttcgcaacatccacaacataactcacaccaataccaaggcgctcttcactactccactctatacacgtcctctacacttgcactcagcgacgccccagaggactatgacgtcgatggcagcgcgcgcacgacgcacgccgatgcgtccacataattgtctcacgctggtctcgcgcgaccagtcagtctctgatatatacgacggcgcaacttcaccaagagatatcaggatagcgccgcctgtagtgaggcgccgatacgagatcacgcgtctatcttgcgacgagagagtaggagtagcgcgactgagacatcacgtngngatcatacggagctgttagagtatgacgtgcagagtcgatctatactagtgcatgcacactctacatactctcatacttctagaattgttgctagctaatagtacggtatgttgctgctctatagcaatcgtacactagtgagcgagattacgctatctaccgtatacggcaccgacggagttgcgtcgttgtcgaatcaattatcatagatgagactaatctcacaatcacgactactcgtgtaactccaccatcgcgcgtccagattactgtatgcgacgcccttgtactatatcgtacgagtgcgacgcactagcggtaataagggtgacgatcgtgtgtcgacacgcgcgcatgactgtagtantaggcgtaaccgcgacatgctcatcgatcgagtgtataagacgaatagaagcaagcgtgtacgatacgcttggtatatcgcacacgtataggtgtacaatatatctgactcagtgtaagcactgatatgaagaacgacgcacacagtgcgtgatgctggacatactcgtaagtcagacgatgtgatatgatggccgctgagcgtcgagttatacgacatatgcataccgacacatctgaggtgtanctgctgcgtatatcgtagcgagtctcatggcaccacgtgtcgtagtacaattncccctctggctatgagtgttgcgcgactatcacatcatgatcgtcgttcgttgctcgagctcccgagagtatgatcgcacatatcgagtcaagtgcatancgagacgtatctgatcgctcgatgtgtgatgtgtctaagtatacttagtagacagcgangtctgcgacctgtgctgatctgacatgtctngtcaaatagctatcgcgacctacagccttctgagatcac

SEQ ID NO: 1300 - DNA, 1522 bp, Glycine max
  misc_feature (7)..(7): n is a, c, g, or t
  misc_feature (30)..(32): n is a, c, g, or t
  misc_feature (35)..(36): n is a, c, g, or t
  misc_feature (38)..(38): n is a, c, g, or t
  misc_feature (43)..(45): n is a, c, g, or t
  misc_feature (55)..(58): n is a, c, g, or t
  misc_feature (61)..(61): n is a, c, g, or t
  misc_feature (91)..(91): n is a, c, g, or t
  misc_feature (104)..(104): n is a, c, g, or t
  misc_feature (117)..(117): n is a, c, g, or t
  misc_feature (293)..(293): n is a, c, g, or t
  misc_feature (297)..(297): n is a, c, g, or t
  misc_feature (316)..(316): n is a, c, g, or t
  misc_feature (318)..(318): n is a, c, g, or t
  misc_feature (425)..(425): n is a, c, g, or t
  misc_feature (582)..(584): n is a, c, g, or t
  misc_feature (631)..(631): n is a, c, g, or t
  misc_feature (863)..(863): n is a, c, g, or t
  misc_feature (868)..(869): n is a, c, g, or t
  misc_feature (876)..(876): n is a, c, g, or t
  misc_feature (922)..(923): n is a, c, g, or t
  misc_feature (928)..(928): n is a, c, g, or t
  misc_feature (1188)..(1188): n is a, c, g, or t
  misc_feature (1252)..(1252): n is a, c, g, or t
  misc_feature (1392)..(1392): n is a, c, g, or t
  misc_feature (1448)..(1448): n is a, c, g, or t
  misc_feature (1510)..(1510): n is a, c, g, or t
  misc_feature (1517)..(1517): n is a, c, g, or t
  Probeset Number=SeqID_11079
gtggttnggggtgtgggccccccccccccnnnccnntncccgnnncaccacactnnnnccnacacacccatcctcttttttagatcaatcnccagaaagggccnacaaactacatantaacggaatgagacacagagcgctgtaccagcaccagacataataaatataagagaggtataacgcaccccccgcgcccaaatctgaattagaaaccatgcgggatagtagtgtgtgttgggtgcggtgcgtcgtcgtcatgacacccaccgacacgccgcacacgccctaactantgtntagttagtgagtttgtgtntnctccactaacactagtcatcgaagcgtaaggagagtgagatgcgccccagatacttacatacttattcttctaccgatgtcacaacataatatagatactagagtanccacctccacggcctatgggctaccatacctcattgcgttagccctgtgctctgaagagatatggatcttatattttgcaacgcgagcatacacatctactgagtctacctcgcagtggtgttagaaggcagacaacacaagtgttaagagataggnnntaatccgaccatagcgcagagatggacgggcgagtggggaggtctgnttgtgccttgtcatgtctctggtgtctgcccgcttatatgtggttgctttgctatgtgtttgttgtgtattgtctgtacttatgatcttctagtaaaggaaaacaaggagcgaaaacaaatacgagcacaacagtcatgtacacaacaaccgtaatattattgttttctacatgcacaccgcaagtcattgaggtctatgagaggacggtggtgagaaatgaggaaaaaaanaaaannaaaaaanaaaaaaaagagaaagagaaagacacaaacaaaaacaaaacaaaaannaaaanaccgtgaagtgcatgtagaaataaaaaaacaactagcaccaaccaaagaagtaccgagcatagtactgggcgcagaacagatcatagtgactaatgtagtggcggctccgaagctgcagccatgacgcgtgaccgttaatctgcatctactggactagagcctctgctcatgcatgaccacgatctcattactgcgcagaagccacgctagggcgcattgtgcgagcgcctcttaccactcactgagctcaggccataantctcgactatagtagcgaacacgtgacacgttcgcgcacgcatagtacaaatgccacagacacngcatagtgtcatcacacatgcaaccgagcgctggtacatatatctatgtcataacaccacgctggcgtgtggtctgtcatgcgggttgtgcacacggccctgcggcgattgcccgtctgtccctcatcagcgcacgatgnagagatggaagtcgggctagatacacatgacatgatagcagtgtccacatgtgctnctatctctacgatctcgttctctcactcgcgctgagtgcctgtgacacagcctcatgatctnacacgtnctcag

SEQ ID NO: 1301 - DNA, 513 bp, Glycine max
  misc_feature (461)..(461): n is a, c, g, or t
  misc_feature (478)..(478): n is a, c, g, or t
  Peptide Sequence Number=SeqID_6100
  Probeset Number=SeqID_11080
aggacaaatacaattctctctccgacaatccgtcacaaaaggttccgtctttttaatccggtccggtctgcaattaggcggcgaggaagcaatgaaagggattgcgaggattgtgaattctctttctcgactcggtggtcgtgagatcatttctagaggaagtagttcttcgtcttcgtctcttcttctggtatctcgtcgctcgctcttcatctcggcggcaacgcactttcccaccaattcacgtgatctcacctcctcttcgagatcttcttctttacttcctcagaaatgggctttcctcggaggggggcagagaaggacgatgtttatccaaacacaatccactcccaatccttcttctctcatgttttatcctggcaaaccagtcatggaggttggaagtgctgatttccctaacgttcgttcagctctaggctcacctattagccaagtccatntactccattgacggtgnggttcgagttttctttgggtctgatttcgtcactg

SEQ ID NO: 1302 - DNA, 1454 bp, Glycine max
  misc_feature (1)..(1): n is a, c, g, or t
  misc_feature (4)..(4): n is a, c, g, or t
  misc_feature (18)..(18): n is a, c, g, or t
  misc_feature (165)..(165): n is a, c, g, or t
  misc_feature (288)..(288): n is a, c, g, or t
  misc_feature (320)..(320): n is a, c, g, or t
  misc_feature (377)..(377): n is a, c, g, or t
  misc_feature (534)..(534): n is a, c, g, or t
  misc_feature (1409)..(1409): n is a, c, g, or t
  Peptide Sequence Number=SeqID_6101
  Probeset Number=SeqID_11081
ntanacagcgatataatncgtcgactggcgtcaattaatagtgcaccagacacccagttgtgcactcgtaactcagctgtgcacagcagcgaagacgtatctaggcatgtacatgtgcgagtatgatatagcatcggacaatacactgctctgtgcgtgaccatntagtgtgtatcgtactcgccgcgccgttgctccgtggcggtatagtatttcgatatacacgcagcgatacctggtttacacgcgcattataagaacagccgcgagactagagtatatggccgnatacttcagttgtgcgtcgtgccgacgcgatntagatatatctgactgttgctatcggcgcggggtcgtgaggcgcgtatacatgtgtngcggcgtgttcggcgcaaaagaattgtggtaacatattatattatataatagagcggcgtgcagcatacattaagcgcgcgcacacgtgttatatcggtgatataatatatacaatgcgggcgcattgtgtgcaagaagcgaatatagggaagattnattcgttctgcgcgcatattatgactattagacggcggttcgggcaacggctcaattcgcgcgcagcgtcggataagaagaatacatatacacacgcgcgagtcatagattcgccgctattcttaccgcaccaatggcagaaaaataatataaggtgcagcggagaataatctagaggtgtggtataaatacaaacaacacatagtactatgtgcggctgtcagtaaaacaatgaaaaacaaaaggggacgaacacgccggaggaggtgttaacatatacgcgcgcgcggcgtgcacttacacggtcttctgtgtgtttatcgtggatggttgaaaaaatagacgccgcggctgttatatgcccacacacgatatctagtataaattcgaaatcaaggctctgcacgaaacgctattggttgtataataaatatccttcgctccgttgcgggattgtaggtttgtagttgagcacatatgtcgacaaacagcctgtggtataggtgctgttgcgctgttttttctattcactccatataatataaaatcgatttgacggtttaacgaattataatgggagtgcgcggagagtcccattcgatctatatggtttaccataaccgccttaccggatagccccctgtgtttgcccttctgtataataacaggtcttgttgcggtaatgacaaattaacggcggtcaccgtcgccacatatttaacatcgatatttgtccgtacatgatcatatctacatctatttcgtcccgctttgatcggaatagggagggggttacgatgggtatttgtgtccgcaggcgatggttattccccctcactttgtatgcgtgagttttcttttcacgcccgattcgntcatctccattgtttacccccacctatgagagagcgggccaccct

SEQ ID NO: 1303 - DNA, 1708 bp, Glycine max
  misc_feature (19)..(19): n is a, c, g, or t
  misc_feature (38)..(38): n is a, c, g, or t
  misc_feature (41)..(41): n is a, c, g, or t
  misc_feature (64)..(64): n is a, c, g, or t
  misc_feature (70)..(70): n is a, c, g, or t
  misc_feature (110)..(111): n is a, c, g, or t
  misc_feature (125)..(125): n is a, c, g, or t
  misc_feature (243)..(243): n is a, c, g, or t
  misc_feature (316)..(316): n is a, c, g, or t
  misc_feature (611)..(611): n is a, c, g, or t
  misc_feature (1018)..(1018): n is a, c, g, or t
  misc_feature (1168)..(1168): n is a, c, g, or t
  misc_feature (1175)..(1175): n is a, c, g, or t
  misc_feature (1262)..(1262): n is a, c, g, or t
  misc_feature (1274)..(1274): n is a, c, g, or t
  misc_feature (1288)..(1288): n is a, c, g, or t
  misc_feature (1356)..(1356): n is a, c, g, or t
  misc_feature (1432)..(1432): n is a, c, g, or t
  misc_feature (1461)..(1461): n is a, c, g, or t
  misc_feature (1467)..(1467): n is a, c, g, or t
  misc_feature (1473)..(1473): n is a, c, g, or t
  misc_feature (1481)..(1481): n is a, c, g, or t
  misc_feature (1491)..(1491): n is a, c, g, or t
  misc_feature (1496)..(1498): n is a, c, g, or t
  misc_feature (1505)..(1505): n is a, c, g, or t
  misc_feature (1508)..(1508): n is a, c, g, or t
  misc_feature (1521)..(1523): n is a, c, g, or t
  misc_feature (1527)..(1527): n is a, c, g, or t
  misc_feature (1535)..(1536): n is a, c, g, or t
  misc_feature (1539)..(1540): n is a, c, g, or t
  misc_feature (1547)..(1549): n is a, c, g, or t
  misc_feature (1552)..(1553): n is a, c, g, or t
  misc_feature (1566)..(1567): n is a, c, g, or t
  misc_feature (1569)..(1569): n is a, c, g, or t
  misc_feature (1574)..(1576): n is a, c, g, or t
  misc_feature (1582)..(1584): n is a, c, g, or t
  misc_feature (1588)..(1588): n is a, c, g, or t
  misc_feature (1604)..(1604): n is a, c, g, or t
  misc_feature (1608)..(1619): n is a, c, g, or t
  misc_feature (1621)..(1622): n is a, c, g, or t
  misc_feature (1625)..(1626): n is a, c, g, or t
  misc_feature (1631)..(1632): n is a, c, g, or t
  misc_feature (1642)..(1642): n is a, c, g, or t
  misc_feature (1648)..(1651): n is a, c, g, or t
  misc_feature (1663)..(1689): n is a, c, g, or t
  misc_feature (1694)..(1708): n is a, c, g, or t
  Probeset Number=SeqID_11082
ctagagaatatatcatctnaaacaatatcacgaagcantantctctattcgtatcgtgtagctntttgcntcgcacaagttctgttgtctcattcaccgcgtattacgcnngtcgcgtgataaancacagaatcgcgcatagatcatcacatgattgagtataagatatacgagacaagactaagacattaaacaccataacacaatcagcacgcagcacgcagcgccgacatgacttggcgntgttcccgcatgctcatgcatcgatacaagtcacgcggcaagttgccgtcgtgagtgcgcagtgcgtctatgncagtatgcgtgttgtcgagctatatcgttcagtgtctgtagtgcagtgtatatagagtattatacatgacgcgtgtgtatatagcattgtatgtgcgatatgagaggtgagatatatctgtagtatatgaatagaatgtcatagtaacacatagtacgtatatttatatattatctatattcgtaagtggtgttgccgtttcgtctgcgcccgcctcttcgctctcttccatcttcactctctatttccactcattcgtgttacagtacgttagtgtgcgtcgatgatatgttanatcgtcgtgaccaggtaatgatggatacgaccgatacacccatcaaactcacacacgctctttctaacattgcatacagatgtgcgctgtaaataatatatatatatcttatatattattcagttatttatctaatcaagtagacatatgtaatatattgtgacacttacactcatagttgcgctcagtatgtacaattgttgatgctgattatgttgtttgtgtggttggttgtattgtatactagtcgactgatatgttcacgggtcagttagattgattgagagtgcgctgaatagttcgtagtgttacgtataatagtatctattgattattgatgtcacagaattaccaatacgtaataagcgatcgtgctatcagtgcacttctgtcacgagataataganataaatagtactctagtaaaatagtacatattttatataatatattatatatacaagcactcatccactcgccttatcctaacaatatacgtacgtatgcatatcttataagtagaatactcatgtggtcataatatataattataccanatgtganatatccagagaaaactaccttcttatatatgacctatcctatctcattgtcatatctattatatattatcacacatgtatatgacancgcatccgtggntgatagatctgagncgtactaggttatctcgagagtgagtctctgtctgcagcatgatagaatttcatcggtagtgtgtctnatttcatctgtactcgtagtcggttgctgctatctatctaagatacggtatattgcgtgtacataacacgtgtccnatacgaggagcagtaacatcatcggcatncgtatntaacgnttaccagntcatattacncaacnnntgtggancanagaatcccactannnaatnaggttttnnaanncaacatnnnccnncccacaccgcgtnngnacagnnngatccnnnaccnctccatttcactttcnacannnnnnnnnnnntnnacnnccatnncaatgcgttnaccaannnnaacaaccaaaannnnnnnnnnnnnnnnnnnnnnnnnnnaaaannnnnnnnnnnnnnn

SEQ ID NO: 1304 - DNA, 1409 bp, Glycine max
  misc_feature (1)..(19): n is a, c, g, or t
  misc_feature (24)..(30): n is a, c, g, or t
  misc_feature (40)..(41): n is a, c, g, or t
  misc_feature (61)..(61): n is a, c, g, or t
  misc_feature (64)..(64): n is a, c, g, or t
  misc_feature (74)..(74): n is a, c, g, or t
  misc_feature (86)..(87): n is a, c, g, or t
  misc_feature (190)..(190): n is a, c, g, or t
  misc_feature (522)..(522): n is a, c, g, or t
  misc_feature (574)..(574): n is a, c, g, or t
  misc_feature (599)..(599): n is a, c, g, or t
  misc_feature (918)..(918): n is a, c, g, or t
  misc_feature (936)..(936): n is a, c, g, or t
  misc_feature (1090)..(1090): n is a, c, g, or t
  misc_feature (1226)..(1226): n is a, c, g, or t
  misc_feature (1232)..(1232): n is a, c, g, or t
  misc_feature (1270)..(1270): n is a, c, g, or t
  misc_feature (1293)..(1293): n is a, c, g, or t
  Peptide Sequence Number=SeqID_6102
  Probeset Number=SeqID_11083
nnnnnnnnnnnnnnnnnnnccccnnnnnnnccctttcttnntccttttccatcactacttntcnatattacccnctcaaaagaacnnaagaattgcccgggtacccgcggcgagggtgaacacggtgtggtacagagcaacgacacacaggcgctgccgctctaaggggagtactagatgggtgatgccncgctcgcgagccaccacggttcgcgctcacacgcaacacacctaccacacacttctcgcattgcactatctatctctcccacactagacccacacgcatccccacgtcagtgagaaggactcgccgtaagattcaaataacacaatcacacttcgaccactccacaaccaccactcctacctacatcgcgaatcgacacgtccaccccaccactaacaccacacctctccctacctctggatccacttagagatatggagtcgcgaacaacacaacccactgaagctaccagttacctatggtgcggggttctccgcagccgccgccacgtnggggaggtatattatgtaggccccgggccctccccgcacccacatcgcagcngcgcggcccggcaaaccccgcgcangaccccctccttatcccccactcctctagaccgcaatgaatagatgggtggcgcgcgggcggctgggagttgcccgcgcataacctgcttttatcaataggccactcacctgccgaggaaccacgccacgtagccacgctcggccggcgtgcgcggcggctccacacccgccactttatcacacaaggagcgacttgtgggacgattgctccctacccggcggacgcccttctaaattccgctcaacgaccagcgattgatcgtatatacatgctcacgaaggcctccccctggagtcaatggctagacatagtgtgtntgttctccccgcaaacgnccgctcccactaactcaaacgtcctcgccacaacaagcaaagctgagatctggggagatggaatgaccatacactattctcacgaccacccacgcgaagcgagttccatgtatactacgcattcacccaacgaacgatgatagtacactgctgnagtatggcagacagcggacactctacaacgtaggtcgacgccatacgaactccgacacacagacttatgcgcaggacaagatcgacatccgagtgcgtcgccagcgcgagcgtatcgtacactcccaccactaacnccgtgntagcacacatccacctatcacatgcccacgcgtgcgcntagtgggtaacaaatcttccaanagtgacatcgacacgcagtccaatcaacactgctatcaggagagcacaggcacagtcaaaacgcaatctggcatcgcaacaatctctacgacacgacgagtaccctagagaatgcc

SEQ ID NO: 1305 - DNA, 459 bp, Glycine max
  misc_feature (13)..(13): n is a, c, g, or t
  Probeset Number=SeqID_11084
acgacccacgcgntcatacacgcgtgggcggcggcgagcagactacggagggggggagtgcgtgtgaggggggggagaatcgagtagcgacatggatccagacgcgttcgctaaggcattcgtggagcactactactgcaccttcgacaccaaccgctacgccttcgccaatctctaccaggagggttccatgctctctttcgaggggcagatgatccagggcgcccccaacatcgtcgccaacctcacctccctccccttccagcagtgccaccactccatctccaccgcgactgtctcagccctcaggcgttaacgccgacatgctcgtcttcgtcagtgacaaccttcatgtcgccggcgagcaacaccccctcaagttcagccaaatgttccatttgataccaacaccacagggaagctattatgtgttgaatgacatattccggttgtactatg

SEQ ID NO: 1306 - DNA, 537 bp, Glycine max
  Peptide Sequence Number=SeqID_6103
  Probeset Number=SeqID_11085
caccctaacagccagtccacttcacggtatgcacatcgtcaatgctactataagccaaaacaaggtgaacgagtacaaggctagtataagtttcctcaacagcaagaacaacaatattaaattagccttcttccatactgatatctgcatagaagacaaacaaataagaattcagaaaactgtatacatttaattgtacaaagattgaataaacagtgtatgcattgaaagtatgataagtttgttagacttctataataattatcccaaaagtaatgcaaaccataattttatattggttgactgtgtaaaattattacattggccatatatagaaattaaactcgattaagtaaatagtgtatccaatgcactgatgttgtaaatgatttttacactgattgaatcacatatagtcgtatggtaagtttattggtttttacaataattatattaaaaattataccaacaataatttctgattggttgagagtaaaagtgcatagaaattaaacccagaaagatgtagaatctcgt

SEQ ID NO: 1307 - DNA, 431 bp, Glycine max
  Probeset Number=SeqID_11086
aagagagagagagagagagcgaataattaaaaggcccttgccttcacctttggtgtccaaagatattgctagagagaagaactagttgttcaattagcttcttcttcttcttcttcttcttccacccttcttgtttgagtaaattaagaagcttgagatcagacatgtcgagctgcatcatctatgttgcgcctgagcaactctgctacataccgtgcaacttctgcactattgctcttgcggtgagtggtgcatgcacatgcctgtggaacattgtgaccgttccatgaccattctcgacctacttatggccctttgctatggtctgcggatccaaccctgatgatccactcatactcgagattgtgcacatgtacaagactgacacggccaagaatgaggctacgggtcgcagctggacccagaagttt

SEQ ID NO: 1308 - DNA, 553 bp, Glycine max
  Peptide Sequence Number=SeqID_6184
  Probeset Number=SeqID_11087
ttgcatagtcttagatgcgggtggacacacggatttgatcaagagcgagaggagtggaacatcccaagcggagtgtgcagagctcataatttactccactactggcgtctttgaagcaggaatgccaaacgatggacagagtctagcacaggctctgctttcattaacaggtggagtgaaacagatgatttgtagatgtaacaagatggatgctatcacacacaagtatttcattgccagaaatgatgaaatggcaaaggaacgtgcggccgatcagaacacagcaggataccatcatgacgataaacctcatgccactataaagggctttgagggagacaacatgattgagacgccaacaaaagatgactggaacaagggaactacccaggaaaatccacttgacgagagcaatgagaaaaagaggggatatgacaagtccctccagcacccacccccggacgcgaacaagaatgcaggaagaggcaccgtgcctgtggcactggttgagatgccacctgcaaaacctggcttgcgcctgatttcgtcccca

SEQ ID NO: 1309 - DNA, 1402 bp, Glycine max
  misc_feature (20)..(20): n is a, c, g, or t
  misc_feature (34)..(34): n is a, c, g, or t
  misc_feature (61)..(61): n is a, c, g, or t
  misc_feature (155)..(155): n is a, c, g, or t
  misc_feature (188)..(188): n is a, c, g, or t
  misc_feature (247)..(247): n is a, c, g, or t
  misc_feature (450)..(450): n is a, c, g, or t
  misc_feature (755)..(755): n is a, c, g, or t
  misc_feature (1016)..(1016): n is a, c, g, or t
  misc_feature (1161)..(1161): n is a, c, g, or t
  misc_feature (1219)..(1220): n is a, c, g, or t
  misc_feature (1230)..(1230): n is a, c, g, or t
  misc_feature (1327)..(1327): n is a, c, g, or t
  misc_feature (1342)..(1342): n is a, c, g, or t
  Peptide Sequence Number=SeqID_6273
  Probeset Number=SeqID_11088
ccctccctattctcaagtgnataaaacccgacanaaccccatgatgtctaactccagggcnaccgagcggcacgggcccggagcgggccgctcacaccacccaccctccctctcgccattgtgtcgctgtctgtgtgctgtcgtaacacagacanccataagttgaacaactatattttatattcaanattcaaaataatcatcctgtcgctcctctgagaacgcccatggtccagtaattaatatntcccacactccctgatctcgcccacctttggattaattactccgatacaaatatccaacaagaaataaaccaagggccgcccatctctatacaagagacacaacactacgacaccccgcactacgccctccttcctacagacacatactacatccctcttctctacaaaggagataaggaccgtcgacctactactctactcntcctctcccccccccgcccgtcgttaaattacactgcgtgcactttactgccctcgctcgcgccactcattccctcataataacaactgaattagacccgaccgcgcgcgcgcccagaggcgtgcggcgccgaaccacaatctatttgtcgcggccgatcttcacacctcacacatttaaaaagctgaatgtttgtggtataacacgtagatacattaggctttagtcgcatacacgcggactgactcctctcctggacgcctgcactgccgcaggcgtgccgccactactcatcttactcttcntactgctgcatctacccgtgtacgtcaaatacagcctacaccccactctattcaatctcacgcacccgttctgtttgtagttgtcatcgctccgtacggctctgcctgcttaacgtatcctctgctctcacgagtgaaataccgcgacatacccacgtctctcgggctcagtcttatacaccaacttcgtctccatacatactctcggtcagcgccataatcccctctactgctctgtcttaggtacgtgcgtcgagtcanaaccttacacatcttctcagatcgaactcttcggacatcctatgcaggacgacccgcggctatactatcgcacacagctcttactccacctgccaccaccgtctgcctgcgactcgttcgcatcagctccgcctctccgctcacntctcgccctcgtcacgcatcactaccgcgactcctactgcgcgcgtgtgagcgcaccnntcgtcacccntctcgatgagtggcgagtcgaggtcttactcgagtatacgctctcccgtcgcgtgctgctcgtgtcgtgcacgccacgctccaaccacctcgctatntagtgtccacccacnaccctcttacgctgccatatctttgatagccgcgtcgtacacgctcacggtatacccgtt

SEQ ID NO: 1310 - DNA, 1530 bp, Glycine max
  misc_feature (85)..(85): n is a, c, g, or t
  misc_feature (96)..(96): n is a, c, g, or t
  misc_feature (228)..(228): n is a, c, g, or t
  misc_feature (288)..(288): n is a, c, g, or t
  misc_feature (382)..(382): n is a, c, g, or t
  misc_feature (401)..(401): n is a, c, g, or t
  misc_feature (425)..(425): n is a, c, g, or t
  misc_feature (550)..(550): n is a, c, g, or t
  misc_feature (578)..(578): n is a, c, g, or t
  misc_feature (649)..(649): n is a, c, g, or t
  misc_feature (654)..(654): n is a, c, g, or t
  misc_feature (657)..(657): n is a, c, g, or t
  misc_feature (782)..(782): n is a, c, g, or t
  misc_feature (1020)..(1020): n is a, c, g, or t
  misc_feature (1194)..(1194): n is a, c, g, or t
  misc_feature (1411)..(1411): n is a, c, g, or t
  misc_feature (1417)..(1418): n is a, c, g, or t
  misc_feature (1422)..(1423): n is a, c, g, or t
  misc_feature (1425)..(1426): n is a, c, g, or t
  misc_feature (1428)..(1428): n is a, c, g, or t
  misc_feature (1442)..(1442): n is a, c, g, or t
  misc_feature (1451)..(1452): n is a, c, g, or t
  misc_feature (1455)..(1455): n is a, c, g, or t
  misc_feature (1457)..(1457): n is a, c, g, or t
  misc_feature (1462)..(1469): n is a, c, g, or t
  misc_feature (1516)..(1516): n is a, c, g, or t
  Probeset Number=SeqID_11089
cactgtacgggcaacattcacagcgctgatagcagagacgatagagtgcgcgctgtcatacggcggtacgtagagttcacgagcnagcgggcgagnacgcgcgagctaatcctcgtgcatgataacaagaacactacaacacagtgacatgcttcacagaaatgttgacaccgtatgtcgagctggtagacggacagcacctgcgcacaggcccgacactcagatcanagcatcgatatcaagacgagccgagcaagtgagtgagtcgggatagctcatcgcccacanaggctctattgtggatggaggcggatcatctgcctccggcccgcgcgctggcggtggagtgcggtaggtgtgctcacacacgtcctagatagtntgatgttgaggtgacgagngatagtgagatggtagcgacaggncgccgcagagagaggaggatgagcagtggagacgagcgagagtgctcggaggatgtgtgaggtagcggctccgcggtgtgtgattggagtgcggtatagtgtgttcgctccgtcggctagcgtcncgcgcggcgagcggtgggggtggggtgngtgattaccaacagcatgccattctccgccaccagacatggcgcacaacaagactgtaccactgcgtagcngcgtnttnctccacatcaccgacccctcagagctatcagtgttagtatttgtatagcctatagtggaatgtgataagtagaagaggacgtgtaagtcatcgatagatatgtcgcctgtattatttcattttcnctagtagtgtagtattgtgaatttgtatcacataataattatcttatggtagggtccgtccgatgtagtcatatagtagcacacaggcgtgcaggagggagcgctactgtaggtagagcacgctacgaagggaagcagcgtgggttgggagtgacagcccacactgaactatgaaggctacataatgcatagatatgtacaatgaactatacagtcaagccactacggctggcacgcngcacgacacacctaccacacacgcagtagatagccgcacccacacatgaccgctccgagagggtgagcggagcggtctgacggagtgggaggcgcgagcagccagagtgtagagatgagaatgatagagagaatatagaggcagcgcccgcccgcgagagcgctccccacaacnggctactacaaggcagagtcggagcgcaaaaacgacagccagcagatcatcttgatctgatacgctgccgagagctgagtaacagaagcgaataaaccaatacactatagcatagcctctctctccctcctctcgtcctcgtcgcgggtgggcatctcactactctcatatttcttgtggatgagcgaggcagccacgcaagcttgggtagaggtgnattatnncttnngnngngaatgtcacggggnggggggggnnaananacacnnnnnnnnttcgggcggcggccggacgcgcagcacgccacgacaaacagagcacnaaacaaaacaaaaa

SEQ ID NO: 1311 - DNA, 244 bp, Glycine max
  Peptide Sequence Number=SeqID_6274
  Probeset Number=SeqID_11090
gcaaattttgattattcacacattacccataagctgcgaaagggatattcaagatgaacttgtggctcggcttttcccttattccactggagctgatataaggagtgtttgcacataatccggtatgtatgctgttcgtgcccggaggaagactgttacagagaaagacttccttgatgcagtcattcaagtcatcaatggatacctgaagttcattgcaactcccaagtgtgtggtctacaac

SEQ ID NO: 1312 - DNA, 1666 bp, Glycine max
  misc_feature (59)..(59): n is a, c, g, or t
  misc_feature (65)..(65): n is a, c, g, or t
  misc_feature (75)..(75): n is a, c, g, or t
  misc_feature (89)..(89): n is a, c, g, or t
  misc_feature (134)..(134): n is a, c, g, or t
  misc_feature (148)..(148): n is a, c, g, or t
  misc_feature (253)..(253): n is a, c, g, or t
  misc_feature (334)..(334): n is a, c, g, or t
  misc_feature (338)..(338): n is a, c, g, or t
  misc_feature (385)..(385): n is a, c, g, or t
  misc_feature (407)..(407): n is a, c, g, or t
  misc_feature (436)..(436): n is a, c, g, or t
  misc_feature (470)..(470): n is a, c, g, or t
  misc_feature (692)..(692): n is a, c, g, or t
  misc_feature (774)..(774): n is a, c, g, or t
  misc_feature (813)..(813): n is a, c, g, or t
  misc_feature (964)..(964): n is a, c, g, or t
  misc_feature (1007)..(1007): n is a, c, g, or t
  misc_feature (1009)..(1009): n is a, c, g, or t
  misc_feature (1013)..(1013): n is a, c, g, or t
  misc_feature (1027)..(1027): n is a, c, g, or t
  misc_feature (1049)..(1049): n is a, c, g, or t
  misc_feature (1113)..(1113): n is a, c, g, or t
  misc_feature (1234)..(1234): n is a, c, g, or t
  misc_feature (1242)..(1243): n is a, c, g, or t
  misc_feature (1267)..(1267): n is a, c, g, or t
  misc_feature (1270)..(1270): n is a, c, g, or t
  misc_feature (1276)..(1276): n is a, c, g, or t
  misc_feature (1298)..(1298): n is a, c, g, or t
  misc_feature (1307)..(1307): n is a, c, g, or t
  misc_feature (1317)..(1317): n is a, c, g, or t
  misc_feature (1320)..(1320): n is a, c, g, or t
  misc_feature (1369)..(1369): n is a, c, g, or t
  misc_feature (1415)..(1415): n is a, c, g, or t
  misc_feature (1433)..(1433): n is a, c, g, or t
  misc_feature (1474)..(1474): n is a, c, g, or t
  misc_feature (1478)..(1478): n is a, c, g, or t
  misc_feature (1497)..(1497): n is a, c, g, or t
  misc_feature (1553)..(1553): n is a, c, g, or t
  misc_feature (1573)..(1574): n is a, c, g, or t
  misc_feature (1576)..(1578): n is a, c, g, or t
  misc_feature (1581)..(1581): n is a, c, g, or t
  misc_feature (1583)..(1583): n is a, c, g, or t
  misc_feature (1587)..(1590): n is a, c, g, or t
  misc_feature (1592)..(1592): n is a, c, g, or t
  misc_feature (1594)..(1594): n is a, c, g, or t
  misc_feature (1599)..(1600): n is a, c, g, or t
  misc_feature (1632)..(1632): n is a, c, g, or t
  misc_feature (1634)..(1634): n is a, c, g, or t
  misc_feature (1638)..(1639): n is a, c, g, or t
  misc_feature (1641)..(1641): n is a, c, g, or t
  misc_feature (1644)..(1645): n is a, c, g, or t
  Peptide Sequence Number=SeqID_6275
  Probeset Number=SeqID_11091
cagtgagagatcgaagtagaagagtaatagctagatgatgatgatgatgagtagtggtnagggtngggctgatcnacactgtacagagncattactgatatcacatgatcgacggtagacagtgccagcgaagngtacggcgcgaagntgctgatgtgcggtgtgtgagagaagggtcagagcgtagtactagagcgcacagggacacagagagagagagatagtggtcataagggcacgatagactatatgnatcatactgctcagctgcgtgcgcgcgcgcgctcgtaggtacgtagctctcgtgcagtagccgtatgggatctatgatagnagtnagacactaactacgcacagagagaggagtcgtgtcgcgtgagaggtnatagatacgtgagaatgacctntgtcgtgtgtcgcgttgtgcttaaggcantggtgagagttgggctgtggtgtgggtgtgtcgngtcgaggagccggagcacgtagcgagcgtacgtgtcagagttcgctgctaccagagcatcttagtgatcgcacgcgacgcgctatacacacactctgcgcgcgcggtgagatgagagatgatacattaaaataccacatgcgacgagagatgcgcgcgcaggagtgccgatgcctacggaggaccatcagcgcagcagtcgaggggagagcagtgtcacccnctcgtaacgcgcgcacaccgaaagtctgaggtagcgggcgaatagacacactatagactgcaagaggagtatgatctgaagncgatcacttacacatgactatgagaagtaactcaggaantagacagtcggttggtgctgcgtcgccatatctcactaacagagcctcggacagcaggagtatatggcagtatcgagcttaggtcgtgcgacgcgattctctaattgctatgaggtgaataataggttggtatggttacagcattatgtcnagaacatgacggctaagtcgagcaacgggtacatacgcgtggnantcgncgcggcgagcgtgncgtggcttggggaggcttgggngagtgctgcaggacgtggactccaatgcactacgtcgactactgaagtcggcttgttctgctcnttcatatacattaatgtaaatttatagataaatctatcaaacataacagaatatactgatctatatagatgtcgatgttctgttctgctgatgatatgtcgagtgttctgcagtaaaaaancacgacannctagacagacacactaaccgggantgnagctanattactgtattattatcatctngatataatnaattaatagntanggactattaagattactaaattaatatagcttggaatctagctacgatntgtgatgtgtctggcgcagctagcgaagtgaggatgagatagacangctcttgtgtggggtgtnagtgtgttatagatgcggactgccagagatacgatgagagnggtnagagagacccatatatctnattatcactctatcgcgcgtctatagagtagagaggggagcactactatgattacncctcctctctgtaggtaganntnnngcncncccnnnntncncaaannggcaggaagacagcgacgactaccgacagagnanaggnngnaannagggaagcccaacaacacata

SEQ ID NO: 1313 - DNA, 544 bp, Glycine max
  Probeset Number=SeqID_11092
gaaatgattagctgatccaaccaattcccaccattctcagatgacaatcttacgttagcagcacccgactggttctgtttcttctaatgttccacaccccacaacaaaactagttagtagttacccacgatctatttccatattgggtcgcaatatctcaccttaaattcaccaaagtcgcatccttttccagaaagagagagtgggcaatggtggaatgaggataaaaggggaagagaagaagaagaagggagggaaatggcgagagaggagtggaggcttcaacttcaccaaagagcgaactcgatttgttcctacaagaaaatcactcttctgatttgctttctcaacattgttgttgctctctactctcttcgctctctctatgcttctctctctatttactctggcagcgttgcacgaaacattgtggtgtataggccagatcagatccggaagatggaagagtctaaccgaatccggaaggcatacaaaccagtggagttgatgaaattggtgaaggaatttgaaggtgagttttcaa

SEQ ID NO: 1314 - DNA, 383 bp, Glycine max
  Peptide Sequence Number=SeqID_6276
  Probeset Number=SeqID_11093
caccaggcagcagatcgagccctgccctgcgcagcgagggaaagagacacacacagcacagcgtccaccaggcaactaataaaaggcaaaagcacggctccttcggcctggggtctgctcagctgcacatggacaatgctgctgcgccttacgcgaccgctggtgcggccggaaacaaggatttcaggtattctgcctatgggtttaggacttcggcgctggaggagcacaaccagttcatcagcgcggccatggacaccgccatggacaactactcatggcgcctgatgccggcccagaactcggcgttctcactctcgagctaccccatgctgggcaccctgggcgacctggaccagagcgcgatctgctcgctggccaag

SEQ ID NO: 1315 - DNA, 2164 bp, Glycine max
  misc_feature (43)..(43): n is a, c, g, or t
  misc_feature (60)..(61): n is a, c, g, or t
  misc_feature (64)..(64): n is a, c, g, or t
  misc_feature (84)..(84): n is a, c, g, or t
  misc_feature (94)..(94): n is a, c, g, or t
  misc_feature (129)..(129): n is a, c, g, or t
  misc_feature (168)..(169): n is a, c, g, or t
  misc_feature (184)..(184): n is a, c, g, or t
  misc_feature (267)..(267): n is a, c, g, or t
  misc_feature (281)..(281): n is a, c, g, or t
  misc_feature (307)..(307): n is a, c, g, or t
  misc_feature (315)..(315): n is a, c, g, or t
  misc_feature (330)..(330): n is a, c, g, or t
  misc_feature (332)..(332): n is a, c, g, or t
  misc_feature (403)..(403): n is a, c, g, or t
  misc_feature (484)..(484): n is a, c, g, or t
  misc_feature (498)..(498): n is a, c, g, or t
  misc_feature (566)..(566): n is a, c, g, or t
  misc_feature (679)..(679): n is a, c, g, or t
  misc_feature (701)..(701): n is a, c, g, or t
  misc_feature (705)..(705): n is a, c, g, or t
  misc_feature (736)..(736): n is a, c, g, or t
  misc_feature (791)..(791): n is a, c, g, or t
  misc_feature (837)..(837): n is a, c, g, or t
  misc_feature (853)..(853): n is a, c, g, or t
  misc_feature (858)..(858): n is a, c, g, or t
  misc_feature (866)..(866): n is a, c, g, or t
  misc_feature (894)..(894): n is a, c, g, or t
  misc_feature (981)..(981): n is a, c, g, or t
  misc_feature (1037)..(1037): n is a, c, g, or t
  misc_feature (1039)..(1039): n is a, c, g, or t
  misc_feature (1041)..(1041): n is a, c, g, or t
  misc_feature (1051)..(1051): n is a, c, g, or t
  misc_feature (1093)..(1093): n is a, c, g, or t
  misc_feature (1126)..(1126): n is a, c, g, or t
  misc_feature (1182)..(1183): n is a, c, g, or t
  misc_feature (1185)..(1185): n is a, c, g, or t
  misc_feature (1200)..(1200): n is a, c, g, or t
  misc_feature (1260)..(1260): n is a, c, g, or t
  misc_feature (1271)..(1271): n is a, c, g, or t
  misc_feature (1420)..(1420): n is a, c, g, or t
  misc_feature (1428)..(1428): n is a, c, g, or t
  misc_feature (1445)..(1445): n is a, c, g, or t
  misc_feature (1450)..(1450): n is a, c, g, or t
  misc_feature (1455)..(1455): n is a, c, g, or t
  misc_feature (1503)..(1503): n is a, c, g, or t
  misc_feature (1507)..(1507): n is a, c, g, or t
  misc_feature (1515)..(1515): n is a, c, g, or t
  misc_feature (1533)..(1533): n is a, c, g, or t
  misc_feature (1550)..(1550): n is a, c, g, or t
  misc_feature (1556)..(1556): n is a, c, g, or t
  misc_feature (1558)..(1558): n is a, c, g, or t
  misc_feature (1573)..(1573): n is a, c, g, or t
  misc_feature (1580)..(1580): n is a, c, g, or t
  misc_feature (1607)..(1607): n is a, c, g, or t
  misc_feature (1610)..(1610): n is a, c, g, or t
  misc_feature (1624)..(1624): n is a, c, g, or t
  misc_feature (1640)..(1640): n is a, c, g, or t
  misc_feature (1679)..(1679): n is a, c, g, or t
  misc_feature (1682)..(1683): n is a, c, g, or t
  misc_feature (1685)..(1685): n is a, c, g, or t
  misc_feature (1696)..(1696): n is a, c, g, or t
  misc_feature (1698)..(1698): n is a, c, g, or t
  misc_feature (1711)..(1711): n is a, c, g, or t
  misc_feature (1723)..(1723): n is a, c, g, or t
  misc_feature (1725)..(1725): n is a, c, g, or t
  misc_feature (1727)..(1728): n is a, c, g, or t
  misc_feature (1731)..(1731): n is a, c, g, or t
  misc_feature (1734)..(1734): n is a, c, g, or t
  misc_feature (1738)..(1738): n is a, c, g, or t
  misc_feature (1799)..(1799): n is a, c, g, or t
  misc_feature (1804)..(1804): n is a, c, g, or t
  misc_feature (1836)..(1836): n is a, c, g, or t
  misc_feature (1838)..(1839): n is a, c, g, or t
  misc_feature (1842)..(1842): n is a, c, g, or t
  misc_feature (1848)..(1849): n is a, c, g, or t
  misc_feature (1858)..(1859): n is a, c, g, or t
  misc_feature (1865)..(1865): n is a, c, g, or t
  misc_feature (1869)..(1869): n is a, c, g, or t
  misc_feature (1894)..(1895): n is a, c, g, or t
  misc_feature (1897)..(1897): n is a, c, g, or t
  misc_feature (1901)..(1901): n is a, c, g, or t
  misc_feature (1908)..(1908): n is a, c, g, or t
  misc_feature (1910)..(1910): n is a, c, g, or t
  misc_feature (1947)..(1947): n is a, c, g, or t
  misc_feature (1955)..(1955): n is a, c, g, or t
  misc_feature (1960)..(1960): n is a, c, g, or t
  misc_feature (1993)..(1994): n is a, c, g, or t
  misc_feature (2008)..(2008): n is a, c, g, or t
  misc_feature (2015)..(2015): n is a, c, g, or t
  misc_feature (2023)..(2024): n is a, c, g, or t
  misc_feature (2026)..(2029): n is a, c, g, or t
  misc_feature (2036)..(2036): n is a, c, g, or t
  misc_feature (2038)..(2038): n is a, c, g, or t
  misc_feature (2058)..(2060): n is a, c, g, or t
  misc_feature (2062)..(2066): n is a, c, g, or t
  misc_feature (2068)..(2070): n is a, c, g, or t
  misc_feature (2072)..(2075): n is a, c, g, or t
  misc_feature (2080)..(2081): n is a, c, g, or t
  misc_feature (2083)..(2085): n is a, c, g, or t
  misc_feature (2094)..(2095): n is a, c, g, or t
  misc_feature (2099)..(2099): n is a, c, g, or t
  misc_feature (2102)..(2102): n is a, c, g, or t
  misc_feature (2104)..(2123): n is a, c, g, or t
  misc_feature (2126)..(2127): n is a, c, g, or t
  misc_feature (2129)..(2129): n is a, c, g, or t
  misc_feature (2141)..(2143): n is a, c, g, or t
  misc_feature (2148)..(2149): n is a, c, g, or t
  misc_feature (2157)..(2157): n is a, c, g, or t
  Peptide Sequence Number=SeqID_6277
  Probeset Number=SeqID_11094
atgtagtgtcgattagtcgatgttgtagttatcgaatatgtanttttgttctactttgtnnagncttcgtagacgtggctcacntagtgtagtnggggtgtcgtgcgtatcgtgcagctgcgtgtggtnggggctactgcgtcgtgtgatcatatatattcgcatgannttcgcgtcgtgatcnaatcatcagtcgtgtaaagttcatgagacgacatagagagtaatacgtatcaatgattgaatacgcagcatcattagtgatantgattatctgatgntacacatagatagcatgtgtatctgngaaatcangtctataaaccatcncncagatgtagtatagtagagataatcggttgtgcgctcgattgatgcgtgtatagactctcatctcgtacgngtcgttctagcacgtctacacagagagacatgtagatgcagtacgaggacgagaagtgtagtgtgcagataacgagacatnacagacagaagctnagtcagacggtcgcacatcatatactcatagctcgtcacatgtgcagttcgatgcacgccatgtgcgngagtgctctatgtagcgagtagtacgacgcatacactgtagtcatatcacaacgcacgactatgacgacagaactcatacgagcgacgtacctcgtatagtgtgctctatgcntctacctagttcattatctatncatntagtattatccacataatagtcgtgtgtgtntagcgatcagaatgtaggtagcacacatcgatagatttctattacatcatatctnccgttcacctacaccgtcagttgtgtcgtgcgtgtgttcatcgctnctattcgtgtcgatgncgcgngtgcgacntatgtagtcaccagatagggatgcagtngaggtcgcgcggtctcgcgttcggtccagcatgcgcaatgtcatgcattcgcgtacgatcgtcatcatggtggtactgtactcgagnctcactgatatccacactctgagcgtctccttcgattctctcgctctactcctctntngnacacatcacntactagtgacaggctagatctggcaccatcgagataacatgnagaacaaatagagaatagttagtattctgtcantgtagtatatgtatgaatctctagtcagagatgtagtacagacacgctaacataanntnaatgaaatatcatanaatcattacagtatactattaataaataagagtacacgacacagacgagacaagagcggnggtgatgccgnatcagagagacgcagtgatgcacacagagtgatgaggtagtagacataacgtgtacgcacagcagcacagcatgcaataagcgcacatacatcatatggagaagtggtgagcgcatcaagataaatagagactctacaagactataganaacagtantgcagtgctaatacganagctncgcgnggagtgattagcacgagagacagaagtgcagtctctgagcatcttaantttnctttctcnctcctcgtcgtggtgtcntgtatgagagagtaaanttcttnantcagtacgcataacnatgacangtattacgttatatataataagtatanagntacatacttatatnatgaaagtaatagcantgcaaaaacagtaatgaatgaggagcggggggtataaanagnnanagtgatatagngngagagatagaaancaagaggacgangngnnagntgngagntacgtgacatcgcccagcagtgctattccctgtcgcacggcatcgcactcacacatacatncatcncttcgcgctgcgtcgctggcgtgtgtgttgcntnngtntcgacnncccgtttgnnttcgtngtcnactctctcctctcctcctccattcnncntctnctgaggngntgagggggtgtgcgtcggtgttgtaggtgcatcgtgngtgcgccngcggncggcgcttcctcacgatatgcagctagacaacnngtgtcaatcccagntctcgcnttcgtatnntnnnngtcgacntngtggcggggggtgtgggttnnnannnnngnnngnnnntgtcnnannnaaacccaannaaantancnnnnnnnnnnnnnnnnnnnnggnngngggggggggggnnnggggnnggaggggnaaaaaaa

SEQ ID NO: 1316 - DNA, 534 bp, Glycine max
  misc_feature (522)..(523): n is a, c, g, or t
  misc_feature (529)..(529): n is a, c, g, or t
  Probeset Number=SeqID_11095
tggatcccccgggctgcaggaattcgcaagagaccattacctagaacatcctaatagaaaaactacttctcttcctactccatctttcgcttgtacaaacctaatcagaaatggcaacggcgtcgtttagcatgctgtcagtgttcgccgctccttccggtggattgggctctcgcaacatcagaaacacaaaccaagtcttctccaataggaatcctttggtggggagtcaggtggcatggctcaggacgatcctatcaaggaagaatctcctctgccttcgacctcggccactccaccacagacgccgttgtattctcctccaccacttagcaagcctaaggtgagtaccaaaggtttggagatcttttagccgtttagcgggtccagcgcccgaaagaataaatgggagactccttatggtaaggttcctaacggcgattgcggtggagcttttgaagggagagaacgtggttgctcaatctcgacggggaggtcggatgggttctaagcactccgccnncccccnttacc

SEQ ID NO: 1317 - DNA, 1355 bp, Glycine max
  misc_feature (1310)..(1310): n is a, c, g, or t
  misc_feature (1353)..(1353): n is a, c, g, or t
  misc_feature (1355)..(1355): n is a, c, g, or t
  Peptide Sequence Number=SeqID_6278
  Probeset Number=SeqID_11096
ccggtccggattcccggtcgacccagcgtccgggacatgtgccagttgtgcgaccatattgcttccaatttggtcttcttcaccctcttagggtttgcatcagattcccctaattcttgcttgattttgcgctttcgctagattttcttcaaaatgactcaagatctagagatgaaggatcgctcaacgccttccaactccgtttcttcgcctgctccatctactctgcagcgtaagcatatagtatctttctctaaccacttccactgtgccgatttcgcattttcacaaaactattccagcttttcgctctttattttttcttttctttgctatttggatttgcagatttgaaggagatagcgtctcttatcgagaccggttcgtactcgaaggaagttcgtagaattgctcgcgctgttcgccttacaattgcgttgaggcggaaattgacagcatccgctatctcttcttttctcgatcatgttctcactcctggctctgaagttcacgccaaattgtctgcgtatcttcccaaggatgatgatcatgagatggaagtggacgctgcaacatctgcgattcaaaccccagccaaacacttgttgcccgagctagaaatctactgttacctgcttgtactcctttttctgattgatcagaaaaaatacagtgaggtcagttccccttttttgactttgcaaactgatgagtgacaactgattataagctaatgtttcttttacttttcaggccaaagcttgttcctcagctagcattgtttggctgaagaacataaacaggagaactgttgatgttattgcatccagactgtatttttactattcgtatagctatgaacttatgggagatcttgctgaaattcggggcaaccttcttgcattgcaccgaattgccaccctccgccatgatgagctgggtcaggaaacacttcttaatttgttacttcgtaactaccttcactacaacctatatgatcaggctgagaagttgaggtcgaaggctcctcgatttgaagcacattcaaaccagcagttttgtcgttatctcttctacctagggaaaattcggacaattcagctggagtataccgatgcaaaagagtctctcctgcaggccgcccggaaagctcctgttgctgacggggttttcgaattcaatgtacaagtgggctgtgatagtgcgttactgtggggagaaatcctgagcggctgcttcatgcagaaggatggaaaagcctaggcctactttgacctacaagctggccgatggaactcgacggtaggaantgcgcagttgcctacttatgcgacagacctattgttgccgtgngn

SEQ ID NO: 1318 - DNA, 1685 bp, Glycine max
  misc_feature (20)..(22): n is a, c, g, or t
  misc_feature (29)..(30): n is a, c, g, or t
  misc_feature (32)..(32): n is a, c, g, or t
  misc_feature (36)..(36): n is a, c, g, or t
  misc_feature (38)..(38): n is a, c, g, or t
  misc_feature (42)..(43): n is a, c, g, or t
  misc_feature (45)..(45): n is a, c, g, or t
  misc_feature (68)..(68): n is a, c, g, or t
  misc_feature (136)..(136): n is a, c, g, or t
  misc_feature (139)..(139): n is a, c, g, or t
  misc_feature (141)..(141): n is a, c, g, or t
  misc_feature (144)..(144): n is a, c, g, or t
  misc_feature (432)..(432): n is a, c, g, or t
  misc_feature (635)..(635): n is a, c, g, or t
  misc_feature (637)..(637): n is a, c, g, or t
  misc_feature (726)..(726): n is a, c, g, or t
  misc_feature (1001)..(1001): n is a, c, g, or t
  misc_feature (1064)..(1064): n is a, c, g, or t
  misc_feature (1220)..(1220): n is a, c, g, or t
  misc_feature (1268)..(1268): n is a, c, g, or t
  misc_feature (1310)..(1310): n is a, c, g, or t
  misc_feature (1333)..(1333): n is a, c, g, or t
  misc_feature (1335)..(1335): n is a, c, g, or t
  misc_feature (1374)..(1374): n is a, c, g, or t
  misc_feature (1408)..(1408): n is a, c, g, or t
  misc_feature (1439)..(1439): n is a, c, g, or t
  misc_feature (1620)..(1620): n is a, c, g, or t
  misc_feature (1652)..(1652): n is a, c, g, or t
  misc_feature (1667)..(1667): n is a, c, g, or t
  misc_feature (1685)..(1685): n is a, c, g, or t
  Peptide Sequence Number=SeqID_6279
  Probeset Number=SeqID_11097
gtggtggtgtggttgggggnnnacaatgnntnccgntntcgnntnccggggacgcgcgtgcgccgcgngtgtccgtgcgcctgccacgtggcgcctgggtgtctcgtcttcgtgttgccgtcctgtgcgctttttntgntnagnagtggtgatatgttggggttgtttgtttcaaccctactattcactctccctcactctttcgcgtacaccactcgctctttcccgtcgtcgtgtatttcagctcctgacgcctcgccactcgccgccattactctacgctacaccactccgcgcgcgtcggcgggtcgtgggcggcggcggcgcgcgccgctccgttgtgtgttggcgcctccctgtcggacgtgtatgcgacccgagcgcgcgcgctcgccgccactgtgtctcgctttccactcgcgcctcaccttnaggacgcgccgaacccgacgcgcgagcctctcgattcttattctcgctcctccctccacggctatacgccgcgccctccttgttcttgtcgcgcgccttgctcctgtctcctctcaccaaccacacgctactatctcccgcgccgtctctctcacacgtcctgttcgtgcaatattacgtgcacaccgctctatcgctaccancntcgttcgcgcgtccgagcgcgccgcgctcatctctctattatgttcattcttctcgcgcgtcgctcgcgtctagtatttgtgtcgacangcgttgctgcctcctggcgcggcgcggcgtgcgcggcgtgtctccccttcgcggctgtatgcgccgcttcctcgaccccgtccctcctctctgttgctctactgccgcgtcgcctgcgcgtcgccgggctcgaggagcgtagtgagcgcagacgcgcggccgctcagcgcgcgccgcctcagctgctgccgctcgtctgctacccctgtactcgcgctctgtcgctctagtgctcacggcggtacgcgcgtcgagcagccctctgatggtggtgngtgtgtcgatcgctgcgcgatcctcgacacctgcgtcgccgcgctgctcctactccgtcgttntccgcgctcgtctatgtgtacctctcggctcacacatataatatcaccactatatcccgcacgccgaatgacgcagtatgtcgacccgtctctgcgcgtgtctgtggtagtactatgctgacgcgcgtcacacgcgtacacgcacatcactatccngctgctgtgccggctcttatcgtcctcgctcgcaccgcatccatcatnctgtgtctcgtgcgcgactcgtcccgcgctcatctcttcccntcactgtgatcctctcacgcgtntnacctgtctcgcgcgcgctgtgcgtccgcgccgcatcgantgctcgcacgtggtgacgtggcggagctcgcccnagtcaccgcgtgttcggtgtcgggagtgcgntgttggcgcgtgtcatttctgctcctctactccgtgtcctgccgagctgtgccgaggccgctgccaactgcgcgccgttcgcagtggcgcgcgcgacggttgcgcgacagcgcgcgcgcagcgcggctagcgcgacgcgggactcacggctcgtctccactacgatacgcgtctggctgcnacgctcgcgcacgcgacgttgcactctctgcnataccgatttgtgtncgcatcgcgcgcacgtgn

SEQ ID NO: 1319 - DNA, 299 bp, Glycine max
  Probeset Number=SeqID_11098
tgcatggccctgcagctcaatgcaattacaatagagcacttcatcttgagacttccttatcacctgatgtttacctgcccaaaagctgcaaaacatgacgagatgaaattgcgaagcatatttggcttggaatggtcagagcccttggttacatttgcactttcctgtggaagctgttcttcacctgcggtattcttgctccttaaaatagacaatgttgagaaactatagcttggattgggatcaactatgaggcttacaacgggtgaccaaaccaacgatgtcctgcttatagatag

SEQ ID NO: 1320 - DNA, 339 bp, Glycine max
  Peptide Sequence Number=SeqID_6360
  Probeset Number=SeqID_11099
ctgcagtcggggcaccgtcagcaacctcaggtaatgctgagactgtggctgtggcggaaccagctgggagaactgcgtccccaacgacttgcgtcgacgaacagggactatcctatgagctcatctgcgaccggatggaaataatgattaatgacacgagcactctgcacacacatgatgcaccatgtgcccccgagctgcttgacgaaaatgccaggcttacggataagaacacccgtctgattaacgaacggagtctattgcatggtttgcggaataccatactcactttgctgaccaaatatgcttctggatttacccgggcgctttgaaaatgct

SEQ ID NO: 1321 - DNA, 698 bp, Glycine max
  misc_feature (698)..(698): n is a, c, g, or t
  Peptide Sequence Number=SeqID_6361
  Probeset Number=SeqID_11100
aatttgacacacagcacgggttggcgggggggttttttttttttttttgttttttctggcagcagcgtgtatatcgatttatttctttacagtacattgggtaaagagtgttcgttctacgatgcaatacacagacgagttttcagcttcaaatcccaacaacgtccgggcctgctactgctactctagttggctgtcgagcgcccgcaagaaatggggcgacgacctctcagtcgatggggagggagcgcgcgcgctttgtatggcgccttcatcgacgcgcaggaacctcctggccgtcaggctgtgcggcggcggagcgcacagtgccggccgtgtcggcgaggccgttcagggcggccgcgccggctgtgtcgtcaaaaaaaacgcacacggcgttcaggcccatggaggcgagcgtctgctcgccctcagccgggcgctcgggctgcagttggacatggacgcagggttggttccactgttcctgtgcgccacggtcgggacgacccaaatcgccgccgtcgaccccgtcggcgagctgggcgccgtcgcatcaccacacggcgtgcgggcgcacgcggacgccgcatgcgccgtcggggccggggcccgaggggggagcccggaggcaggccggcacccgcgctggaggagagaccgctagatcgcccgtcgctcggggaggatggcgcggn

SEQ ID NO: 1322 - DNA, 1836 bp, Glycine max
  misc_feature (1)..(1): n is a, c, g, or t
  Peptide Sequence Number=SeqID_6362
  Probeset Number=SeqID_11101
ncctaatgtattgcttttcatgggagccggctcgagacaggaaagacttgccattgtgacagagttattacctaggggaagccttttcaaaaatttgcacaggaacaatcagacattagacatcagaaggcgcctaaggatggctcttgatgttgctagaggaatgaattatcttcatcacagaaatccaccaattgtgcatagagacctgaagtcttctaacctgcttgtagataaaaactggactgtaaagttttttgtcaggttggagactttggcctgtctaggttgaaggatgcaactttattaactacaaaatctgggagaggcacccctcaatggatggcccctgaagtcctaagaaatgaaccttcaaatgagaagtctgatgtgtacagttttggtgtcatcctctgggaactaatgactcaatctattccatggaaaaatttgaattccttacaggttgttggagtcgtaggctttatggatagacgactagaccttccagaggggcttgatccccatgttgcatcaatcatcgatgactgctggcgaagtgatccagagcaacgcccatcatttgaggagctgatacagagaacgttgttccttgtcaacagagtaacagcagtgtcaattaggagaatttcagaatcctgagcttgttatggttttgggttttgctttctcaaaatatattagttaaaaacatattatgagaagtacaagcaacaaattgagtggcaaaccgcaaaacattcttccttccatgacgtgctccttttgtgaggaatggctattgaatattgaatagaaggcagaacaaacttcattttttgggcgagcattcaaaaaaaaaaaaaaaaaaaaaaaaaaaaaaaaaaaaaaaaaaaaaaaaaaaaaaaaaaagggtagagcgctccctggacccgggtcttggttcccgggatccgggttcgcggcccggtccccggcctgtcccccctaccgttgtcctttttttgggctctggtctgtgccctttggcccttagcccgtggccctggtgtggattcctggtttgcgcgttccgttttgccactctaccattcccgcccccgctatcccctatccgggtaacgtccctgtggtgcccctctggggtggcccctagcgggtgatttataggtgatttgtgctctggctgtccgcttttcccggtccgccttatcccggtcggctgccacctgtgcgttttcctggtctccttctcacccgccccgggcccacccgcccccggttttccgggtgctcggggccgccgccggggggggtcttccttctgttccgccctcttggtgttttgcgcccgacgggggtggtgttcgacgcttttatgccgtcctcgtccccctcctggccttgtcccgccgcggtaggtggtttcctcccgtgggtgttttccgccccctcgggtcggcccccgcctcctgtgtgttacagggtgggggttcaaggtggggggggttatttcgtagtggggctcgtgggtctgggggttttgtgctctgtgttcctaccggtcctgggtgtattttgtaggtggggaccaagcccccggaccctctgctcctcccgagacctgtgcgttctgtggtttgtgcgccctcgggcccctccggccttctccctgtggctctgtcccggcgcgtctctcgtgcccggcgtgtgccgccggcgggtcaactctcgtggcccgctccccggttcgtgtcttctcttccaacacttgtggcgtgggagtccctgcggctggaggctctcttcccgccttcccggtaggggagggtgggg

SEQ ID NO: 1323 - DNA, 616 bp, Glycine max
  misc_feature (612)..(616): n is a, c, g, or t
  Peptide Sequence Number=SeqID_6363
  Probeset Number=SeqID_11102
tcagctacgtaggcccccccccccctaccttcaagactgaatttactatggatatcaaaggcttctggaagacttgcaagattcttttcattattgccaatattatcgttggtttggctgctgttttcaagacttatgtttggagtcgtttcaatcctagtagattctatggagaaaactggactgtcgtcatggtcgctagattcatcattatcaccatgaaaacttggtctgacgccatgttcttcttccttttcgtcatgactggctactggttcattttctacaagatgcaaaataccgtctatttcttggtccctgatccatcatctaatcctagtgattatcgtcccttcgtcattgtctttgttatcatggtcatcttccaattcttgtctgcattgaatatggtccgtgaacaagtccaaatggatttcttcttcattgattgggaaaagccaaagcttactttcaagagagaggttaacagagaagtttatttccaatctgcttggagaatgatccttattgctaatgaatggaacgaacttcaagttgaacgtcattatagggtcgagctcctttatatcattttcggcttctttgctatcnnnnn

SEQ ID NO: 1324 - DNA, 607 bp, Glycine max
  misc_feature (416)..(416): n is a, c, g, or t
  misc_feature (547)..(547): n is a, c, g, or t
  misc_feature (550)..(550): n is a, c, g, or t
  misc_feature (577)..(577): n is a, c, g, or t
  misc_feature (590)..(590): n is a, c, g, or t
  misc_feature (607)..(607): n is a, c, g, or t
  Peptide Sequence Number=SeqID_6364
  Probeset Number=SeqID_11103
tcagctacgtaggccccccccccccccgatctaaatctaacggaaaatattaccttcattatctcagcttctatgaaaaagcaactatactcatcacccacttactcctcccaccaaaaatccacacccggggttaacatgagagaaagattggttcgcttgactgaaactgtcaatgaactcagaaccaacgtcgaaaccgaagtccaaaaccaggataacctcgaaaaagttagctcaaagaactacactcttatgaacacacaaatcaaggctttgagaaaagctttcaacacccttgctgatgtgattatggaagagttggacgctattaaatcagatgttgctcgtgattctcaggaggctaatgccgctattttccgcaagcttgatgagcttggttcacaagttaatanacttcaaaatgagaagcaggatcaaagggaacaaatgagtaatgttgaacagagtttgagagaaagaatagaagctttggaaagaaagcaagatgagaccagtcaagatgtccaagcagtcgtagaaaacnccnaagaagacaatagagtcctttatgaanagctccacagtgncattagaagtaacactn

SEQ ID NO: 1325 - DNA, 650 bp, Glycine max
  Peptide Sequence Number=SeqID_6365
  Probeset Number=SeqID_11104
atcaaagattagagctgccacagtcgatttgagcccacatcgtcgctccgacctcggcgtgtagtctagcagattggccagagcaagtgagtgtgagttgttgatcaacgagagattgaccagattgcacggaatcactcaccagactttgggttccatcagccgagctgcctcgcatggacagtcctcgccacttccttcatcgactgcaccagtgcaccagtaagggcttcctttagcgaagaaccattgtgttgcgtgggcgggcgcaacccaggctgtcaatggcggtgaagacgtggagatggtcattggttccatgatgaacaatgtagattagatcgaagataccgcttcactcaattaaatcggggtcatcgatatgagatcaaatagcttcgacaatcccacttagggctggttcgtttctatcggattgcacccgaaatcattccagcctaatcaaagtttatataaattagagaagcaatccgggtaggaattgttccgacccaccaatccgacacaaacgaacaaggctttatccagtcgagctactttgcaaagaagccctggattttctattttcacgcattagtttccccatagttcaaaagtatttacaactaagtcctggttctttcgaattt

SEQ ID NO: 1326 - DNA, 1628 bp, Glycine max
  misc_feature (1)..(1): n is a, c, g, or t
  misc_feature (9)..(9): n is a, c, g, or t
  misc_feature (29)..(29): n is a, c, g, or t
  misc_feature (32)..(32): n is a, c, g, or t
  misc_feature (76)..(76): n is a, c, g, or t
  misc_feature (88)..(88): n is a, c, g, or t
  misc_feature (173)..(173): n is a, c, g, or t
  misc_feature (221)..(221): n is a, c, g, or t
  misc_feature (246)..(246): n is a, c, g, or t
  misc_feature (375)..(375): n is a, c, g, or t
  misc_feature (472)..(472): n is a, c, g, or t
  misc_feature (537)..(537): n is a, c, g, or t
  misc_feature (654)..(654): n is a, c, g, or t
  misc_feature (658)..(658): n is a, c, g, or t
  misc_feature (660)..(660): n is a, c, g, or t
  misc_feature (736)..(736): n is a, c, g, or t
  misc_feature (947)..(947): n is a, c, g, or t
  misc_feature (972)..(972): n is a, c, g, or t
  misc_feature (983)..(983): n is a, c, g, or t
  misc_feature (1044)..(1044): n is a, c, g, or t
  misc_feature (1202)..(1202): n is a, c, g, or t
  misc_feature (1208)..(1209): n is a, c, g, or t
  misc_feature (1232)..(1232): n is a, c, g, or t
  misc_feature (1249)..(1249): n is a, c, g, or t
  misc_feature (1441)..(1441): n is a, c, g, or t
  misc_feature (1511)..(1511): n is a, c, g, or t
  misc_feature (1539)..(1539): n is a, c, g, or t
  misc_feature (1554)..(1554): n is a, c, g, or t
  misc_feature (1562)..(1562): n is a, c, g, or t
  misc_feature (1572)..(1572): n is a, c, g, or t
  misc_feature (1575)..(1575): n is a, c, g, or t
  misc_feature (1585)..(1585): n is a, c, g, or t
  misc_feature (1597)..(1601): n is a, c, g, or t
  Probeset Number=SeqID_11105
ncgtggatngtgtgtgagcgttggcttgncangcatagcgagtatctcacgtagtgggctgttgactgctggtgcntgtgcacagagnggtacattggtgcgtgtgattgtggtgtatatgggtatgggatgactccgcatgagagactatggcatagagagatatatctgtnggtgggcgctcgagagtgaagcgagagtatctgatagcgtacagtcgnagtagagcacatgagacagagacanatgtggtcagagtgagtagtgtacgagttaaaatgagttgagaggatggtgtgtagtgctatagggcagggtgcgaaggtatgatgtgagatagagttgcgcggccgggcacgtggcgacgagagtgcnggagcgggaagaagcgagagtgagtcgcggaggagagtacgcaggtgtgatgaggtgagaggtacatacacataaccacacagatagaagatcaagnaaagagagatatatgtgatatagactatgagagagacatcggtatggctgatggtgcgtcatgtnatagtagcgggatgctggtttatcgggagtaggaggtgatcgtagagctatgagagtgagaatgacgggtgaatatatgttcattatatatgagaatgtagagagcgaggagagctnatgnantaattatacattgcaggagcgggtgtacgtagagtaatacaatagatcgggagcgagggcagtatttagtattgcngtactattagcactatctaacttatttgtagcatggtgaggtgagtgggaggagtattgcggatagatgtgtcggacgagtgtgttgttatttttggggtggtttggcggagaagtagatagcgtaggctagtgtggaggatatatgcttactgtcatcgagattatggacgacgaggagacatcaagaggcggaggcgtgagacgagccnctgaggcgcgcgcgcggattcgtangcgcgagacgnacacggatgcgttgggcggggcgggtgggtggcggtgggtagcgaggaggtgaacacgacnattgtactaaatagtcgtagaaatatgttgaggggttggtagggataacttatgttaagagtagaaataagtgctactacaattatcaatactgtaggggtggaggatagaagagtctgagagaaagatagaggcagcgagcaagcggcagaaagagngaaaannataacaagaattgaagagctganggaggtgagggggaagncctgagtgagaaggaataatatctttaatacctgatagctggattgagttggcggcacccctctctcttaccgctcctctcaccacacacacactgtctgttctttaagatagttaataaataatatatggtgtgtatgagttgagggtgagatgactgttagaagaagagatataataaaatacaatattntaaggcgggttgcgtggagagaaaaaggaggagagcggttaagggggggaggtggtgctctcgtattgtntattttatgttgtgtggagggggagatntataagacggcgcgnagaagagnaaaaaatacntanaaaactaaantttagggggggnnnnnggggcacacacacccacagataaaaaa

SEQ ID NO: 1327 - DNA, 767 bp, Glycine max
  Peptide Sequence Number=SeqID_6366
  Probeset Number=SeqID_11106
aaaaaatttataactgagtaatatataaaggtttctcaatccaaatctaatgggtttactctcttatattagaaagcttcgtaaacaagaaaaagaagccagaattttggttcttggacttgataatgcaggaaaaactactatcttaaagactctatctgaagaagatattacacatatcatgccaacaaagggcttcaacattaagaacttggctcatgaggactttaaattaactgtttgggatgtaggcggtcaaaaagctttgagaccttactgggcaaattatttccaaggcactgatgctttggttttcgtcattgattctgctgatagaaagagattagctgaaagtggctcagaacttcaaatgttattggatgaagatgatttaactggtattcttttgatttttgccaataaacaagatcttcttcaagccctccccgctgatgagatttcagaaacattgacattacaaaatattacaaagagacaatggtctattgtggcatgttcagcaaaaagcaaagaaggtttacaagaaggtatggaatggttagtcagtcagattccaaaataaaaacacatatatctagtacaaagaatttcccatatatataccttgaatatttaacatgattccttgtgccttgtttttttcttttacataaaagccaaggtcatattgtaacctctctctcgtttatatgatatacacctctcagttatgcatcaaaaatttcatgttaaagccatttttattc

SEQ ID NO: 1328 - DNA, 638 bp, Glycine max
  misc_feature (601)..(638): n is a, c, g, or t
  Peptide Sequence Number=SeqID_6367
  Probeset Number=SeqID_11107
ggcccccccccaagttttttttttttttttttttttttttttttttttttttttttttttttttttttttttttttttttttttttttttttttttttttttttttttttttcaaaatatagctacaatgacgaacgcacgaggtccgtcccaggcgcaataatatgacgtcccaggcccttcatgaaacgatgaagtgatggtaaaaagacaaagacaacttaggagaacaaacaagacagaatctaaaggacccaattattatgcataataaagaaccacttccttagttcaaacttccaagcttttgatgttctatcagagtttgaagggagtaatgaagcttcctctggacaaatgctgcaatatgcttggcttgttggatcacaatacaaaccaatggaactggcaaaatctgactgggctgcaattaagaagtctcctccatgggccattgattcttggggcatgggttctctaatctatgagctattctctggtatgaagttgggcaaaacagaggagttacgcaacactgtctccattcccaagtctctgcttccagattaccagcggctactgagttctgtgccctctcgtnnnnnnnnnnnnnnnnnnnnnnnnnnnnnnnnnnnnnn

SEQ ID NO: 1329 - DNA, 1577 bp, Glycine max
  misc_feature (5)..(6): n is a, c, g, or t
  misc_feature (20)..(22): n is a, c, g, or t
  misc_feature (24)..(24): n is a, c, g, or t
  misc_feature (26)..(26): n is a, c, g, or t
  misc_feature (28)..(28): n is a, c, g, or t
  misc_feature (31)..(32): n is a, c, g, or t
  misc_feature (41)..(41): n is a, c, g, or t
  misc_feature (149)..(149): n is a, c, g, or t
  misc_feature (314)..(314): n is a, c, g, or t
  misc_feature (396)..(396): n is a, c, g, or t
  misc_feature (742)..(742): n is a, c, g, or t
  misc_feature (749)..(749): n is a, c, g, or t
  misc_feature (905)..(905): n is a, c, g, or t
  misc_feature (933)..(933): n is a, c, g, or t
  Peptide Sequence Number=SeqID_6448
  Probeset Number=SeqID_11108
ggggnnggggttggttgggnnngntngntgnngggtgttgnagcgtgggggttgttgttggcgtgtttgggggtttcgtggcctttttctttggagctctgtggcggtccctccacttatgatggagacgggtcatggttcttcttttncttacctataatacgtgtgtatctctcccctcgcgtgggcgctttggcgtggatgcggtctaccttcgatctatttatctcttgactacctttagtgggttaaagcagataaggtgtagtgcttgttataggggtgtgtgtcgagcagaattattttcttccgtntccgcggatcgatgcggcggcttgcgtagcggcgagctcttccattctttcccgtagcttaagactggaaagaatctagtantgataggttagggtctggtgtgtgcgctgtagtattgttgtctattgtttattgtctatcttatgtattctttccattgtatggtatgttactgttttgcgatctgatctataatgtatactattgcttgtcctcgtttgtctcccgttatgtttctctttataccctctcctctccaggcctcctgccgtgtactcacctcggtcacgccgcgccgcgtgcctcttctctgtgagcggagcgcctccgcgtcgtgtacggggcgcgctcgtgcgtggcgcgcttccctctctcgattcgctcgttctatatgagatatttatatctcgagaacaaacccaaccgnaggacantaacatatgattgtccgagatgcacaatcattctatttatccctattctttcacacaagttggtggtatgtatagtatatatatcacttaatgtgccggaataagtggcttagagagcgaaagagagggcatcatatggtaatgctgaaggtacanaactacaatagaatcgagcagacagacncatacgagatgtgtgtactgcgtcgatgtcacacaataaaattaatgaggatgggtgccccgccactcaagatgttgtttgatgtagtactctctatatatatcatatcgtgtgctataatgtattcttaatgttatagtcatttctataccttactcttatcgctaatgacctactctatccttcgatttagctgaaaatatctcgcactaacacacacatgcgccttcatctatgcttgattacatacacattattgtccgtcgtaccgcactcctctagtagggttctgagttttagactctattccgttaatgtcatagagatgtctgctatcgtgcgacatgaccgacgccttcttcgcgagtgacactcgaacctagtagtatagagtatagggtgagctggcgtacaacgtgtatctcttgtgcgtctagtcagcgtgcagccgtgtcgtccgctgagcgccgcgtggctcccgctcccactgcgagtatttcatctatatactcacactcctctagctaccctcaaccgtgcatatctgcgtaccagatgtctactgatgagtgctgtagtgacaaatatgcgttgttgcgcaatgcatctactgtgactagttcacgcgctcaccacactaacaa

SEQ ID NO: 1330 - DNA, 680 bp, Glycine max
  Probeset Number=SeqID_11109
atttttctagggttctgagattcaggagagagataacgaacagcaatggcgaatcaagtgatctccggaatcaaggaaacggttcaatcgatcaacggcgcggctcgtccatggggcgatttcctcgatctctccgctttcagcttcccgtcctccttctccgacgccacaactcgcctcactcagaaccttgctcatttccgcatcaactacaccatcatcctctccgtcctcctcgctctaaccttgatcacacgcccgatcgccatcctcgctttcgtagccgtcggcttagcttggttcttcctctatttcgctcgcgaggaggcgctcaccgtcttcgggttcaccgtcgacgatggcgtcgtggcggtgcttctcatcgttctaacgatcgcagcgctagttaccactggagtttggctcagtgctctcaccaccgttggattcggagctctggttttgatcttacacgcggcgctgagaggaacggaggatcttgtgacggatgatctggaatcgccttacggaccaatgctctctaccgccggcggagataacggtgattacagtgggatttgagctacatttggtgcttgtaactaaactctaattgttttctttgtgttcattattagacattgttcaagacgttaaggaatcaaatgaaagtttatacg

SEQ ID NO: 1331 - DNA, 1596 bp, Glycine max
  misc_feature (1)..(1): n is a, c, g, or t
  misc_feature (13)..(13): n is a, c, g, or t
  misc_feature (20)..(20): n is a, c, g, or t
  misc_feature (64)..(64): n is a, c, g, or t
  misc_feature (124)..(124): n is a, c, g, or t
  misc_feature (150)..(150): n is a, c, g, or t
  misc_feature (322)..(322): n is a, c, g, or t
  misc_feature (400)..(400): n is a, c, g, or t
  misc_feature (417)..(417): n is a, c, g, or t
  misc_feature (424)..(424): n is a, c, g, or t
  misc_feature (430)..(430): n is a, c, g, or t
  misc_feature (533)..(533): n is a, c, g, or t
  misc_feature (586)..(586): n is a, c, g, or t
  misc_feature (678)..(678): n is a, c, g, or t
  misc_feature (711)..(711): n is a, c, g, or t
  misc_feature (714)..(714): n is a, c, g, or t
  misc_feature (724)..(725): n is a, c, g, or t
  misc_feature (733)..(733): n is a, c, g, or t
  misc_feature (744)..(744): n is a, c, g, or t
  misc_feature (778)..(778): n is a, c, g, or t
  misc_feature (867)..(867): n is a, c, g, or t
  misc_feature (921)..(921): n is a, c, g, or t
  misc_feature (961)..(961): n is a, c, g, or t
  misc_feature (1108)..(1108): n is a, c, g, or t
  misc_feature (1110)..(1110): n is a, c, g, or t
  misc_feature (1132)..(1132): n is a, c, g, or t
  misc_feature (1147)..(1147): n is a, c, g, or t
  misc_feature (1539)..(1539): n is a, c, g, or t
  misc_feature (1552)..(1552): n is a, c, g, or t
  misc_feature (1571)..(1571): n is a, c, g, or t
  misc_feature (1579)..(1579): n is a, c, g, or t
  misc_feature (1585)..(1586): n is a, c, g, or t
  Peptide Sequence Number=SeqID_6449
  Probeset Number=SeqID_11110
ncagatgcagcgngtgtgtnaggtacagtgctgaatgtactccgatggatgacgcacgtagtancactccgcgtgccgcgtcctgtcagagagcacgtcgcggtgagtcgcccatgcagtagcntgagcacagccgcatgatcaagaacntctctgtctcatcatacgcacaactaccagagacatcagcacactgcgcgaacagacgatctgcgacacgatcagcgcgcgcccacaggatcagcagcactcacgacgtccgccacacgagctccggatactcctcgtcttcgtcgtgcgcagcaggctgcgagtttagccnctcgtcgcgtgtgtacgagagaagcacacatcgacgcacagacacaagatatagcgtaggcctacacagatcgcacantgacgcatccactcatncctccgngtagangtccgcagtcgcaacatctggcctccagctcgctgcgctgcgtctgtgtgacaaagatgtgaggatgagtatgcgtaggtatagagagacactctagtactancaaccgactgttagagtctagagacactacgacgcgccactgggatgctcagnagttctacactacatgacagagacgctatttcttacttcagctactattttgatagagcggagtaaggaccatcctctcagacgctctatgntggtggtgggtgtgtggcggagggtgggttctnganttaaagttgnntattaatntcccataattngtatacttaagcttaatatctattaatcattctncacacacccacatcatactcacacctcacacaatacatagaccacgatgtgataccgtgcttctacgcgtgttagttaaccaccctcgncacagcgccgcagctgcgcagacatagacacgcgcggagactggacgcacacanaggactcacgctaccacacactatagctaccatatggatnggtacaatgagtatgcccggtagttacgcgcctcacgtattgtgtgttgtgcatcactctctatactgctagtcctgcctcagatgagagagaagagacgacagtagcatccgaggatgagatgtggaccagccgcagtcttctganantgatagcgctatctgtgagagnaaggagcgtcactgnacgccgcgacacaaacgcgctcgcagactccggcaggagcgtagtaccctgcgtgctgaggctaggtaggagagtgcagccgactaatagtcatatctaattatgatatatgtatatgagcagctctcactcacataacacgcggtgtaacacagccacgacatgcccggcgaagagagagtgacgaggagctggcgagattgctgagctgtatatattctattctatcgaagaaagaagcaaaatagagcagaacgggactctacctccgctaggccacccggaggagggtgactcacctacctcaccttgggatggtggcgccgcccccctctggcgggatgtaagaatccttcctatttattggcgcgcgcgctgtgcgtcggtggtgngccgatcgtgcgngacaattgaagagaacganagagccgntcctcnnccaacaacac

SEQ ID NO: 1332 - DNA, 1566 bp, Glycine max
  misc_feature (8)..(10): n is a, c, g, or t
  misc_feature (13)..(13): n is a, c, g, or t
  misc_feature (42)..(42): n is a, c, g, or t
  misc_feature (78)..(78): n is a, c, g, or t
  misc_feature (986)..(986): n is a, c, g, or t
  misc_feature (1152)..(1152): n is a, c, g, or t
  misc_feature (1317)..(1317): n is a, c, g, or t
  misc_feature (1377)..(1377): n is a, c, g, or t
  misc_feature (1404)..(1404): n is a, c, g, or t
  misc_feature (1412)..(1412): n is a, c, g, or t
  misc_feature (1566)..(1566): n is a, c, g, or t
  Probeset Number=SeqID_11111
cttaaacnnnttnttcttagacttcatcttatacaaaataantctatcctcataaacctcttataccatcaccccaanaacaaagacaataacctgcgcggttcggtctcggcgctagggcgccagcggatttctgtagatataatgtatgtgtgattgatatgtggactgagtactgtgatgacccactgagtctaatctctcttcctattttatctcgctcatagcaattataggccgacctacgtctctatagctcagactattttatgttgtccccacaacaatgaaacatgaatatcagtacctatcgttctaacattgtttttctctgtctttttcgatggtgttgtacttaattaatgctgacgtatatttagataaagaaaccaccacaaacaaccgcaacaaacacaaaaacacaaaacaaacacatcaaacacacaatatcacttcaccaaaagatcttatataaagcaacaactattaatcatcataatatattatatatagactaatatagttacatataacacattaacgatattaatagtatatcgaataacttctcctcacacaatattgatgatataacaaatagatgagtagcacgcaaaaactagcttgtgctgctctctcacacacacctcgccatatatctctacaaatagcaatacccagatgaccatcagcgagtcacgtgtatgagggacataaggaagaaggtacgacagataggagccgcaggcatacagttcccggcacagacatatgtgctgccgcggacgcaacttagactatacaatatatatgaatagctgcgcaggtggctgcataccagagatatatgatcctcgcgtcgctcacatgatgagatagataagccgaagtatcgataatatgatattatagaagtccaacgatgatcgagtatagatgtgacataagcccgtatgtatacatatgaatacaatagctatactagntgagtttcatcatgcaacgacgtgacagcgaacgagagtgcgcgcatataatatcgcgcatatctacataagtctcacactgcttctcgcatctcatgaccgcggcggaataacagatgtatatctacttagacagtattacaactacatacgactccacatatcnacgtatttgtctctagactgtacgctacggacgacgaactcctcgtcctatcgaaacgatatgcacaccgcggcatatgacaacactaggatcgcacgagctcgctggtcgaatcggtgcgagacacataacttataatcataccgatattgagatcgtgatacntgccgtacgtgtctgtgcgtcgtatgagcgtgagtccatgctggtactctcgtgtctctntactgacatacaactatacacacaccnacgcaagncacgaattgaatatctctcgtacatcgcgagtgtgttcttactacatccttcttcacgacgtattcatacacttattctattatgtgaatcaattgtactgtcatactctatactagtgtgtacagtgatatagccactaactgccgcggctan

SEQ ID NO: 1333 - DNA, 389 bp, Glycine max
  misc_feature (325)..(325): n is a, c, g, or t
  Peptide Sequence Number=SeqID_6450
  Probeset Number=SeqID_11112
gaaaggatggcgagtagcttagggatagtcgctgttaatccgtcgtgttctggagatcgcttcttaagacctaacttctcagtcaccacttgctgctgcttctcttcgtctgtctgtttccgtagctggcgcggacgaatcaatgtcggaaccgtcgtgaatccagctccaagacgccacgacgtcgggggattgttagtttctggttgtctctcttcgccggattcgtcatctccaccgtcttctatctctggtccgaagacgaaactgtatgttagtgggctttctttccgtacaactgaagataacttaagaaatgtttttnaacaatttggcaagcttacacttgttaacttggtgatggataaggtagcaaatagaccaagagg

SEQ ID NO: 1334 - DNA, 1999 bp, Glycine max
  misc_feature (85)..(85): n is a, c, g, or t
  misc_feature (135)..(135): n is a, c, g, or t
  misc_feature (223)..(223): n is a, c, g, or t
  misc_feature (401)..(401): n is a, c, g, or t
  misc_feature (646)..(646): n is a, c, g, or t
  misc_feature (649)..(649): n is a, c, g, or t
  misc_feature (841)..(841): n is a, c, g, or t
  misc_feature (865)..(865): n is a, c, g, or t
  misc_feature (989)..(989): n is a, c, g, or t
  misc_feature (1038)..(1038): n is a, c, g, or t
  misc_feature (1167)..(1167): n is a, c, g, or t
  misc_feature (1208)..(1208): n is a, c, g, or t
  misc_feature (1238)..(1238): n is a, c, g, or t
  misc_feature (1314)..(1314): n is a, c, g, or t
  misc_feature (1326)..(1326): n is a, c, g, or t
  misc_feature (1419)..(1419): n is a, c, g, or t
  misc_feature (1435)..(1435): n is a, c, g, or t
  misc_feature (1458)..(1458): n is a, c, g, or t
  misc_feature (1470)..(1470): n is a, c, g, or t
  misc_feature (1504)..(1504): n is a, c, g, or t
  misc_feature (1598)..(1598): n is a, c, g, or t
  misc_feature (1629)..(1629): n is a, c, g, or t
  misc_feature (1656)..(1656): n is a, c, g, or t
  misc_feature (1659)..(1659): n is a, c, g, or t
  misc_feature (1669)..(1669): n is a, c, g, or t
  misc_feature (1678)..(1678): n is a, c, g, or t
  misc_feature (1685)..(1685): n is a, c, g, or t
  misc_feature (1695)..(1695): n is a, c, g, or t
  misc_feature (1715)..(1715): n is a, c, g, or t
  misc_feature (1723)..(1723): n is a, c, g, or t
  misc_feature (1766)..(1767): n is a, c, g, or t
  misc_feature (1789)..(1789): n is a, c, g, or t
  misc_feature (1811)..(1811): n is a, c, g, or t
  misc_feature (1858)..(1858): n is a, c, g, or t
  misc_feature (1863)..(1863): n is a, c, g, or t
  misc_feature (1903)..(1903): n is a, c, g, or t
  misc_feature (1906)..(1906): n is a, c, g, or t
  misc_feature (1908)..(1908): n is a, c, g, or t
  misc_feature (1913)..(1913): n is a, c, g, or t
  misc_feature (1952)..(1952): n is a, c, g, or t
  Peptide Sequence Number=SeqID_6451
  Probeset Number=SeqID_11113
gcctccgtcggctctcggcgcctgtagtgccgtgcgcgggctgctgtgtgtaggtgtgagatgcagacagtgggtcgtcattacntttatttgtagaggtgtaggaggataccgctctcgcgccgtgccgtggtnggtcacacatgtaatataaatatataacacgaagatctacaactaagcgtggtggagacagtggggcgcgtggtaggcatgacaactnatttaggctacgattgtcaccgacacatgagcaagcggactgtgggcgcatcgtgcgttacagaaattaatattatcactactcgaccaatctgccgtactcatcctccccgcagtctcgctgtgcaggctatacgtctgttgtgtatcttgtctgtgttgcattgatgcagtcggcngaaggcgagaagggtagtgaatgggagcgcgtagcgagtaaaatacaaacacgttacaaatcataagtactaatagcacaggatattactcactactgagtaatattagtgacttctcatcgataataataagtatgccaaccatacgaagtgatatctgattatgaatgtatatacgcgtgactattatcgcgtgtgtagtgactgtcgcgaagcggaagcggtgatagacgacaactgcactncgntggagtgctgtcatgtaggctagacatcactatgtctatactgcgctccgtggtgcactgactcgctgtgtgcgtatgtatgtgcgtagtgctgtgttcggcgttgccgaatatatggttcgagactcagtctgaccgtccgtcgtgtgctcgtgttatcgtgttgcgcttgagtggcacgaacggacgacnagtacgacgcgaatcactaatatncgactggagacacgtgtagtacttgtactctgtagacgagagtagtagtgctaggtacatgtgttcgcagtcaacgagcagtcagctcggctgacagtgacggatcctgtccgtatatagtgtncacgagtcgctcatacgcacgcgcctatcaaccagactcactgtgatantgacgcagatgttctaagatagaacgatggcaggatgcgaagactgtagaaggcgtgtatgacacagtgaagtgcgcacgttgtgtgattagatcacactactacataggttataatatagcgatgtanattatcggtgtagcgtgctcagcgaccacttgtcgatgatntcacggacgagtagatattaggagatctcnatcgcgcacatactatgtcatatacgcacacggatgtagcgcctactgttgcacgcgtacgtggcacgcatatctngcgaatctagangaatcacgtacaggcgtatcatgtggcggcgctagaggtcagtaacatgtgagatgagtactcagtgatattattgacgtatacacgagcggnagtgcggacagttgtnacgctagatcgcacgactgtaantctctacctcgntcagtacgtatatgactgatatatcttcgtcgantgctgtgtcctacacagtagatgatacgtaatgacatcacgagatgtgagacatctagaatgatgatactatatattactactactataagtgnataactaccagaatgagacgagagccgatanatcgtacatcttcataggagtcggctncgncggcaatgtngcgtgatgnatagcantagtgcacgnatactatgatgagcagaacnttcatgcngtatgacgtctcgttcagccgccgctgcagagtagtagtgatnncatcacgtcatacgtcgtcgtngaaagcactacgacgctgcgangtcgtcgaacgatatatcgagcgtgagatgcgacgtgcagtagagangccgncagcgtgtatactatataacaacatacataatgtcgtctnganangtagnctagacgatggcagcatgacgagtcaatgcgatgagtantcatgctacgtagacatatcgactatactatgtggactgatgctgag

SEQ ID NO: 1335 - DNA, 656 bp, Glycine max
  Probeset Number=SeqID_11114
aatttctaataagtttctccaaagaagatgaagcaacctacgtttcccaacgcagcggcggaggaaaccaaaccagaacaaaaccagaccgcaccaaagcagaaatcgaagaaattcccaactgcaacggagctaatctcacactaccagaagcaaggggggctcgaaccagcggaagcctcggttaaggtcatcgaagaccttcaaaacgcgctcgtacgagtcgcttcgtcatcgaagaacgcctccagcaagaacaagcttctagctgacgcgaggaaaatcgacgccattagtggaaggcttgccgtcgtggacgccaagttggagacgaagcctggatacgtcgagactttcgcgttagggttagcttccggtgcggcgcttaacggaattagcgccgtctggcctcacgttactagagggattggtcaggtttggtccgccgttaagagtgggacagatccgtcagctgcctcttaaaatgaatattctctccagtgtgatttggttacttggtgttgtattagctaacttcagtttttttcaccgttggaacaaaaaaaatctgataaaaatttagttttttgttatcttctttgtttactgttgttcttagtgaaatctgcaaataagaagagttaattgaaaaaatc

SEQ ID NO: 1336 - DNA, 337 bp, Glycine max
  Peptide Sequence Number=SeqID_6452
  Probeset Number=SeqID_11115
agtgagttgcacatgcaacacgactccaacgccttaacatactaagccggtgattcggaatctctgacccaccctcggcgacggtgctctctggctcggttcagacaacgccacctggggtttgattacatacgccgtttcctacgttaaattcgtggagtccggtggtgctagagttattccccttatctacaatgagtcacctgagaaccttaacatgaatctcgatttggtcaatggactgctcttcactggtgggtgggctgcttctggtccatatttggatactcttgaaaacatatttaagaaagctttagagataaatgatgctggagac

SEQ ID NO: 1337 - DNA, 1557 bp, Glycine max
  misc_feature (18)..(20): n is a, c, g, or t
  misc_feature (23)..(24): n is a, c, g, or t
  misc_feature (26)..(26): n is a, c, g, or t
  misc_feature (28)..(28): n is a, c, g, or t
  misc_feature (31)..(38): n is a, c, g, or t
  misc_feature (44)..(46): n is a, c, g, or t
  misc_feature (48)..(53): n is a, c, g, or t
  misc_feature (57)..(57): n is a, c, g, or t
  misc_feature (59)..(61): n is a, c, g, or t
  misc_feature (66)..(66): n is a, c, g, or t
  misc_feature (72)..(73): n is a, c, g, or t
  misc_feature (78)..(79): n is a, c, g, or t
  misc_feature (100)..(100): n is a, c, g, or t
  misc_feature (136)..(137): n is a, c, g, or t
  misc_feature (164)..(165): n is a, c, g, or t
  misc_feature (168)..(169): n is a, c, g, or t
  misc_feature (172)..(172): n is a, c, g, or t
  misc_feature (247)..(247): n is a, c, g, or t
  misc_feature (250)..(250): n is a, c, g, or t
  misc_feature (296)..(296): n is a, c, g, or t
  misc_feature (308)..(308): n is a, c, g, or t
  misc_feature (347)..(347): n is a, c, g, or t
  misc_feature (392)..(392): n is a, c, g, or t
  misc_feature (458)..(458): n is a, c, g, or t
  misc_feature (644)..(644): n is a, c, g, or t
  misc_feature (866)..(866): n is a, c, g, or t
  misc_feature (895)..(895): n is a, c, g, or t
  misc_feature (1183)..(1183): n is a, c, g, or t
  misc_feature (1229)..(1229): n is a, c, g, or t
  misc_feature (1238)..(1238): n is a, c, g, or t
  misc_feature (1267)..(1267): n is a, c, g, or t
  misc_feature (1285)..(1285): n is a, c, g, or t
  Peptide Sequence Number=SeqID_6453
  Probeset Number=SeqID_11116
ttttgtggttgtggtcgnnnggnngncncgnnnnnnnnccccannncnnnnnntctntnnnccagngcgacnntattnnctcccccccgcgcccgacacncctctcgtaaatagagagagcacacaaccccccccnncaatacgcaacctatggttatttgttnngtnnccnccccccccccaccagcgagacagacaataatacgaatatgatggcataggggtgcgtctgcgttccgcctatacncancaacacacaaaacaacatacaaaatgagtttcgaagcagaccaccnccaactactatnatatatacaatagagaaaagagtatgaggaggctatgtntagatattacctcgtatagctattacgcagtttattattctacantgatttctcccaggtgtcccgtctacatgttatacacaccgcccgccgaaaagcatagtcgatganttcttcaacacaatagcagcgaggtgcgtggtggggtggtgcaaagagagaaacacacattgatcctcacaccaattcaaagtcgagactcgacgctctcggcgcgcgcatacagatgtaatatcagcactggaagctgtcggggaggttttctctacatagagctctgatatctattatgaatanataatatattgatgataatgtagaacatatcattaatatatcgatacacaatacaatatgaaatcagaccgtacatacgatcgcgaggccgatctacgcagagactgagtacgttatatgagtagagaggatgtagagatatatataaacgatgtgtgtgtgacacaccccaccacaccccatcactctctctcttgcactccccgagtctgtggtagggangtggtggttgtgaggtgtgtgtgtgtagnacgcgcgcagaaatcacacacaacacacagcgcgagcgcgaccttgttcattatatatttatagtgatgatgttctatagactagatcactaaccgctcaatgagcaactctactgacccgctgccatctgaacctccacacaactcctcacctagcagtcgcaccgtcacgctcaccctatcatcattctatgctatctctttgatcactctacagtctactcatatctccactcacactcactctgctgctggagctctctcgtgcgacactgccttctgcacgcntcacacacgccatcctccatggaactgtatgtattagcatgctgcncagtacatnatactctgtctacactctcgagtgaacgntcgcgctactgcacgcgntcactaggctgtccgcgcgtggacgtgtgatcgtactactacgaacgtatctctcttgctctcgagacatgtcacacgttacgactctgcgatgcacacggcactgatactacttgtctcgatgagcagtcatatcatcacgtggatatgtacactagccgctcactgccacactggctgactacaatactatatactgatatataatacactttatattaatgctacctcatgcgtcacacaatctattgactacgccatcctctctctca

SEQ ID NO: 1338 - DNA, 1378 bp, Glycine max
  misc_feature (33)..(33): n is a, c, g, or t
  misc_feature (194)..(194): n is a, c, g, or t
  misc_feature (259)..(259): n is a, c, g, or t
  misc_feature (509)..(509): n is a, c, g, or t
  misc_feature (518)..(518): n is a, c, g, or t
  misc_feature (599)..(599): n is a, c, g, or t
  misc_feature (647)..(647): n is a, c, g, or t
  misc_feature (896)..(896): n is a, c, g, or t
  misc_feature (1162)..(1162): n is a, c, g, or t
  misc_feature (1195)..(1195): n is a, c, g, or t
  misc_feature (1210)..(1210): n is a, c, g, or t
  misc_feature (1224)..(1224): n is a, c, g, or t
  misc_feature (1315)..(1315): n is a, c, g, or t
  misc_feature (1317)..(1317): n is a, c, g, or t
  misc_feature (1378)..(1378): n is a, c, g, or t
  Probeset Number=SeqID_11117
attcttcaaattacaactgtcactattactagnaatatacacgagattcaatcaaactaaagatgacacaaactaaatacaccgccacccgtagtgcacactcacttcgtagtacaccatcactttatctgctcaacttcaccaccttaatgtgtatagtaagtgtacccctctgcactgcttctaatacctgnacaacatatttctgctagtcttacatgatgtcgttgcactagatgctcgacgttaggatctcatntatattgtattaccattatcactattatgtgctaactctgtagtgtcgagacgtgtattcatcattattctctgatgtgaactcacaagtttgtaatacttacttctatcgaatgtctcttacttatgcaatactccataatccccttcctcgtttacatgctgcttagccttgaccatcgatctgcatcattactcggctcttgtactcgactacgcgacaactctcgcatcactgcgaatataggacnacacattcnctaccacatggcacgacctgcttcatatcggtcttctgtgtaatctctccacaatattgcactcccagggagtcacttctntcgctggctgcagccatcgatctaacgcctgatcgacacgtcgctacnacccacctatagcaaaactcgcttatggtatatactcttctctcacatagccattgttctattgcctttctgacatcacgcacatattgatgaattgtgccaccattcccctggtattcggatcgacgaatggacattaatccactctttatattaccatgcttcattccctgttctacctatgcaatcattggccaaacacgtacggctattatcgttatatagtcataatgtcacgagtgcctagangatgcagctgtgggtcgctatacggctggttccatcgtatggaccgtcagggcgagaattatactattgtacacctacccgcccttctaactatcgtttcttcatattactcctattaggcatgataagccttcgcatactcgtggtgttggactactatacgactttgtcgaatgctacggatagacagctgttcttgttaatacataactcgtgtccgaatctccatatgtcctcgcgcgcgtctcgggcttcattatccttgntactcccacctattaatctccctgctgctcatncactgtatctcacantcatctataattgnatatggcctacttcgaatgccattacatacagttgcaatcgcgagccgcgacgtacctcgtgattctcgtatgtattcatattctctgtcnancgtcgactcacttcgcaccgctcttatacatatttttagcgcgagttgtctatcacgatgn

SEQ ID NO: 1339 - DNA, 1506 bp, Glycine max
  misc_feature (18)..(18): n is a, c, g, or t
  misc_feature (24)..(24): n is a, c, g, or t
  misc_feature (129)..(129): n is a, c, g, or t
  misc_feature (166)..(166): n is a, c, g, or t
  misc_feature (262)..(262): n is a, c, g, or t
  misc_feature (506)..(506): n is a, c, g, or t
  misc_feature (756)..(756): n is a, c, g, or t
  misc_feature (797)..(797): n is a, c, g, or t
  misc_feature (918)..(918): n is a, c, g, or t
  misc_feature (1009)..(1009): n is a, c, g, or t
  misc_feature (1107)..(1107): n is a, c, g, or t
  misc_feature (1282)..(1282): n is a, c, g, or t
  misc_feature (1339)..(1339): n is a, c, g, or t
  misc_feature (1343)..(1343): n is a, c, g, or t
  misc_feature (1387)..(1388): n is a, c, g, or t
  misc_feature (1431)..(1431): n is a, c, g, or t
  misc_feature (1435)..(1435): n is a, c, g, or t
  misc_feature (1480)..(1483): n is a, c, g, or t
  misc_feature (1487)..(1487): n is a, c, g, or t
  misc_feature (1489)..(1489): n is a, c, g, or t
  Peptide Sequence Number=SeqID_6454
  Probeset Number=SeqID_11118
cagagtgcagatgtcaantagtgntggatgctctgagtgtgatgggttctcgtggcattctcgccattcagaggtcatgatcacatgaacgtctgcatgtcgaggggatgatgccatacgacatctacnagagatgtgagagagtatacatgatacgcagcctagnactgatgcagatatgcgtgtacaccatcgacatgtaatgggagaacacgtcagagattagatcagatagatgaggatcgttggtggatcgctgtanggtgctagacatatgcgcggcgggcacacctgctgatgtacacaggcacgccgcacgcacgtctctacgccgcgcgacatcgcggtcctgggtagtggatcatgtgcatcctgacacggtgagtaccgcaccgtgctggttcgagtcaggcactcgtcgctcgttcttctgcgatgagcatgctggtcgctgcgagataggcgcaacgcatacactctctagcacgagtccatcggcgccgcgncgcgcgcggcgagcgctcgcacgtgactctgcgccaatgacggcgcgtctctactatactctccgtagatcagagatagatctagtcacacgcgcacatacggcgcgctgagctacagcgatagcgatcctcatagagtgtggccatgttatagtatatgataggggatctcctgagtgaagagcaagatcttggagcgcgcatgcgtaatactagagttaatcctacacacgccggtgtggtggctgtnctgtctcccatatagattatcactatcacacacactctcgntcacgcagccaagatccgaatcgctccagatgctagcgaagacctatgtgtgaagacatgtagtgttagaaggattatattgatttaattagatattctttattaaagctatctacatcancactacatatatgaagggatgactgcattaacggcgtgcaggataccagaccgcgtgacgcagccacgcgtgctctctcgcctaccttccntcacaacccccacaccacgccgccccgcccgcctcacccaccacccgacttcacccctcaaccagcgcgccctatatccctgcactctcttaattttntatattttacccattgagctgaggtctttgtagagctaccagcatcctcatctctctggctaactgtcgtatcacacacagcgaaaccccatcttaacggactgtcggtagctggctcgcctaccccgcgcctcccgccgcgctggctgtttgccattcatggttctcgcagtcngaagtgcgtttgggtggggccctcaccgccttcaccacatcacattcacaaatattntccnccacactcctccccactctctcctctccccgcccctcactcgtnngtgctttcttcgtgactctctcagcatggatgtccccgtcccnaggngtaggtggcggggggggtgggagagggagggacgccgaaaaccannnncaanancaccggcccactccccc

SEQ ID NO: 1340 - DNA, 2136 bp, Glycine max
  misc_feature (39)..(39): n is a, c, g, or t
  misc_feature (231)..(231): n is a, c, g, or t
  misc_feature (302)..(302): n is a, c, g, or t
  misc_feature (323)..(323): n is a, c, g, or t
  misc_feature (339)..(339): n is a, c, g, or t
  misc_feature (406)..(406): n is a, c, g, or t
  misc_feature (474)..(474): n is a, c, g, or t
  misc_feature (525)..(525): n is a, c, g, or t
  misc_feature (600)..(600): n is a, c, g, or t
  misc_feature (610)..(610): n is a, c, g, or t
  misc_feature (638)..(638): n is a, c, g, or t
  misc_feature (679)..(679): n is a, c, g, or t
  misc_feature (979)..(979): n is a, c, g, or t
  misc_feature (1127)..(1127): n is a, c, g, or t
  misc_feature (1173)..(1173): n is a, c, g, or t
  misc_feature (1184)..(1184): n is a, c, g, or t
  misc_feature (1193)..(1193): n is a, c, g, or t
  misc_feature (1207)..(1207): n is a, c, g, or t
  misc_feature (1236)..(1236): n is a, c, g, or t
  misc_feature (1239)..(1239): n is a, c, g, or t
  misc_feature (1244)..(1244): n is a, c, g, or t
  misc_feature (1284)..(1284): n is a, c, g, or t
  misc_feature (1287)..(1287): n is a, c, g, or t
  misc_feature (1296)..(1296): n is a, c, g, or t
  misc_feature (1374)..(1374): n is a, c, g, or t
  misc_feature (1402)..(1402): n is a, c, g, or t
  misc_feature (1423)..(1423): n is a, c, g, or t
  misc_feature (1431)..(1431): n is a, c, g, or t
  misc_feature (1439)..(1439): n is a, c, g, or t
  misc_feature (1460)..(1460): n is a, c, g, or t
  misc_feature (1468)..(1468): n is a, c, g, or t
  misc_feature (1503)..(1503): n is a, c, g, or t
  misc_feature (1515)..(1515): n is a, c, g, or t
  misc_feature (1555)..(1555): n is a, c, g, or t
  misc_feature (1695)..(1695): n is a, c, g, or t
  misc_feature (1717)..(1717): n is a, c, g, or t
  misc_feature (1723)..(1723): n is a, c, g, or t
  misc_feature (1765)..(1765): n is a, c, g, or t
  misc_feature (1792)..(1792): n is a, c, g, or t
  misc_feature (1830)..(1830): n is a, c, g, or t
  misc_feature (1850)..(1850): n is a, c, g, or t
  misc_feature (1860)..(1860): n is a, c, g, or t
  misc_feature (1876)..(1876): n is a, c, g, or t
  misc_feature (1885)..(1885): n is a, c, g, or t
  misc_feature (1887)..(1887): n is a, c, g, or t
  misc_feature (1900)..(1900): n is a, c, g, or t
  misc_feature (1903)..(1903): n is a, c, g, or t
  misc_feature (1906)..(1906): n is a, c, g, or t
  misc_feature (1912)..(1912): n is a, c, g, or t
  misc_feature (1951)..(1951): n is a, c, g, or t
  misc_feature (1955)..(1955): n is a, c, g, or t
  misc_feature (1974)..(1974): n is a, c, g, or t
  misc_feature (1991)..(1991): n is a, c, g, or t
  misc_feature (2006)..(2006): n is a, c, g, or t
  misc_feature (2047)..(2047): n is a, c, g, or t
  misc_feature (2066)..(2066): n is a, c, g, or t
  misc_feature (2069)..(2069): n is a, c, g, or t
  misc_feature (2084)..(2084): n is a, c, g, or t
  misc_feature (2087)..(2087): n is a, c, g, or t
  misc_feature (2133)..(2133): n is a, c, g, or t
  misc_feature (2136)..(2136): n is a, c, g, or t
  Probeset Number=SeqID_11119
tgataatatagttcatcgctagcatctcgccgacgctgnctcgacggatcgctacgccaccgctgcacagaggagaggatgagtatataatcagtaggcggtaagagatgtagggcggagcagggtgaccacccaccgacgcgtacgaaaggagagacgcgaacgcgcacatgcatgcgacagacagcgctctctcgcatcctatactatactgatgtgtgtagcacgtgncacagagacgtacgtatatacgtgcgcacatatatgcacgtacgacggagcagagaccgcgtcactaattnatgcgttatgcgcagcatatnacgaatatctattccncgacgccgcgcacgacacggcatcctacggtacagatagtaggacgatagttattagagtttgatgnattgcacgatgctgtacacggtggtcaagacgtatgaatcagagcgagacgcatcgcgaacgcgagcngacagacgctatcatgcatacgacagaatatatatgagtatcgctccattntgcgctgatcgagatacacgatgagagcgagcgctcgctcacggtctggtttcattgtgataggtgctcgactantcactcgatntcctacttatcgagctgcagacgatagngtctgcgcgacaccagccacgcgcgcgcgcgctccgcgtgnatgtatatatatcaagattactaacatacatgcacactggagaccaggaagggatgaaagtcagtgagtcagtgctacggtcaaggtcgtagagaacgctagagcagcagtagtatgtgacgtgtacgtggcgagcgcctcgtatgcgcgtcagtgctgggaatcagaagtgcatatgcgccgatgtgctgctgcgcatagatctcactcatcgtaagagctactactgaagcgcgcgtcgcacgactcgaacgtaatgcgactcaccgacacatcacatacatgatagacgttcttagntacgtgctgcttgcatctcgctaatgtaccatctcaatagaatatatcgtacgtatggtgctgaacaaggcgatgagtgcagtagcagtgctacggcgaagtgctatgatgatgatcgagacgagtccagtgtacacgacggtcatgngatgatgcgttgctcattgatatagatgacggatacacgagctacngagagaacggntaccatgancatgatggctatcngatatcatacgacgagactcagtgcatanatnagtantagcaggtcactgacgtatacagatagtagatcagtgatngcngccgacgantgcgcgcgcgcagatagtacgcggcagcgccgcgtctgtctcatactagtacacaattatagtgcctgtgtcatctcnctaggcaggacgcgctgttcagcgctgnacgatgcagtatatgagatcntttcactncggacgtntgcactgcgacgtacgcatantatacatnactaatatcgtacgcgcacgtctcacgtactgacnacacgacgactncatcatacgttatctattacgcgctcagacagtgcgtctngtagacgacacgacagtcatgcatatctctgagtactggaccgagacacgatgctgatgtgaacgatgatatcatggtgtctcatttgagtgcacgcgcatgcgacgtcgcgagtcgtcgcgctatagaggacgtaagtntagcggtaaatgagacatgtgntcgaangtcgagctgacgcccgaaactgtagtacaatgtcattttgangcttagtatgcgcgaagtcatcatatnatgatgtgcgacgcgcatgcatgatctgcagatacganctatcagatcatcatttgancatctgatgntgaacatggtcctacnctgatagtnancagtctgctacgntanatncgatcngctacgtctataccagctcgtccctggatcgacctgcantgangagctgtaacgtcgatatnataactcaatgacacgntacactactatacantcactctacagtacgacacgtcacacgcgacagacgcatcntggagtttaacaatgactngcncagcgcgttttcatnatnatacagctggataggcatcatcgttcgacgctacgacgagcatcancgn

SEQ ID NO: 1341 - DNA, 1443 bp, Glycine max
  misc_feature (1)..(1): n is a, c, g, or t
  misc_feature (5)..(5): n is a, c, g, or t
  misc_feature (7)..(7): n is a, c, g, or t
  misc_feature (108)..(108): n is a, c, g, or t
  misc_feature (120)..(120): n is a, c, g, or t
  misc_feature (122)..(122): n is a, c, g, or t
  misc_feature (190)..(190): n is a, c, g, or t
  misc_feature (317)..(317): n is a, c, g, or t
  misc_feature (374)..(374): n is a, c, g, or t
  misc_feature (376)..(376): n is a, c, g, or t
  misc_feature (502)..(502): n is a, c, g, or t
  misc_feature (1043)..(1043): n is a, c, g, or t
  misc_feature (1052)..(1052): n is a, c, g, or t
  misc_feature (1287)..(1287): n is a, c, g, or t
  misc_feature (1294)..(1294): n is a, c, g, or t
  misc_feature (1336)..(1336): n is a, c, g, or t
  misc_feature (1348)..(1348): n is a, c, g, or t
  misc_feature (1399)..(1399): n is a, c, g, or t
  misc_feature (1415)..(1416): n is a, c, g, or t
  misc_feature (1421)..(1421): n is a, c, g, or t
  misc_feature (1424)..(1426): n is a, c, g, or t
  misc_feature (1428)..(1430): n is a, c, g, or t
  misc_feature (1433)..(1434): n is a, c, g, or t
  Peptide Sequence Number=SeqID_6455
  Probeset Number=SeqID_11120
nccancnacgccatcacccgccgcagagacaactcgagcgcccatcgacgcgccacagcagacaccagccatgcccgtgcgcacgtacgcgctcggggggagcacgcnggaacgtccgcncncggcagcagtcactcgacacggcaagccagaaacacgatcagtagcgcgtaacgcccacagcgcactnacgcacacaccgccgagccaccacacatctcactcccctccccagcacccacccgccgccacgtcagcagggccgaggcacgcggcgcgccggcggagagagcccccgcgacgacgagcggagtganagcgagcacacgcgacggagacacacagcgggaccccgcacgcagagcgcacacgancnaataaaacagcgagaagcggactgcggagagacaagagcggagacagcaggtgggcggcgccgcgcggacggcgagcgagagacaacagcgagagcgcgccgcgcacaccgtacgagaaccacaancacagcacgccgcacgagacgtgacgacaagagggagcagagagagaggggaagacagacgaagaggaaacgaccaagagaaacaaacggagcgcgcggcagcggccacccgcacccgtacgcgtgaggcgagacgagatagcagggaatgggaggagcggacaggaagaagacacagccaacggcggcagagaggacaacgggaagcgagagacacagccagccaactaccacacagagaacacaacgctgacagcaatgagcacggctgcacacccacgcagacccacacaccacccgaggcgcacaagacacacagctacaccaacaccaccaacacacacccccagacacaacagaccaaaccgcccacacacgaagcaccccacgcatcgccggcaccggcgcaggcgccgcgcgtcagaggcggcacccgccggcgccacgccgcgccgccgcgcgcgcgcacccccaccaccgcgagacgcaccgcccgaccgcccccgacaccaccgaccagcaacgccacaccgcgcacggncgcgcccangcccgcccggccgaaagacgagcccggtgcggcgggcgcggccgcgtggacgggacgagggcgaggcgccacaacaggaccagccacacccggacgcgacgagcagcacccgcggcgcacacaccggaacccgcccgcgccgacgacacacgcacgacggagcgcaccacacgaagacggcgcaacgagctcggagtccacaacagccgaagagacgagccccacacaaccacancaaaccnaagggaactaaacggagcaggggtttttccactctcttttcncctcgcgcggcnctcccgcacaccacaacgcaacccgcgagcaccgcagggaggggaaggagnaggaggaggggagatnngggtnaannngnnnggnnaaaaaaaaa

SEQ ID NO: 1342 - DNA, 2414 bp, Glycine max
  misc_feature (5)..(6): n is a, c, g, or t
  misc_feature (11)..(25): n is a, c, g, or t
  misc_feature (30)..(30): n is a, c, g, or t
  misc_feature (36)..(36): n is a, c, g, or t
  misc_feature (39)..(40): n is a, c, g, or t
  misc_feature (61)..(61): n is a, c, g, or t
  misc_feature (81)..(81): n is a, c, g, or t
  misc_feature (100)..(100): n is a, c, g, or t
  misc_feature (106)..(106): n is a, c, g, or t
  misc_feature (110)..(110): n is a, c, g, or t
  misc_feature (115)..(117): n is a, c, g, or t
  misc_feature (122)..(122): n is a, c, g, or t
  misc_feature (126)..(126): n is a, c, g, or t
  misc_feature (255)..(255): n is a, c, g, or t
  misc_feature (261)..(261): n is a, c, g, or t
  misc_feature (288)..(288): n is a, c, g, or t
  misc_feature (308)..(308): n is a, c, g, or t
  misc_feature (387)..(387): n is a, c, g, or t
  misc_feature (422)..(422): n is a, c, g, or t
  misc_feature (454)..(454): n is a, c, g, or t
  misc_feature (480)..(480): n is a, c, g, or t
  misc_feature (623)..(623): n is a, c, g, or t
  misc_feature (634)..(634): n is a, c, g, or t
  misc_feature (662)..(662): n is a, c, g, or t
  misc_feature (832)..(832): n is a, c, g, or t
  misc_feature (861)..(861): n is a, c, g, or t
  misc_feature (881)..(881): n is a, c, g, or t
  misc_feature (953)..(953): n is a, c, g, or t
  misc_feature (1036)..(1036): n is a, c, g, or t
  misc_feature (1185)..(1186): n is a, c, g, or t
  misc_feature (1233)..(1233): n is a, c, g, or t
  misc_feature (1394)..(1394): n is a, c, g, or t
  misc_feature (1400)..(1401): n is a, c, g, or t
  misc_feature (1403)..(1403): n is a, c, g, or t
  misc_feature (1411)..(1411): n is a, c, g, or t
  misc_feature (1417)..(1417): n is a, c, g, or t
  misc_feature (1435)..(1435): n is a, c, g, or t
  misc_feature (1492)..(1492): n is a, c, g, or t
  misc_feature (1499)..(1499): n is a, c, g, or t
  misc_feature (1572)..(1572): n is a, c, g, or t
  misc_feature (1578)..(1578): n is a, c, g, or t
  misc_feature (1585)..(1585): n is a, c, g, or t
  misc_feature (1601)..(1601): n is a, c, g, or t
  misc_feature (1639)..(1639): n is a, c, g, or t
  misc_feature (1650)..(1650): n is a, c, g, or t
  misc_feature (1680)..(1680): n is a, c, g, or t
  misc_feature (1707)..(1707): n is a, c, g, or t
  misc_feature (1716)..(1716): n is a, c, g, or t
  misc_feature (1736)..(1736): n is a, c, g, or t
  misc_feature (1746)..(1746): n is a, c, g, or t
  misc_feature (1759)..(1759): n is a, c, g, or t
  misc_feature (1778)..(1778): n is a, c, g, or t
  misc_feature (1790)..(1790): n is a, c, g, or t
  misc_feature (1806)..(1806): n is a, c, g, or t
  misc_feature (1809)..(1809): n is a, c, g, or t
  misc_feature (1815)..(1815): n is a, c, g, or t
  misc_feature (1828)..(1828): n is a, c, g, or t
  misc_feature (1847)..(1847): n is a, c, g, or t
  misc_feature (1869)..(1869): n is a, c, g, or t
  misc_feature (1877)..(1877): n is a, c, g, or t
  misc_feature (1882)..(1882): n is a, c, g, or t
  misc_feature (1884)..(1884): n is a, c, g, or t
  misc_feature (1890)..(1890): n is a, c, g, or t
  misc_feature (1906)..(1906): n is a, c, g, or t
  misc_feature (1909)..(1909): n is a, c, g, or t
  misc_feature (1922)..(1922): n is a, c, g, or t
  misc_feature (1928)..(1928): n is a, c, g, or t
  misc_feature (1952)..(1952): n is a, c, g, or t
  misc_feature (1984)..(1984): n is a, c, g, or t
  misc_feature (1996)..(1996): n is a, c, g, or t
  misc_feature (2023)..(2023): n is a, c, g, or t
  misc_feature (2030)..(2030): n is a, c, g, or t
  misc_feature (2052)..(2052): n is a, c, g, or t
  misc_feature (2079)..(2079): n is a, c, g, or t
  misc_feature (2081)..(2081): n is a, c, g, or t
  misc_feature (2114)..(2114): n is a, c, g, or t
  misc_feature (2118)..(2120): n is a, c, g, or t
  misc_feature (2124)..(2125): n is a, c, g, or t
  misc_feature (2139)..(2139): n is a, c, g, or t
  misc_feature (2144)..(2144): n is a, c, g, or t
  misc_feature (2155)..(2155): n is a, c, g, or t
  misc_feature (2189)..(2189): n is a, c, g, or t
  misc_feature (2194)..(2195): n is a, c, g, or t
  misc_feature (2198)..(2199): n is a, c, g, or t
  misc_feature (2201)..(2202): n is a, c, g, or t
  misc_feature (2222)..(2222): n is a, c, g, or t
  misc_feature (2228)..(2228): n is a, c, g, or t
  misc_feature (2230)..(2230): n is a, c, g, or t
  misc_feature (2241)..(2241): n is a, c, g, or t
  misc_feature (2246)..(2247): n is a, c, g, or t
  misc_feature (2273)..(2273): n is a, c, g, or t
  misc_feature (2276)..(2276): n is a, c, g, or t
  misc_feature (2286)..(2286): n is a, c, g, or t
  misc_feature (2295)..(2295): n is a, c, g, or t
  misc_feature (2298)..(2298): n is a, c, g, or t
  misc_feature (2322)..(2322): n is a, c, g, or t
  misc_feature (2330)..(2330): n is a, c, g, or t
  misc_feature (2333)..(2333): n is a, c, g, or t
  misc_feature (2346)..(2346): n is a, c, g, or t
  misc_feature (2367)..(2367): n is a, c, g, or t
  misc_feature (2381)..(2382): n is a, c, g, or t
  misc_feature (2414)..(2414): n is a, c, g, or t
  Probeset Number=SeqID_11121
ttttnnttttnnnnnnnnnnnnnnnttttnttttanttnntttcttttatctttccccttncatcgcctatgcttcctctngctccatacgtctattctnctacantctnacttnnntctcnacancgctcattcacgtcccctctgcatgccacacaagcgcgataagcagcggtctgcgtcgtattacatacatctacacagcggagctcctcttaatacgacagacacacatcagatcgtctcactgcgtcntaattnttatactagagatatcttattgcttanaattcactttctcattggtntatcacgcgccacaatgaaagaagtagatccagctgaccgaggatgataatccatcgtaatacgtcgtctagcacacanatcgctcactccgtcaactcagctcacacaatatngacactatcaatctctacacactctcatctantctattgtatatcatcctccacattnacttggttcagcaatattacactgtatgtatgctcttgatcacctgactgatccgtgactcgcacaaacactcactaagagaatactaagaacaaatatacattacacacatcaccgtatatcataaaatgtccgatcaaatnactcattacanccgctcagagcaccgagcactttgattnctttatcatacacacaccctaacgtatatctgtctcgttcactccatcatactctacactagtgtcttatgtcatccgctcacattctccctatctctctcactctcttcgtcgatactctctacatcgtatgcacagatgtctatatatcacatacgtcctctacatangatacagtaagcgtcagacgcatctaacnaaccattagtactgaggcgncagtactactaattatgatactacacactgtagactatcactgctatcgatgcctgcgtgagtctcgactcntaacacaggtggttatgccgcgcacaggtacatatagctatgtatgagtagtataattaatagtatacctgcgctcagtacantgataatcttataacagcgagtctgactatgataataatatagcgatatctgtgactacgactactgaatgcaagcacctactggtgatgcatgctgatactcactatctgcatacttacgagatcgttaacgtgcactacaatcatannatagatactgttgatgctcgtacgcacgcacgataatcgtacactanatagattggatgatagacgacaatgcagtagtacgtacgagatgacgagtgagttagattagatcagacacatacgccacgagcatcggagatgatcatgctgtatgtctctaactgtggctgtgagtatctagctcagtagtgtatagtcatcatgatgnctcagnnangtgacacntacgtnacgtcacttgacttcggncatagtcagacctgcacgacgctcatacactacatcgtacactacgtcagtgagatngtgatgnctgacgtagttgctgcgatgtcaggcgtcgctctaacactttactaatagatcacacacggtagtctcgtatngactangctgagntgagtgctacgctcgncatgtctagtaagttagacatagtgtcgcgtatctagntatagaagtgncatcagcgtactcgtagcgtgagtagacgnacgacgatattcgaagtatagtacagncttacgagnacatatatattaattcaggngatgagtggncataagatagaantgagtagtagacgtcatancatgtatatcantcacactgtacgcagnctnacgatnatcacacgactanatttcatatgcaatatgantcatcacgtacgtcgtacacantcaccagncacgngnctgatnaccgacgtcagtactnctnctgacgaatcgcntacgantcacgtcgatgactgctacgtatncagctatccgcagcgaagcctgacatcgtcgncgacaacatcgnagcgtcaatactgaatgatgactgatngagtcantatatgtcgttagctcgattcngcaacgactcaaaccactgtcatccantntgctgccaacgttaccacgactgtcgacgtagntgtnnncaanncgacgaccatgacnacgtnacattccatcngaaactactctacgcataagtcagcatcgactantaaanncannanngcagcagagaagcggatgcngacgangnacggcagtgtncaatnngatgccatcgtcatccgacagacgcnganccaactgcgntgcctgacnatnactacgcctactcccgatagatcnacgtgacngancgtcggtctgcanctgacgttccgtcgtcatacngtcactgctttccnnctacacgctactcctgacctatcgctattcgn

SEQ ID NO: 1343 - DNA, 486 bp, Glycine max
  Peptide Sequence Number=SeqID_6536
  Probeset Number=SeqID_11122
ctatcctcgcccccacaccccaccgcaccagccgcgccgccgcccgccgcaccccccctcccgatcgcgcgccccgcgaccgtgcgccgcgactcccccctgaagtttaaaatcgcgcaccccacaccgcggtgcgagaagaaagtggagagcgatgacgacatgagactgcgggacccttatgacaaaagaatatctcaggaggtagttggtgatcttttgtgtgaggggtttgaaagctatattttcaagatcataggtggcggcgagatgcggggcgccccaatgaagcaagaagtgcgaactcctgggtcctggtcgcctttctgcttcacatggcgcagaccttccttccttggatagggcaggcgtgtgggtgggcgagggaggaagtctgtccgtggttgctttgcaagccaagccctatctgttatcaacttggtgattgtcaggagggggaggatgagcctcctcgccttactgaca

SEQ ID NO: 1344 - DNA, 2065 bp, Glycine max
  misc_feature (1)..(4): n is a, c, g, or t
  misc_feature (20)..(21): n is a, c, g, or t
  misc_feature (31)..(31): n is a, c, g, or t
  misc_feature (42)..(43): n is a, c, g, or t
  misc_feature (46)..(46): n is a, c, g, or t
  misc_feature (57)..(57): n is a, c, g, or t
  misc_feature (60)..(60): n is a, c, g, or t
  misc_feature (73)..(74): n is a, c, g, or t
  misc_feature (77)..(77): n is a, c, g, or t
  misc_feature (114)..(114): n is a, c, g, or t
  misc_feature (120)..(120): n is a, c, g, or t
  misc_feature (126)..(126): n is a, c, g, or t
  misc_feature (230)..(230): n is a, c, g, or t
  misc_feature (312)..(312): n is a, c, g, or t
  misc_feature (314)..(315): n is a, c, g, or t
  misc_feature (349)..(349): n is a, c, g, or t
  misc_feature (363)..(364): n is a, c, g, or t
  misc_feature (367)..(367): n is a, c, g, or t
  misc_feature (408)..(409): n is a, c, g, or t
  misc_feature (431)..(431): n is a, c, g, or t
  misc_feature (460)..(460): n is a, c, g, or t
  misc_feature (469)..(469): n is a, c, g, or t
  misc_feature (501)..(501): n is a, c, g, or t
  misc_feature (515)..(515): n is a, c, g, or t
  misc_feature (545)..(545): n is a, c, g, or t
  misc_feature (551)..(551): n is a, c, g, or t
  misc_feature (553)..(553): n is a, c, g, or t
  misc_feature (584)..(584): n is a, c, g, or t
  misc_feature (613)..(613): n is a, c, g, or t
  misc_feature (642)..(642): n is a, c, g, or t
  misc_feature (653)..(654): n is a, c, g, or t
  misc_feature (690)..(690): n is a, c, g, or t
  misc_feature (696)..(697): n is a, c, g, or t
  misc_feature (728)..(728): n is a, c, g, or t
  misc_feature (737)..(737): n is a, c, g, or t
  misc_feature (745)..(745): n is a, c, g, or t
  misc_feature (748)..(748): n is a, c, g, or t
  misc_feature (773)..(773): n is a, c, g, or t
  misc_feature (780)..(781): n is a, c, g, or t
  misc_feature (806)..(806): n is a, c, g, or t
  misc_feature (831)..(831): n is a, c, g, or t
  misc_feature (865)..(865): n is a, c, g, or t
  misc_feature (869)..(869): n is a, c, g, or t
  misc_feature (950)..(950): n is a, c, g, or t
  misc_feature (952)..(952): n is a, c, g, or t
  misc_feature (1013)..(1013): n is a, c, g, or t
  misc_feature (1047)..(1047): n is a, c, g, or t
  misc_feature (1049)..(1049): n is a, c, g, or t
  misc_feature (1053)..(1053): n is a, c, g, or t
  misc_feature (1056)..(1056): n is a, c, g, or t
  misc_feature (1058)..(1058): n is a, c, g, or t
  misc_feature (1077)..(1077): n is a, c, g, or t
  misc_feature (1086)..(1087): n is a, c, g, or t
  misc_feature (1091)..(1091): n is a, c, g, or t
  misc_feature (1093)..(1093): n is a, c, g, or t
  misc_feature (1095)..(1096): n is a, c, g, or t
  misc_feature (1100)..(1100): n is a, c, g, or t
  misc_feature (1135)..(1135): n is a, c, g, or t
  misc_feature (1203)..(1203): n is a, c, g, or t
  misc_feature (1235)..(1235): n is a, c, g, or t
  misc_feature (1350)..(1350): n is a, c, g, or t
  misc_feature (1425)..(1425): n is a, c, g, or t
  misc_feature (1458)..(1458): n is a, c, g, or t
  misc_feature (1513)..(1513): n is a, c, g, or t
  misc_feature (1527)..(1527): n is a, c, g, or t
  misc_feature (1529)..(1529): n is a, c, g, or t
  misc_feature (1531)..(1531): n is a, c, g, or t
  misc_feature (1538)..(1539): n is a, c, g, or t
  misc_feature (1563)..(1563): n is a, c, g, or t
  misc_feature (1597)..(1597): n is a, c, g, or t
  misc_feature (1640)..(1640): n is a, c, g, or t
  misc_feature (1653)..(1653): n is a, c, g, or t
  misc_feature (1668)..(1668): n is a, c, g, or t
  misc_feature (1671)..(1671): n is a, c, g, or t
  misc_feature (1696)..(1696): n is a, c, g, or t
  misc_feature (1699)..(1699): n is a, c, g, or t
  misc_feature (1729)..(1729): n is a, c, g, or t
  misc_feature (1749)..(1749): n is a, c, g, or t
  misc_feature (1752)..(1752): n is a, c, g, or t
  misc_feature (1755)..(1755): n is a, c, g, or t
  misc_feature (1768)..(1768): n is a, c, g, or t
  misc_feature (1771)..(1771): n is a, c, g, or t
  misc_feature (1775)..(1775): n is a, c, g, or t
  misc_feature (1804)..(1804): n is a, c, g, or t
  misc_feature (1832)..(1832): n is a, c, g, or t
  misc_feature (1835)..(1835): n is a, c, g, or t
  misc_feature (1869)..(1869): n is a, c, g, or t
  misc_feature (1918)..(1918): n is a, c, g, or t
  misc_feature (1944)..(1944): n is a, c, g, or t
  misc_feature (1960)..(1960): n is a, c, g, or t
  misc_feature (1967)..(1967): n is a, c, g, or t
  misc_feature (1983)..(1983): n is a, c, g, or t
  misc_feature (1995)..(1995): n is a, c, g, or t
  misc_feature (2005)..(2005): n is a, c, g, or t
  misc_feature (2057)..(2057): n is a, c, g, or t
  Peptide Sequence Number=SeqID_6537
  Probeset Number=SeqID_11123
nnnnaaacctccttcccttnntctgatctcnctctcgttctnnctncctcttttccnccncacccggctgccnnccncgtcgctgcgggcgccctcttatttactctaccagantggtgngagagncgataggagtaggtcgtctactatgtcggagaggagaggcgatgcagacatccacaccttctctgcacgcgccgacacgaggcagaggaggatgcgctcttctntactcctatcataggcacagacactatacactcgtgccgtatgtcctgtctgtgttattgcatcgcactggtctgcggcgcntnnttttatctggcgtacttacgtctgttgtcttctntgtagtctggtggnntgngttggtgcgctctgctggcgcgccgagagtacgtcacgtcnncgcatttgcccacataggtctntctatagctcgcggcacgcggcgcgcgcntgtagcgtnagcgcaccatcgcctctcgcagtacgcgcgcnctgacacgcggcgnagcgctgacgtacgacgctgtagcgtacangcgagnanggatgctatgcgcggaggcgtcggagagtcnacttagcgcttacacctgatacacacatntcttctcctatcactacgacatcacagtnagtgtagacannatccagacgatgagatagtgcatgcgctacttagcntaatcnnttgatataaagtgctcgagatcgcacactanaatgagatntctgtctnctntgctggctccgctgatcgagctgtntcgctcnntcctctccctgtctggcgcgcgcgntcgtgtatgtatttgctctctacgntgtctgttcgctcgtgtgtcatgtctcgatgtantagntgaagtctgtgtcactgtctcccgtcgtcgactgcgttactcagagcgacagcctcctcacagcctgtctcgcaggctggncnctgtaatcaccgcgaggaatcatatacgacgcaccataacccggcgacatgagtagtatgncagtgagtgagaaatctgaagtgattagataatnantatnttngncataatataagattagaangataaatannaaananannaaanagacacaaacgcgaggtataaataaagacacaggntataacacctctagacgagttctatgtatacacgtatgatgttatatggcatgtatgcgtgtcgatgncgcgagctcgcgcgcgtcacccccgcaagcgngcgcgtgtacaatctatatgcttagatacgtatgtgacgtctgtgtgcgttggtatgggtggtcgtgtggtgtggttacgcatcgatccttctgcgcgtctgatgtggcatcacnctatctccgatcagtatgcgcgtcgtctcactttgtcctgctcgtgcgcgttcgagtaccgacgtctcgcgtgcnctatgcgtacgtgcatgacatcgttgagtcgantgcgacgtcgtgacagcacagagtatcgtgtcgtacgacgcatgtagtcgtacgntcgtactatcggcntncncacgcgnnctacgcgtcgcgttggtgagagcngcgtgtacgggcacgtcactatcacttacacagntgcaggctcgttctagatcgctgatactcgtcagctagtgatnatgctagcgtggncgcggtccgtaggtngantgtcagttccgtcgtgctgtctcgnagnctctcattccgacatgctgcgcgtcgtgcncgctgtgtgtcgactggtgncancancgttcgtgatganaangtgntctaatgtacagaacgaacgcacgactcntgagtgctacgcgccatcgtcactatgngcntggctgctacgggtcgatatcggtagctgatgangtcatagctcgctacggtgcgtgtcgatgtacttcgcggcagcgctcgntcgttgctcagtcgctgatcgagttnacgtcgagcgaagcancggactntgtcgctgcatgtgcnctgatcagcgtncgtgactgtngacgacgactcgcgtcgatcgcagtactcgtctgacgtactcgactagtgcngacatatg

SEQ ID NO: 1345 - DNA, 1158 bp, Glycine max
  misc_feature (1)..(22): n is a, c, g, or t
  misc_feature (1104)..(1104): n is a, c, g, or t
  misc_feature (1158)..(1158): n is a, c, g, or t
  Peptide Sequence Number=SeqID_6538
  Probeset Number=SeqID_11124
nnnnnnnnnnnnnnnnnnnnnncggctccgctacgcgaccccaccgcccggggaaagtagaattgtagaccgcagacgccccagatcagatcctctctcttcaattcaacttcaagccaagccaagcaacatggctcaacaacaggaggacgaaatggagtatgttgctgatgataatgaaatggcggaagtagaagatgacatgtatttccgtggtagagtgtttggtgattcagagtccgaatcagatgacgatgatgaatatgactccatggaaaatcggatgacagatacctctgctgcagaagccaggaaaggaaaggatatccaaggtattccttgggatagacttagcattagtcgtgagaagtatagacaaactagactagagcagtacaagaactatgaaaatataccgcaatcaggcgaacagtcagaaaaggaatgcacaccaacacatagaggaggaaagtattatgatttctggcaaaacactcgatctgtgaaatcaacaatacttcatttccaattgaggaacttggtttgggcaacatcaaagcatgatgcatatcttgtttcgagttactcaattatacactggtcgtctttaaattccaagagatctgaaatcctgaatgtatcagggcatgtagctccatgtgagaaacatcctggaagccttttggaaggatttactcagacacagattagtacactggctgtgcgggataagttgttggattgccgggggttttcaaggagaacttatttgcaagtatgtagatcgacctggggttagcttttgttcccgaactacttatgaggacaatgcaatcacaaatgctgtggagatttatgagcacccaaggtattttttctcttctttcttattatccttttgctagatttttttttattcctaaattgttgatatgatgttagcaatcactgtgcacaaccctcaaatagggcttgttactaactgttgattaatcaatcagtggagctgttcatttcatggcttcaaacaatgactctggagttagagactttgatattgagagatgtcagctttcaaagcatttctgctttccttggccagtnaatgtaagtgttttcacttgattttccatgttttaaattaattatgacattttn

SEQ ID NO: 1346 - DNA, 445 bp, Glycine max
  misc_feature (416)..(416): n is a, c, g, or t
  Peptide Sequence Number=SeqID_6539
  Probeset Number=SeqID_11125
atatatcacaaaatgaataattttctagcttttctgttagttattactatgtgttatggattgaatgaagcttgcaaaactagccgcatagtaatttctaacggcatctgggaaggtattcctcttgaaatccattgttattcctgggggcgagagacccgtgattggggaacacaaactataccatacaatagtagtgttagttttgagtttgtcgctgttctgaataaaaaaagaagaacaaaatatgtatgtgacttatggtaccaggatgcaatagaaccttatcttaaaataaaacattatcctatgcttgaagtatttcgagcaggccatacaagaaaatgtggccaatttcgtgaatggggtacaggaaagcatgggatttatttcagaagaaagtattctcaacggtngggatgggcgctttactggtttacgctat

SEQ ID NO: 1347 - DNA, 1661 bp, Glycine max
  misc_feature (10)..(11): n is a, c, g, or t
  misc_feature (119)..(119): n is a, c, g, or t
  misc_feature (121)..(124): n is a, c, g, or t
  misc_feature (132)..(132): n is a, c, g, or t
  misc_feature (134)..(136): n is a, c, g, or t
  misc_feature (273)..(273): n is a, c, g, or t
  misc_feature (277)..(277): n is a, c, g, or t
  misc_feature (299)..(299): n is a, c, g, or t
  misc_feature (480)..(480): n is a, c, g, or t
  misc_feature (566)..(566): n is a, c, g, or t
  misc_feature (568)..(568): n is a, c, g, or t
  misc_feature (574)..(574): n is a, c, g, or t
  misc_feature (716)..(716): n is a, c, g, or t
  misc_feature (733)..(733): n is a, c, g, or t
  misc_feature (761)..(761): n is a, c, g, or t
  misc_feature (1008)..(1008): n is a, c, g, or t
  misc_feature (1011)..(1011): n is a, c, g, or t
  misc_feature (1042)..(1042): n is a, c, g, or t
  misc_feature (1088)..(1088): n is a, c, g, or t
  misc_feature (1093)..(1093): n is a, c, g, or t
  misc_feature (1095)..(1095): n is a, c, g, or t
  misc_feature (1132)..(1132): n is a, c, g, or t
  misc_feature (1143)..(1143): n is a, c, g, or t
  misc_feature (1161)..(1161): n is a, c, g, or t
  misc_feature (1178)..(1178): n is a, c, g, or t
  misc_feature (1206)..(1206): n is a, c, g, or t
  misc_feature (1228)..(1228): n is a, c, g, or t
  misc_feature (1230)..(1230): n is a, c, g, or t
  misc_feature (1254)..(1254): n is a, c, g, or t
  misc_feature (1269)..(1269): n is a, c, g, or t
  misc_feature (1353)..(1353): n is a, c, g, or t
  misc_feature (1512)..(1512): n is a, c, g, or t
  misc_feature (1530)..(1530): n is a, c, g, or t
  misc_feature (1543)..(1543): n is a, c, g, or t
  misc_feature (1576)..(1576): n is a, c, g, or t
  misc_feature (1587)..(1587): n is a, c, g, or t
  misc_feature (1602)..(1602): n is a, c, g, or t
  misc_feature (1621)..(1621): n is a, c, g, or t
  misc_feature (1644)..(1644): n is a, c, g, or t
  misc_feature (1651)..(1651): n is a, c, g, or t
  misc_feature (1661)..(1661): n is a, c, g, or t
  Peptide Sequence Number=SeqID_6540
  Probeset Number=SeqID_11126
ttataatatnnaatttttaacgatgttgcgtttatacatatattctaatatcttctatatcaaagtcacgcaacaagagctacgttatgatagtcagccgtaaaaaatcgggaggaggnannnnaccgcccncnnnccccgcgtttatggtaacttcagtgcgttcacggaagtatgtggtaataccactacctaaatactcgtgatgtgattttcaccacacgcgacgcatacatgctgcagcagacgaagtaaagacggtgcgagagggtntgtnggctgacatgataggtatcgtncgagggaacactgcgtgcgctctatatgttgtataggttattgacgatatgtgctaataagtatatatataaatattttatgagcggagtaggatgatgtacattctttcacacactcatatacataatatatacagtaagaatatgttgtagagagtgtccacacacacacatatggatnttatagatgggagatgacgctaatagtataacctcacatacaaatattataattaataaatattaaatatattatatatcgagtananaaaaantatataagtaaagactgactatcatatatatataatatgatcatatacatagatatcatatgtgctacatcgacgcaacgtgcacacactcaatcataaagacgatagagtagattcgcgagtatgccctcctggattgtanatattggtggtagtagntaatatactatcatgcaatacatataancatatgatagatcatagcatacagactcagatcactcacacatcgacatagagaatgctgataagatatatgtagactatagctatataacttctaccatcttcttagacactcagtattctaagttgtagagcactctaaaacatagcgcgctcgatcatcatcgttatgcctgaacctactatataatgaatgacaatattatacgccttcatagtgtagtgcgcagtagtggaccccccacctncgnctgctatgtcgtgtacgttgtctactcatcncatatcatgaggatggtgtgtgtgtggaggtgtgatgaccattagnatgananacagacacaccctccatacatatgatgtcgtctatgngtagtagttgntgatagactcatttcttntactcactattttcacntgaatatttagttatgagacaacttganatctcttctcctctctcccccntnccgtcgtcatccacgctgcattantcgtagatacattantacacagtaattggaatactacggatcgttatgtcagcgctatgcattgactatacgacatgcgctcacacccacgcgaatcantcatctatgatagtcgtgagtgagcactgatgtactcgtcacatatgtatgatatgcatgatgaagctactgagaagaagtatacaagccgcgtgcgagtacgagacgaatcgactgtgcgccacaacacagatatccgacgtactaggatgatggatncggtaacatccctcgatngatgagtgatganggtcctaacatcatcacgtacatactgatacantgatctctctntcacctagcctctcngctcgatcttcgtatactntgctacgacatcaaactctcgangatcgtncgtctcatcn

SEQ ID NO: 1348 - DNA, 417 bp, Glycine max
  Probeset Number=SeqID_11127
gaaaagtcgatcgggaggaagaagaaaaaaaatcaacggccgattcttacgattcatctccgccgagcagatctgtgaattgattctcggcttctcgcgatggctgcccctcctgctagagcccgtgctgattacgattacctcatcaaacttctcttgatcggagacagcggtgtgggtaaaagttgcctccttttacgtttctctgatggctcattcaccaccagtttcattacaaccattggtattgatttcaagatacggactattgagctggacgggaagagaatcaagctgcagatctgggatactgctggacaggagcggttcaggactatcacaactgcttactaccgtggagccatgggcatcttgcttgtgtatgatgtcactgatgaatcatctttcaacaatatc

SEQ ID NO: 1349 - DNA, 1869 bp, Glycine max
  misc_feature (23)..(23): n is a, c, g, or t
  misc_feature (36)..(36): n is a, c, g, or t
  misc_feature (88)..(88): n is a, c, g, or t
  misc_feature (172)..(173): n is a, c, g, or t
  misc_feature (236)..(239): n is a, c, g, or t
  misc_feature (242)..(243): n is a, c, g, or t
  misc_feature (245)..(245): n is a, c, g, or t
  misc_feature (393)..(393): n is a, c, g, or t
  misc_feature (439)..(439): n is a, c, g, or t
  misc_feature (494)..(494): n is a, c, g, or t
  misc_feature (586)..(586): n is a, c, g, or t
  misc_feature (590)..(590): n is a, c, g, or t
  misc_feature (773)..(773): n is a, c, g, or t
  misc_feature (887)..(887): n is a, c, g, or t
  misc_feature (910)..(910): n is a, c, g, or t
  misc_feature (922)..(922): n is a, c, g, or t
  misc_feature (974)..(974): n is a, c, g, or t
  misc_feature (1074)..(1074): n is a, c, g, or t
  misc_feature (1086)..(1086): n is a, c, g, or t
  misc_feature (1092)..(1092): n is a, c, g, or t
  misc_feature (1153)..(1153): n is a, c, g, or t
  misc_feature (1170)..(1170): n is a, c, g, or t
  misc_feature (1221)..(1221): n is a, c, g, or t
  misc_feature (1274)..(1274): n is a, c, g, or t
  misc_feature (1284)..(1284): n is a, c, g, or t
  misc_feature (1353)..(1353): n is a, c, g, or t
  misc_feature (1517)..(1517): n is a, c, g, or t
  misc_feature (1524)..(1524): n is a, c, g, or t
  misc_feature (1571)..(1571): n is a, c, g, or t
  misc_feature (1600)..(1600): n is a, c, g, or t
  misc_feature (1644)..(1644): n is a, c, g, or t
  misc_feature (1647)..(1647): n is a, c, g, or t
  misc_feature (1740)..(1740): n is a, c, g, or t
  misc_feature (1751)..(1751): n is a, c, g, or t
  misc_feature (1776)..(1776): n is a, c, g, or t
  misc_feature (1833)..(1833): n is a, c, g, or t
  misc_feature (1869)..(1869): n is a, c, g, or t
  Peptide Sequence Number=SeqID_6541
  Probeset Number=SeqID_11128
taagcgcttttagtacgtattanttaaaataaatantaatgatttgtttctcttgctctgcttttctttccggtctggtctttgattnctctttttttatattgtatattgtttatattttatgtagtgtaagtatcacctatctattatttattattgattatgagaatannacaacccgacgacacctggcgtggacatactatcaccaacaacactagaaacagagatatatnnnntgnngntctattgctccgcttaacatcactatgcactatgcaacttgcgatcgctgagacctagctgtccatcttatgtgcgagctatgtccaccgcccattgttatgacttgtgatgtagatgcatctgcgatagttcctactttcctctccncttaagtccgatcataatcgggttgatgtacacaacgcaaacaganatgactcgccacgaatacaatataggcgagatgtgtgtgtatcatattatgacancacaaaaagaaatcgacataaagtgagggagagaaaatagacacagacgcaaagccaacaacacacacgaacaacataatatttctcacacntacncactcccatccttcccgatcctattatgtcgccgtgcttactgctgatgtatctatacggttgatgatgggattgttgtgtgtctgatgtacgtgatgttgtctctcgtctacgtgtcgcgctctcgtggtgtgtttgagttggttcgtggtggtcttacgtgtgacatgcgataataataancgaacatgcgatgtattgtattatctcgatgtgacatgtacatactgcaagtagtacacgatcgcatacgcgatagcgtatgtaagccgtgcgtagctagatgatgtgattctnatgttatacactattgtgatgtnatgatctcgagnataatcacagactatcgcctagcgatcgcgcttaccaatatgcacgttacangtatcatgtattacttatgtatatgttgtgagtctcgatatgtcttactatcactaccgctctctctctctagttaattgtcgatatctcgatcgctaantatcagaactgncgtttnatgatcctgtagcatcgagatatgatgagtgaatatgcgcgtcgtgtgtgtgtcggtttgntgtgtgctgacacatgnacgcagtgagtgatgtatccactgttacatatacgacacatcgagtcgcanagcactgagtagcgctcgagatgcgcacataacccgacatacataatcatacnctgcatctantactcatatgagatacaagtaattcgtctcgtgtgacgactactgcacgagtactgatgagaagggtgngctggaagcacgctgagacgtcgagcatgatacggtcgtgctcatcgtatgcactatgatcgtctatcacttcgttatttcggttatcatcacgatgaagctgcatcgacgtagatccgatcatgtgctatgtcgatgcgactgagatatagtagtcagctttngtatagntccgtgatgctagcgtatatactgacgtcatagagcagttaagttgntgtcgcgctgtatacattagtctatatantttcgtgatgtggtttactgtattatagtatatgcaactttctngtnacctacgtgtcgtgtgtgtgatgactcgtaatgctcgttagtctccactctatttatcttaacacgcaactacgctactcgtcagtacactcncttgcgggccnctcgccacggcgatactcactatcnacacgcagagcgagtactgctgctcgtgctgttagttgatcctttgtcgtagatcgntgagtcatcgtcgcatgactatcactacgtgaatgn

SEQ ID NO: 1350 - DNA, 1340 bp, Glycine max
  misc_feature (17)..(17): n is a, c, g, or t
  misc_feature (25)..(25): n is a, c, g, or t
  misc_feature (79)..(79): n is a, c, g, or t
  misc_feature (168)..(168): n is a, c, g, or t
  misc_feature (201)..(201): n is a, c, g, or t
  misc_feature (208)..(208): n is a, c, g, or t
  misc_feature (210)..(210): n is a, c, g, or t
  misc_feature (268)..(268): n is a, c, g, or t
  misc_feature (309)..(309): n is a, c, g, or t
  misc_feature (355)..(355): n is a, c, g, or t
  misc_feature (450)..(450): n is a, c, g, or t
  misc_feature (551)..(551): n is a, c, g, or t
  misc_feature (1299)..(1299): n is a, c, g, or t
  misc_feature (1317)..(1318): n is a, c, g, or t
  misc_feature (1323)..(1323): n is a, c, g, or t
  misc_feature (1327)..(1328): n is a, c, g, or t
  misc_feature (1332)..(1333): n is a, c, g, or t
  misc_feature (1338)..(1340): n is a, c, g, or t
  Probeset Number=SeqID_11129
ctgcatatcatctccgncctgtcgnacgagttttatcattgtgtgcttatgtgagccatatcagcgagcgctgccgcancccgtattgtctccttcgaccttatctcctcgctcgtcccgcttccgcgcaatgtacgtctatcgctcgcccagcggcattcaagtctngtgattctcgtatctacactagcgacgcaacangtgttangnaggtatcctcgttcgtcgcttcctctcggtcggccgtcgccgccgccacctgcgtctntctcgttcctgtatcgctcgctgcgtgatcatcatgctcantacctcgccgcggcgacagtcattcatatcataccttggcgcattncggctcccactccatctcactgaatacggagcattctgtgactccgccctctccgctctacttgtgccacccgcgtccactccatattccgctantgcttcgttgtgtgtctcctattcgttacatagatgatgcatggcgcgcgctctactactagaccgatgttgtataaagcaagaaacgcccgcccgccctntctctcacgccccctcgcacgcgctctcctccattccttatcgtcattatgtcaagcgacccgcgtcgtcccgtcttttcatgtcagtgcatcgcacggactaggtgttgtggcgatcgtcgtcagtctctaccgcgcggccgcacgtcgccccccgcgcctctcagtctcccattcggttccgtcgtgcgtgatcacgcgtcacagtccctcgacgtcggtgttatgatcggatcgtcgtgtatcttcgcctcgctctccgtcgcgtcccttccgctccaatctacgctcatattaaaataatatggtacccgtcggaattatttcctaccccttatattatcttgcctatcgtgccgctgaggcgcctctccttatgtgccctatcgtgtttcttcgcaccacttcccaactcaaccgggagcctacggcgacgatctttgttgagcgcgagggaacagcctactcccccacccccgtccaccgcccccccacagtactatactttaccgctcttcgccctctacctgccttctttttgagcactcgtctacattatctaagggtctccccgtcatctccgcttcgctttttcccgtactcagggatgcttcctacgcctaatggctgctgcgtgctgaatcttcgtggcagtccgcgggggtattccatctactttctagatgtcgcctctcccacccgcggtggatgctcccagctttgaaatgccaccgccccctcctccccntcctcccaccccgccccnnccccncccnntttnnttttnnn

SEQ ID NO: 1351 - DNA, 1425 bp, Glycine max
  misc_feature (1)..(17): n is a, c, g, or t
  misc_feature (27)..(37): n is a, c, g, or t
  misc_feature (48)..(48): n is a, c, g, or t
  misc_feature (50)..(52): n is a, c, g, or t
  misc_feature (58)..(58): n is a, c, g, or t
  misc_feature (61)..(61): n is a, c, g, or t
  misc_feature (64)..(64): n is a, c, g, or t
  misc_feature (67)..(68): n is a, c, g, or t
  misc_feature (72)..(72): n is a, c, g, or t
  misc_feature (76)..(76): n is a, c, g, or t
  misc_feature (88)..(89): n is a, c, g, or t
  misc_feature (91)..(91): n is a, c, g, or t
  misc_feature (93)..(93): n is a, c, g, or t
  misc_feature (144)..(144): n is a, c, g, or t
  misc_feature (211)..(211): n is a, c, g, or t
  misc_feature (276)..(276): n is a, c, g, or t
  misc_feature (278)..(278): n is a, c, g, or t
  misc_feature (310)..(310): n is a, c, g, or t
  misc_feature (318)..(318): n is a, c, g, or t
  misc_feature (335)..(335): n is a, c, g, or t
  misc_feature (339)..(340): n is a, c, g, or t
  misc_feature (345)..(345): n is a, c, g, or t
  misc_feature (396)..(396): n is a, c, g, or t
  misc_feature (443)..(443): n is a, c, g, or t
  misc_feature (476)..(476): n is a, c, g, or t
  misc_feature (681)..(681): n is a, c, g, or t
  misc_feature (757)..(757): n is a, c, g, or t
  misc_feature (770)..(770): n is a, c, g, or t
  misc_feature (815)..(815): n is a, c, g, or t
  misc_feature (821)..(821): n is a, c, g, or t
  misc_feature (902)..(902): n is a, c, g, or t
  misc_feature (952)..(952): n is a, c, g, or t
  misc_feature (957)..(957): n is a, c, g, or t
  misc_feature (976)..(976): n is a, c, g, or t
  misc_feature (994)..(994): n is a, c, g, or t
  misc_feature (1035)..(1035): n is a, c, g, or t
  misc_feature (1046)..(1046): n is a, c, g, or t
  misc_feature (1061)..(1061): n is a, c, g, or t
  misc_feature (1214)..(1214): n is a, c, g, or t
  misc_feature (1316)..(1316): n is a, c, g, or t
  misc_feature (1344)..(1344): n is a, c, g, or t
  misc_feature (1384)..(1384): n is a, c, g, or t
  misc_feature (1387)..(1387): n is a, c, g, or t
  misc_feature (1411)..(1411): n is a, c, g, or t
  misc_feature (1425)..(1425): n is a, c, g, or t
  Peptide Sequence Number=SeqID_6542
  Probeset Number=SeqID_11130
nnnnnnnnnnnnnnnnncccccccccnnnnnnnnnnncgcaacaaaanannncgcggncancanccnnccanaacnacccacaacccnncncncctgacgtgggcggcgagggccccacgagggggtgatgatggggggagggngactcctatgtggaaaatgtagtagagatacaccccccgcgggagaactcgcagggagggtattctncacaacacaattctcgctctctctccttctcatctcgcatcgtccattacacgcctacaaccaangngcacacggcaagcactcgcggcaagaataaanagacgagngagggcgtgggtgggangatnngcgcntacggcgaagatgtgaacagacgatgagcgagcactgctgcctcggcacgncgcgctcgctgcaccggatgggggttagaatgaggagagaatgaggngttgtgtctgagtcaacgacgcgatagcgcaantggagagtggtggggggcgaaagatatgatgatgaggatgacgctaccctcctcgtcaaacatattatacttgtgtctctagtgaagccgacgtgacaatgagaattacgcagccacaacactaaacgggcgcaaccagtgtgcgcggaacaaaataataccatggtgatgcgcacatacgatagcggtgcagacggactatacngagcgtgctgatgctaacagttagctgcgtgtgcggattgagtgtgagagtgcagtagtgtagagcgtcgaggaangcactcgcttgantacgtgtgctcttcgtactcgtcacgtccaaacacaaacgcgaantgtcgngtcttgacaatcgtaacgatcatagactgtagccgcgcaatatagaaacagtggtaacgcgtctcgtgtgtcggttaaaantactgctggcgggtgaaagcgactagtctagtgtggcgcccaacacaccnccgcngtgctgtagaagagaagancggaccacgagcacgaanagatatagcgacaccatcgcctcgttgatgcgcggacgacncgcaccgcgcncacgcgacacgcgcnctcccgctgcctctcacggcgctgcctcgctacacacaccggtacacctgcgccgcttattgatacttccgcgcaccactcacccgcatcgcgcaccgaccgcaacgtcctccgtctcccgatcagactaccgacaagcataccagtgcaggnaggggcaacagcggaaccaatactagcacttaggatgaacgcgacgccgcagcacatttacacacggcagatcagcctcacgaacatttaattagatctctnattacgtctacagtatgctaaaacttanctgtatctgttcacatcgcgccgcctggtatttacaaagnaanagaaagagacgcggcgtatacatnactaatagtacatn

SEQ ID NO: 1352 - DNA, 1687 bp, Glycine max
  misc_feature (1)..(1): n is a, c, g, or t
  misc_feature (12)..(12): n is a, c, g, or t
  misc_feature (48)..(48): n is a, c, g, or t
  misc_feature (51)..(51): n is a, c, g, or t
  misc_feature (72)..(72): n is a, c, g, or t
  misc_feature (75)..(75): n is a, c, g, or t
  misc_feature (103)..(103): n is a, c, g, or t
  misc_feature (136)..(136): n is a, c, g, or t
  misc_feature (159)..(159): n is a, c, g, or t
  misc_feature (171)..(171): n is a, c, g, or t
  misc_feature (182)..(182): n is a, c, g, or t
  misc_feature (184)..(184): n is a, c, g, or t
  misc_feature (319)..(319): n is a, c, g, or t
  misc_feature (327)..(327): n is a, c, g, or t
  misc_feature (336)..(336): n is a, c, g, or t
  misc_feature (344)..(344): n is a, c, g, or t
  misc_feature (351)..(351): n is a, c, g, or t
  misc_feature (421)..(421): n is a, c, g, or t
  misc_feature (425)..(425): n is a, c, g, or t
  misc_feature (427)..(427): n is a, c, g, or t
  misc_feature (437)..(437): n is a, c, g, or t
  misc_feature (451)..(451): n is a, c, g, or t
  misc_feature (941)..(941): n is a, c, g, or t
  misc_feature (1261)..(1261): n is a, c, g, or t
  misc_feature (1362)..(1362): n is a, c, g, or t
  misc_feature (1369)..(1369): n is a, c, g, or t
  Probeset Number=SeqID_11131
ncatcgcgacgnctactgtctactgcgctgctgacgcatcactacctnacnctgcgacacgagcgcacagantantcgatgatcgactcgataaactacaatnctgtctatgagtcgtccgacgtcatgacgacgnctacgtagcatctactgtctatncgatatgccgtngctgtacgcantncgcagctcgcgtactcttcatacggactgacgcgcgcgatcgcggtcgtcgacaccgacgacgacggacgcgtgagtcgctcgcatgtcactcactgcacatcactagcagaagacggacgacggacacggccantcgacaantgagtcganatgcgtanacgatantcgtgcgtcgcgccgcgagtatatcgtgcggcgatcgacgatacagaaggtgtctgtaacgtacgatccncgangntaacactagnagtcggcctcggcnaagagagcagagatagatcgcgtgtgcgcatagatgacaacgagagcgaagacgagcgcgcatcacttacgaccgtcgcgcgtcgaagaactcatcatactgacgagacgcgtcgtacaagactgaacgcgcctggtgactgtcgcgacgcggacgctgcatagtcactagatctctcaccaccgcagtcgctgaaggcattcgccgagagcagaacgacgacgcctgcacactggtaagtacgccgcgcgcacaggcatcgatggagcgaacgaggctatagagtgcgcctcggcgtctcagttcgcgcatcagcacgcagtcagcacagcgcagcgggagctgtagtacgcgcgctcagcacacgataactggtagctatcatcactgcacacgtcgacgcgaccgcacgagagcggcgcagatctgagttgaatggcgtccgaacgatgcgccgctgcgctctgcgcccatcgcgtggggatctccngacgagcgcgagctggagaacgtggtcgcatacacggctatacgtcggtatctgagactgtcgtgcgccgtctgtcgtgatagagtcgagcagcgctctcggtcgctacgcaacacatacattgacacgctgatcgcgtacgttgttcctaccactgctcctaccctctctcatttcgtctcgacgcgtctataccgcacgacgacagctacggacgcgactcgcgggatgatagaggtgacaacgtctaccccgtatgcttacgccgcgctcgatccgcgcgtcaccgagcacgtccgtagcaccaccgccgcgcacanaatacgcacgctcgtgcagcggcgcgcgaccctcacggtccactctgtcttcattctataccactacgcctacgcatcaagaagagagatcagcatattanaatcctnagatgtgatatattgacgttaagtgtgattatatacatcagtgtgtagtctccatgtctccgatcttcaataacctatgtcagagcagtattctctgtgtagtctgcgcatacagcgccaccgagacccacctaccatcgatactagacgtgcggagcggcccacactcgtccagaagacggactcctcctccgacaccgccgtgcataccacccggcgcgcaccgcacacctgtatctaacacgtccatcggccgtcgcgtgactatatatgcggttctgcgcgtgacgattatacttgtaggtgtcttactccaca

SEQ ID NO: 1353 - DNA, 653 bp, Glycine max
  misc_feature (220)..(224): n is a, c, g, or t
  misc_feature (544)..(548): n is a, c, g, or t
  Peptide Sequence Number=SeqID_6543
  Probeset Number=SeqID_11132
cttgccatgcctgcagctccgatggacactctgataatgatgaacagtccataaagacattgccatgcaaattcttcaaataacataagtacagtataccaagcaatcaaggatccgttcaccacagctctgcatagaaactctaacgatcaactactattagaactatctgttacctaaaatgctattgaacaagtcatcatggagattcaaaatatcnnnnngtctgagcctccagcccttttggacaaatgcaaaccacatttggcccaattccttgcaggacttgttcacatggaaatttccgaaagtgatgatgatgctaagagctgtgctgtgtgggaattatatcacttgctcttgaaagagcggcactgggcactcagtcacttggcaataactgcatttggatattttgcttctcatactaggtgcaataagctatggagatttgttccagaagatgcagcgctttcatatgatacagtttcaggagtggagtcagatcagcaaagatttatggttgagtttggaaaatttcttnnnnnggaaatagctcttcttacacttgaaccaagccctgaacagcttgatcttctagggagagaaggttttgtgttgaaacagatggtccaaaagatttcagccactgg

SEQ ID NO: 1354 - DNA, 614 bp, Glycine max
  misc_feature (195)..(195): n is a, c, g, or t
  misc_feature (197)..(197): n is a, c, g, or t
  misc_feature (210)..(212): n is a, c, g, or t
  misc_feature (214)..(215): n is a, c, g, or t
  misc_feature (220)..(221): n is a, c, g, or t
  misc_feature (223)..(224): n is a, c, g, or t
  misc_feature (226)..(226): n is a, c, g, or t
  misc_feature (228)..(228): n is a, c, g, or t
  misc_feature (232)..(234): n is a, c, g, or t
  misc_feature (237)..(240): n is a, c, g, or t
  misc_feature (242)..(261): n is a, c, g, or t
  misc_feature (263)..(269): n is a, c, g, or t
  misc_feature (271)..(271): n is a, c, g, or t
  misc_feature (273)..(273): n is a, c, g, or t
  misc_feature (275)..(275): n is a, c, g, or t
  misc_feature (277)..(279): n is a, c, g, or t
  misc_feature (281)..(284): n is a, c, g, or t
  misc_feature (288)..(288): n is a, c, g, or t
  misc_feature (306)..(306): n is a, c, g, or t
  misc_feature (316)..(317): n is a, c, g, or t
  misc_feature (354)..(354): n is a, c, g, or t
  misc_feature (376)..(378): n is a, c, g, or t
  misc_feature (576)..(576): n is a, c, g, or t
  misc_feature (611)..(611): n is a, c, g, or t
  Peptide Sequence Number=SeqID_6624
  Probeset Number=SeqID_11133
accctttccagttccaactttattgtgtttacccaacgccctaagatgggccaagcgcttgagagggaagaaagatcggatgatggagagagagacccgtttttgttaggaaaagaaaccttttccatcgtcgaggtgatatttgtcgtcgcgaaattttcgtgaatcggaagagcccccgcccccccccccccncnctccccccccgcnnncnnccccnncnncncncccnnnccnnnngnnnnnnnnnnnnnnnnnnnncnnnnnnncncncncnnncnnnncccncccccccccccccccccncccccccccnncgccccccccgcccccgcccccccccccccccggccnccgcccggcgcccggccccccnnncccccccccccccccccgcccccccccccccccccgcccccccccccccccccccccccccccgcgcccccccgcgcccccccccccccccccccccccgcccccccccccccccccccgcccccccccccccccccccccccccccccccccccccccccccccccccccccccccccccccgccccccccccccgnccgccccccccccgcgccccggccccccccccggncgc

SEQ ID NO: 1355 - DNA, 1826 bp, Glycine max
  misc_feature (91)..(91): n is a, c, g, or t
  misc_feature (164)..(164): n is a, c, g, or t
  misc_feature (181)..(181): n is a, c, g, or t
  misc_feature (196)..(196): n is a, c, g, or t
  misc_feature (217)..(217): n is a, c, g, or t
  misc_feature (221)..(221): n is a, c, g, or t
  misc_feature (258)..(258): n is a, c, g, or t
  misc_feature (275)..(275): n is a, c, g, or t
  misc_feature (283)..(283): n is a, c, g, or t
  misc_feature (292)..(292): n is a, c, g, or t
  misc_feature (313)..(313): n is a, c, g, or t
  misc_feature (337)..(337): n is a, c, g, or t
  misc_feature (343)..(343): n is a, c, g, or t
  misc_feature (345)..(345): n is a, c, g, or t
  misc_feature (395)..(395): n is a, c, g, or t
  misc_feature (409)..(409): n is a, c, g, or t
  misc_feature (417)..(417): n is a, c, g, or t
  misc_feature (427)..(427): n is a, c, g, or t
  misc_feature (452)..(452): n is a, c, g, or t
  misc_feature (465)..(465): n is a, c, g, or t
  misc_feature (470)..(470): n is a, c, g, or t
  misc_feature (501)..(501): n is a, c, g, or t
  misc_feature (506)..(506): n is a, c, g, or t
  misc_feature (516)..(516): n is a, c, g, or t
  misc_feature (561)..(561): n is a, c, g, or t
  misc_feature (566)..(566): n is a, c, g, or t
  misc_feature (590)..(590): n is a, c, g, or t
  misc_feature (599)..(599): n is a, c, g, or t
  misc_feature (626)..(626): n is a, c, g, or t
  misc_feature (642)..(642): n is a, c, g, or t
  misc_feature (659)..(659): n is a, c, g, or t
  misc_feature (678)..(678): n is a, c, g, or t
  misc_feature (692)..(692): n is a, c, g, or t
  misc_feature (700)..(700): n is a, c, g, or t
  misc_feature (721)..(721): n is a, c, g, or t
  misc_feature (727)..(727): n is a, c, g, or t
  misc_feature (748)..(748): n is a, c, g, or t
  misc_feature (766)..(766): n is a, c, g, or t
  misc_feature (795)..(795): n is a, c, g, or t
  misc_feature (802)..(802): n is a, c, g, or t
  misc_feature (845)..(845): n is a, c, g, or t
  misc_feature (891)..(891): n is a, c, g, or t
  misc_feature (893)..(893): n is a, c, g, or t
  misc_feature (905)..(905): n is a, c, g, or t
  misc_feature (989)..(989): n is a, c, g, or t
  misc_feature (1095)..(1095): n is a, c, g, or t
  misc_feature (1194)..(1194): n is a, c, g, or t
  misc_feature (1241)..(1241): n is a, c, g, or t
  misc_feature (1365)..(1365): n is a, c, g, or t
  misc_feature (1533)..(1533): n is a, c, g, or t
  misc_feature (1535)..(1535): n is a, c, g, or t
  misc_feature (1617)..(1618): n is a, c, g, or t
  misc_feature (1652)..(1652): n is a, c, g, or t
  misc_feature (1660)..(1660): n is a, c, g, or t
  misc_feature (1677)..(1677): n is a, c, g, or t
  misc_feature (1697)..(1697): n is a, c, g, or t
  misc_feature (1734)..(1734): n is a, c, g, or t
  misc_feature (1795)..(1795): n is a, c, g, or t
  Probeset Number=SeqID_11134
cgttctagatcgattgcatgttcgtcccatgtatgatgtatagtgactgatgtcgcagtgagtatgatgagatgtcggtcagcttgcgatntgatatgtgatactgtgtgatgcctacaccgacagccacgctcaagacaggtgtgactcaggtatgtcgtctntctgtggcattgtatanttttagttctactcntgtctcggtgtgtctatctcncgcntatcgtgtagtcacttctatcattgtccacacgtgtntacgtctcatcagtggntatcgtcnaccgcacgntaacgcgcctacgacgcgcgnatacgtatctgttgtcgacgacgngaatanantctcagtgtcaggtccctggattcgttttgagacgcgactacgctctagnagtgctcataccanacacaccnagcaatcgtncgcatagtacatatcgatctgtatnggtcgacgccacngcacncgtcagcgtcgacactcagcgcgcgacacgnacgangcagtcggantactgttacacagctgtgtgatcgatcgatgcgtcatatatgtcngcatncgtcgatgtctgtagctgcaagcntgctagctntacatgtttagctcatacgtcagtgtnacgatgcatgatcgantcagagcgcaggacgtncgagtagtagtgtgagtgncgagctagcgtcgngtgtcctnaacgtcagaagacgccgtacnatacantgtcagcagtagcgcgctctnatgttgaaccatcgctgncatctgctgctcctaccatgtatctgtcntcatcanagtctatcagcagcgagcaaggtcgggtagtgggggggtgagnagatatatctaatcctatgatgtgcctattgatactctctcctctnantatatgaatatnaatcatccgtcatctgtatcacaaggtgtagtcgtagtcggcatgatagcgtctgacgcactatttatattaatctatcacgcncttaacacatcatcacatatgtgtctgcgcggtgtcgagtggagtacgtgacgctcagtgagatacgcaagatgcgcagcgcatatatatacactcccccctacgnacattcagtagagcgtcgcacgctgtctatatgttgttcatatcacctgcgcgtcttcactatcgttcgtattcttgttatctcatcctgcatgcgcgnggtgtgtcatgcatgtgtagatacctccgtggtctgcttcacatccngaccggctatgcgcgcactcctcgctgctgtcctctctctgtgtcctcattctgatggtgtgatgcgtgggaggagtttcgtgtgtgtgtattgatcgcaattttctattgagttgtcgtctgnagtagcgtgctgtgttgattctcgtgtgtgtcatttacttctgtctgtacggtctcgctcacacgcccgaagcaacgatataccaccgtgcgcacgtggcgctctaccatccgttgtacgtgattttgtcgttctctctcctcgcgtgccgatcgctcgcactctgcncntctctcgtctgcacccctgcatcctcctagaccttctcgctgcgatacacagtcacagtggtctgcgagtaatatacgatannacaggcgccgatagccacccatatctattccctntgatgtgntgtctcggtgcttgttnttcgttcattatcttcctantcgttctgttttcggtctcttttgtcttaattctctntatcgtgcgtcttgcggttcggtcttcgcatctctgctctcatacacatttgttgttcacnacccaccacacaccacaccaacaacaccccc

SEQ ID NO: 1356 - DNA, 1536 bp, Glycine max
  misc_feature (24)..(24): n is a, c, g, or t
  misc_feature (73)..(73): n is a, c, g, or t
  misc_feature (76)..(76): n is a, c, g, or t
  misc_feature (79)..(79): n is a, c, g, or t
  misc_feature (131)..(131): n is a, c, g, or t
  misc_feature (592)..(592): n is a, c, g, or t
  misc_feature (767)..(767): n is a, c, g, or t
  misc_feature (890)..(890): n is a, c, g, or t
  misc_feature (947)..(947): n is a, c, g, or t
  misc_feature (1019)..(1019): n is a, c, g, or t
  misc_feature (1042)..(1042): n is a, c, g, or t
  misc_feature (1096)..(1096): n is a, c, g, or t
  misc_feature (1183)..(1183): n is a, c, g, or t
  misc_feature (1230)..(1230): n is a, c, g, or t
  misc_feature (1348)..(1348): n is a, c, g, or t
  misc_feature (1398)..(1398): n is a, c, g, or t
  misc_feature (1425)..(1425): n is a, c, g, or t
  misc_feature (1536)..(1536): n is a, c, g, or t
  Peptide Sequence Number=SeqID_6625
  Probeset Number=SeqID_11135
tcaatcctacgacacgcagagcgnttcgactcctctctctcttcccctccgtctccccccacaccaccgcacnacnaantgcagaagggtcgcctacactctccacgcggctgaggcgggcgcggcgccgngcatcttagtgtgatattaatcctccatgctcctcccgcacggcatgacagcgcagattacactatctcttctattctctcattataatcatttatttgagtactctcaagctcggtgttcttgctattcctccacagctgagagaagggggcagtgatagcaactatagaagcataccaacctccccaatagagtgagcggatgatattgcacacgattgtcagccacgcttctcacgaatatcctgttacgccctttccccctatgccgcgcacttttgttcgcgcctctgctctagttacttcagccgcggtgtgctcattgtagatacctgtgttagactcataatgagaccacgagcagccacaccgcgcctagctgacacgcaatgcgatgactctcaataccactgcgcctttagcgctattcgcgtatttactccttcgtttcctccattgtngtacactccacactgccgcatgttgttgtatagttgttcatcagagtgtacctcatgaactgaaccactccgcggcgacagacccatgcctacaccaccaacttgaatggtggatggactaggtgcccttgcatattatatcatacgactcctcaggaggtcagagaagacgggngtcttcggtgcttaattactcacatagatgattgtcccccattcatctactagcagtggatcgtgtcgtgcgaagcgccgctgtcctctacacgctcttaatactacagtcagtgtggtacancccgctgtctagtattacgtatcatctgagtgtcgaccgccggtcgtgggcttcttntatatagaatataatctcattcttacactatctcgtactcaacatacatagctcgcagccatctgactgctntaactctgataagtgagagaatncattctccccttggtagcactccctccatctcacggggtacagaccttcaagcntacgaggagaacacacacacaacgagtgaatgcgtcctccgacaggcactcgacctcgactgaatacctcctctgactaatatgtgngcgctcttccacctcacgcagcgcacctcacacagaagcacatatcnacacctgtgacctctcgacgattattgtcggcctactactcgcacttactccgtgtctcgcctcttcttctcttgccactactcagcgcaatctactatttcacaccactcataacangcacgcgacgtacatgagcaaccacatcaaataacgtcactgtgagagcncagtacaacacagctatcacatttatntagtatgcgtgtaaactatgaatacatagactaaatctaatacacacgcaccaactgctcggtaataacgctagtattacacaaacgcacgggtggcctgcgtctagtaan

SEQ ID NO: 1357 - DNA, 530 bp, Glycine max
  misc_feature (480)..(480): n is a, c, g, or t
  Peptide Sequence Number=SeqID_6626
  Probeset Number=SeqID_11136
acctaccctttcctcctcccacgcgcatcctagcaaccggcggcggcaggcggaaggcgaacaagaaggcggcgacgatggggcactccaacgtccgcaacacccaccccaagaactacgggcccggctcccgcgtctgccgggtctgtggactctcccgcaggcagatgaggatgtgtggccggatgtgttgcagccggtgttcccacaacaacgccaacgacatggacttcatagaatacagatattacagctatcccggactccgtaatgtgaagctgatcggggtggatcatttagagcaatttatagaatgtatactatcaattcgagtactgttttctctgagttttatgttttgatggatactgaatgatgtaatagttgaacatgagttaattacccatggagaagtcttttatcgttctgttgtctgtgtttgtcccctctcattgtcattgttagttataagtacttgtnttttttattagaacatattgggtcaatggctgtaacagaccagcaactag

SEQ ID NO: 1358 - DNA, 1731 bp, Glycine max
  misc_feature (1)..(1): n is a, c, g, or t
  misc_feature (29)..(29): n is a, c, g, or t
  misc_feature (31)..(31): n is a, c, g, or t
  misc_feature (59)..(59): n is a, c, g, or t
  misc_feature (233)..(233): n is a, c, g, or t
  misc_feature (274)..(274): n is a, c, g, or t
  misc_feature (279)..(279): n is a, c, g, or t
  misc_feature (281)..(281): n is a, c, g, or t
  misc_feature (284)..(284): n is a, c, g, or t
  misc_feature (375)..(375): n is a, c, g, or t
  misc_feature (415)..(415): n is a, c, g, or t
  misc_feature (488)..(488): n is a, c, g, or t
  misc_feature (502)..(502): n is a, c, g, or t
  misc_feature (511)..(511): n is a, c, g, or t
  misc_feature (514)..(514): n is a, c, g, or t
  misc_feature (530)..(530): n is a, c, g, or t
  misc_feature (748)..(748): n is a, c, g, or t
  misc_feature (799)..(799): n is a, c, g, or t
  misc_feature (916)..(916): n is a, c, g, or t
  misc_feature (956)..(956): n is a, c, g, or t
  misc_feature (1116)..(1116): n is a, c, g, or t
  misc_feature (1178)..(1178): n is a, c, g, or t
  misc_feature (1187)..(1187): n is a, c, g, or t
  misc_feature (1215)..(1215): n is a, c, g, or t
  misc_feature (1302)..(1302): n is a, c, g, or t
  misc_feature (1406)..(1406): n is a, c, g, or t
  misc_feature (1413)..(1413): n is a, c, g, or t
  misc_feature (1434)..(1434): n is a, c, g, or t
  misc_feature (1440)..(1440): n is a, c, g, or t
  misc_feature (1454)..(1454): n is a, c, g, or t
  misc_feature (1459)..(1459): n is a, c, g, or t
  misc_feature (1475)..(1475): n is a, c, g, or t
  misc_feature (1496)..(1496): n is a, c, g, or t
  misc_feature (1498)..(1499): n is a, c, g, or t
  misc_feature (1501)..(1506): n is a, c, g, or t
  misc_feature (1620)..(1620): n is a, c, g, or t
  misc_feature (1631)..(1631): n is a, c, g, or t
  misc_feature (1690)..(1692): n is a, c, g, or t
  misc_feature (1695)..(1695): n is a, c, g, or t
  misc_feature (1697)..(1699): n is a, c, g, or t
  misc_feature (1703)..(1704): n is a, c, g, or t
  Peptide Sequence Number=SeqID_6627
  Probeset Number=SeqID_11137
ntatgttacatcctatctacactaagatntnatgtggtgatgtgctatatcttctcctnttcatatcatacatctgcatatatgtacacgtgtcctcgtgttggagttgtgtggaagagttgcgcctataaacaatatcacaatgaccgtgatagatctggtagtgtggggtgtgcataacggatatagcactcgagtaatgtcttgtagtcatatttctatatgagacgttnatggctataatgcaatatgactatacacacctttattgtcnttatntnttntttatttatacatataattctctcatcaccttatcattataatggtgtatgtgtgcttgtcaacatacatcatcatacgtacatattactntactattatatttgtactctgacactgaactaatgaaatntctaatatcgatagcatactcacatggcaacacacacagcgtactcttcttatcacataagtatacatataantgatatatagtatntgtatgtgnttntttgtatctattggtnttacaatatcaatacaacttgtattatacattctatcatatactagtagttggctatgatattgtaattaatattagagttaatagtatacttacacatacaatagtatacaactctaagttacagtcaaagctatgcctagtagataggaggatgttagtagaagaaactctctttaccgttattgacactacttattttatcatctcatctcactnatgacgtcgtagtaagatattggatatagatcatattattctattgtgttntatggcagagacatgtctcatacatatatctgtaactcaacattcatctcacatcatcacactcgtgctgagatagtatatgaatgatgatgtgtttgttctatattctgatttgcnctacatctccacactatgctatagatgtgtatgtatatantcatctttttatattcttgttcttctactatcattctctatcacaaatcatcacatatcacattaaagtacagacagaagatgtcttgatttcaccatacacaaatgttatatcatcatactacaacaattaccaacaagaacttatatgatttataatnatatactattatatgtgtggtttgtgtagtgttgtagtgttgtaatttttatatatagtatntatttttanttcatatattatattcagtttttcattnctatatattatgtataatgtaatatcatttattggttcctctatctcttttatttctatataataggtaaataaaaaaaactatcanatactttttgtttgtggtgttgcgtacatacacacatcacccacaatatataaatagagtattgccttgtagtgtggtcgggtgtcactacataaaatctctanatataantgtgttggttgtggtgtgggntgtagnagagtaaatcccanttaanccacctccccctcccntcaccaccctacatcacatantnntnnnnnntttttttaatatatattgctctccctacttattatttatattgtgttttttgtgtttcaacacacatcaaatacatatactccttttgcctacacgcgctcccctctcctttgnggttgtgttgngtgggtgggcgcggggggtgggggccaacctcacctccttatctatctatatcatttcnnnggngnnngggnnacagcggggggggggcaattttttttt

SEQ ID NO: 1359 - DNA, 1790 bp, Glycine max
  misc_feature (1)..(1): n is a, c, g, or t
  misc_feature (26)..(26): n is a, c, g, or t
  misc_feature (33)..(33): n is a, c, g, or t
  misc_feature (35)..(35): n is a, c, g, or t
  misc_feature (41)..(41): n is a, c, g, or t
  misc_feature (115)..(115): n is a, c, g, or t
  misc_feature (189)..(189): n is a, c, g, or t
  misc_feature (268)..(268): n is a, c, g, or t
  misc_feature (322)..(322): n is a, c, g, or t
  misc_feature (347)..(347): n is a, c, g, or t
  misc_feature (350)..(350): n is a, c, g, or t
  misc_feature (363)..(363): n is a, c, g, or t
  misc_feature (399)..(399): n is a, c, g, or t
  misc_feature (403)..(403): n is a, c, g, or t
  misc_feature (408)..(408): n is a, c, g, or t
  misc_feature (418)..(418): n is a, c, g, or t
  misc_feature (504)..(504): n is a, c, g, or t
  misc_feature (509)..(509): n is a, c, g, or t
  misc_feature (542)..(542): n is a, c, g, or t
  misc_feature (564)..(564): n is a, c, g, or t
  misc_feature (576)..(576): n is a, c, g, or t
  misc_feature (619)..(619): n is a, c, g, or t
  misc_feature (627)..(627): n is a, c, g, or t
  misc_feature (764)..(764): n is a, c, g, or t
  misc_feature (787)..(787): n is a, c, g, or t
  misc_feature (844)..(844): n is a, c, g, or t
  misc_feature (1066)..(1066): n is a, c, g, or t
  misc_feature (1122)..(1122): n is a, c, g, or t
  misc_feature (1156)..(1156): n is a, c, g, or t
  misc_feature (1223)..(1223): n is a, c, g, or t
  misc_feature (1313)..(1313): n is a, c, g, or t
  misc_feature (1325)..(1325): n is a, c, g, or t
  misc_feature (1338)..(1338): n is a, c, g, or t
  misc_feature (1416)..(1416): n is a, c, g, or t
  misc_feature (1418)..(1418): n is a, c, g, or t
  misc_feature (1446)..(1446): n is a, c, g, or t
  misc_feature (1460)..(1460): n is a, c, g, or t
  misc_feature (1520)..(1521): n is a, c, g, or t
  misc_feature (1523)..(1526): n is a, c, g, or t
  misc_feature (1601)..(1601): n is a, c, g, or t
  misc_feature (1662)..(1662): n is a, c, g, or t
  misc_feature (1667)..(1667): n is a, c, g, or t
  misc_feature (1671)..(1671): n is a, c, g, or t
  misc_feature (1683)..(1683): n is a, c, g, or t
  misc_feature (1696)..(1701): n is a, c, g, or t
  misc_feature (1708)..(1709): n is a, c, g, or t
  misc_feature (1713)..(1713): n is a, c, g, or t
  misc_feature (1719)..(1725): n is a, c, g, or t
  misc_feature (1728)..(1729): n is a, c, g, or t
  misc_feature (1737)..(1737): n is a, c, g, or t
  misc_feature (1746)..(1746): n is a, c, g, or t
  misc_feature (1748)..(1748): n is a, c, g, or t
  misc_feature (1754)..(1754): n is a, c, g, or t
  misc_feature (1766)..(1766): n is a, c, g, or t
  misc_feature (1769)..(1769): n is a, c, g, or t
  Probeset Number=SeqID_11138
ngtattgctattgtcgtgttattcgnacacagnancggtanataatgagtgatacgcgagtagaaacgacaccaacgcgatcttatacgtgactagggcttcgctcagctctcantcaactgcttagtcatcgtcctctgtagagactgtactcatgctctactctgtcgtctgtgagtgtgtgtgcgntggctcatgcactccacaacacacatgacacgtgatggtgtggtagctggtgcagacgatgcgcgtcgagtgcgatgtngctgaatgcatagatatattagatacgtgtatgcagcgcgtgtgataatgtagnactctagtgctagtcgagtcgatgntcntgatattctgtgntgtatgtatagtgatctgtacatctgtgtcgatggntagntttgngaattgcgtntcatggatcagtgcgagatggtgtgtgcataacagtgaagcaagaggatgaggacacatgatgtagaggtcgtgtgcatcatgtantgatnttctccttgtttgatctttaatctcatggctcncatgctttaccctattgctacntgtctcatctcnatctcctccgcgtgagtgtcgtgtgtgtgacgctgtgtgtggnaactcatntcatacactctgtatgtcggcataagtgaagaggattcgaggcgtgttctgatataacgatttatattgtgattactgagcgtaggagtagtaattatgtccgtgagttgagagtgagatagtgtatatgatctatnctaatggtctgtgtcgtataganatctcttacaacgcgattatacttaattcacgtatgactatcgatcgtatatagagntatagtgcacgtcatccacatgttggttgtctatagtgtgtagtatctcgtacgacaaatcatgcacatgacagttagacccagcctacgtcgcgcatcgtcagtgtctccacgacagtaggcgtaccgagatgtatttgtgattgatctcctgttgtgttaattgtattagttggtttttgtgtggttgtatagttgtcggtgtagtgtagtgtgtggtanttgcaggagagataaactatgacatcgtatcagcgcatctgtctatgactcaacgnctcgcaatcaacttatatttttcatgtgtttatntatgatagcgaacacgtgcaatactggtctacggagctaacgggaaggagagagagatcgacgagancggcctgtgtcaacatcgtttcgcgccacccgatcccctacgtagatagatatacttataaccctcttatatgcgttgtggtgacaagtntatttgagtganggattatggaaangtgggagttgagtgtgggttgtagcgtgagcgtgttgagatctacgagtgtgtgcgtgtgctcatgctcgtataatantncgtgggggcgcgtgagctctctgcgtgncggtcgtcgtcgtntctgtggagtgcggcaggctgcttgttgggtgtcgctcgatgtccgcgatcgcgacactnncnnnngcgcccgcggctggcatatatagttcatgcgactgctgctatatagcagttacgagatagagtatgagtagatgntagtagtatgttgagaggattgtgtatattatcaatgattcacatatcataaaatttacantttcnggantacacgaattanattctagagaatnnnnnngggatgnngtgngggggnnnnnnngtnnagcccccntagagatgngncacacnccacaaacacanacnccacaacacacaccacaccaa

SEQ ID NO: 1360 - DNA, 586 bp, Glycine max
  misc_feature (402)..(402): n is a, c, g, or t
  misc_feature (413)..(413): n is a, c, g, or t
  misc_feature (419)..(419): n is a, c, g, or t
  misc_feature (423)..(423): n is a, c, g, or t
  misc_feature (453)..(453): n is a, c, g, or t
  misc_feature (465)..(465): n is a, c, g, or t
  Peptide Sequence Number=SeqID_6628
  Probeset Number=SeqID_11139
tttttttcccaaaagatttttttttcccatttggggaaaaaaattttcacaaatttttttttatttccccccggggtttccccccccgggtttttgccaaaccccgccgggaggggggcccccccaaaattttttttttttaattttgccaagggggcctcttttgaaccatccaagaaaatttttttgggaattaaattttcgggcccgggttttggtcaaccccaaaaattagaagccccgtccaaagcgtcccaacgttagaaatttctttgggaatgggaaaccccctcaaccaaccctcccttatgggcccttggatcgaatagtgacggagatgttactctttgtctccaaataaccggccaaggaagggtcctccaccagctggtactcaccttnttccacagctnttcccntttncctgagttctccatcaaacacaattctcanccacccatcttntgagatgaaaattgaaagaaagaggaggtggcgataattgggatggagagaaaaacaaaaaatgttgagggggaaatctaacgaaggtggatgaggatgatgacgaaatgttgagttgatt

SEQ ID NO: 1361 - DNA, 553 bp, Glycine max
  Probeset Number=SeqID_11140
attaatataaatcagcaacttaaatagcaggtagtagattcgagtttctcagtaagaaaagcatacatattggcttttaacctttgtcggtaaaaaagcagtggtccctacaacatggacaatccatccctagcactgaggcctaccaactgttatcgacgcggagtaatatcgttgtggtaagcgataagcgctatatccgtctatcatattctcggttctgcaggtacagtctcgcaagatatcgtgtccccgttatcatgcgaaatcctgtcaaatagggaaaatcaggtttggaggcatcactaaatctcccagatagaggcgaattgagttaatttagtacgggtcctgaactcagtgatcctagtcacatatcgggatggtcacatgagataagaattcagcagttcaaaatgacgtaaggaggtagaaaagggagcgatgggtaatgtaaaaccagggcaagtcctcgcattcacagggtaccagtctttgtggaatcattactcgatgtttaaacacaataaagttggaacgggaggggggaaag

SEQ ID NO: 1362 - DNA, 417 bp, Glycine max
  misc_feature (61)..(62): n is a, c, g, or t
  Peptide Sequence Number=SeqID_6629
  Probeset Number=SeqID_11141
gcgcgactcttggccagtcatcatcgctgaccctcgcttctttatggctgcggcgtctacnnaggtcgttgatgagatagacatcgagacggcatcataagaattctttgtcgctctgaattatctggacaatgacttggagggaatgttttctggtggagacgagtttggctttgtggatattgctgctgtgatcatccctctgattctagagatagctgggttgcaattgttcccaagtgagaaattgccaaagctcttcaaatggagccaagacttttacaacctttcacttgtcaaccaagttgtgccttctaaggtccaactttttgcctattttaagggtcgggctcatagcctggctgctaaaagaatgagtgaacagagactccccattcccagggggatttttttctt

SEQ ID NO: 1363 - DNA, 435 bp, Glycine max
  misc_feature (107)..(111): n is a, c, g, or t
  misc_feature (158)..(162): n is a, c, g, or t
  misc_feature (202)..(206): n is a, c, g, or t
  misc_feature (258)..(262): n is a, c, g, or t
  misc_feature (337)..(341): n is a, c, g, or t
  Peptide Sequence Number=SeqID_6630
  Probeset Number=SeqID_11142
ctgcagcatctgcttccctggcttctgctgattgttgcaactatgattttctttgtgaggacaaaattactgaagcggaggagagaaagaagacaatttggtgcacnnnnngacacggtgaacaagtccaagctaaatgtgccatatgaaattctttnnnnngccacagattacttcagtgattccaataaactaggagaannnnnatcaggatcagtttataaaggagctctgccagatggaactaccatggctatnnnnnggcttagcttcaacacatcacaatgggcatatcatttcttcaatgaggtcaatttgatcagtggcattcatcacnnnnntctagtgaagcttttagggtgcagcattacaggacctgaaagccttcttgtttatgaatttgtgcctaatcacagcctctatgatcacctatct

SEQ ID NO: 1364 - DNA, 1473 bp, Glycine max
  Peptide Sequence Number=SeqID_6631
  Probeset Number=SeqID_11143
aaagtattttacagacaagtaaataaacaaacaaaataaatgggtgctgtaagttctgcatgtgaaggctgctttaatgataagtctgaccaaaaaccacatggaaaccaaaagggtcaagacgataagagaaaaaacgacgtaaaatacgataagctcgatgattcttctgaaggcaaaaatatttctgatcgtgccaaaaacccctctaatgctaaggataaaggacaagatggaggtagtcataagaactctgcaaagcaaagtaaaaatgaagaggctggtttagataagaacaaaaagctcactattaaggactttgacctcattagggttcttggtagaggttccttcggtaaagtcttcttggttcaaaagaaagctaataaaaaatactacgcccttaaaactcttaagaaggaagaaattttgaatagaggtcatattgacaatgctatgactgaaaaaaatgttcttcagaacgctttacatccttttgttgtaagattgagatattccttccaaaatcaaaccaccttgtaccttgtgatggatttctgccctggtggcgaactttttatgcaacttaaaaagaagggaagattcgatgaagaaactaccagattctacaccgctgaagtcgtattggctcttcaataccttcatgaaaagcttgatatcatctatagagatttgaagccagaaaatatccttttagatgcaaatggacatatcaagctaaccgacttcggtctttctaaagctactaagagaagtttcagtttctgtggaactcccgaatatcttgctcctgagattttgctgggtcagggtcatgatcaatctgtcgattggtggagtttgggatgcttaatatatgaaatgttggctggttatccacctttctcttccaagaacaagactcaattatatcaagatatcctaaaaactaagcctgttatgccgagccatttctctgaaaatgctaaggacctcctctctagattattagttagaaatcctagcaagagattgggtttcaatggaactgaagagattaagaaacattctttctttgaaaatgtccaatgggaagaactagttaacctcaagaagaagcctcctattgtccctactttgactaagcctgacgatcttagaaactttgatagaatctaccttaatgagcctgtcattgaaactcccaacaacaatcccaagatcttgactgatcctaagaacaacttccaagactttacatacgttccaaaggatattggcaaccaatcttacattgaggatcctaagagtattttagatagcactaaataaatctatatataatttgattagtaatgaaaattttttacgtaaaattattgtaatcagtttaaaacacttgcttagaattcgaatatgtcagatcatttaatgtcatgtttgaataaaattgattataattttttattttcc

SEQ ID NO: 1365 - DNA, 1733 bp, Glycine max
  misc_feature (14)..(14): n is a, c, g, or t
  misc_feature (16)..(16): n is a, c, g, or t
  misc_feature (20)..(20): n is a, c, g, or t
  misc_feature (22)..(22): n is a, c, g, or t
  misc_feature (24)..(24): n is a, c, g, or t
  misc_feature (26)..(29): n is a, c, g, or t
  misc_feature (31)..(31): n is a, c, g, or t
  misc_feature (39)..(43): n is a, c, g, or t
  misc_feature (47)..(53): n is a, c, g, or t
  misc_feature (55)..(59): n is a, c, g, or t
  misc_feature (83)..(83): n is a, c, g, or t
  misc_feature (102)..(103): n is a, c, g, or t
  misc_feature (122)..(123): n is a, c, g, or t
  misc_feature (137)..(137): n is a, c, g, or t
  misc_feature (143)..(143): n is a, c, g, or t
  misc_feature (154)..(155): n is a, c, g, or t
  misc_feature (173)..(173): n is a, c, g, or t
  misc_feature (176)..(176): n is a, c, g, or t
  misc_feature (188)..(188): n is a, c, g, or t
  misc_feature (191)..(191): n is a, c, g, or t
  misc_feature (196)..(196): n is a, c, g, or t
  misc_feature (247)..(248): n is a, c, g, or t
  misc_feature (285)..(285): n is a, c, g, or t
  misc_feature (287)..(287): n is a, c, g, or t
  misc_feature (314)..(314): n is a, c, g, or t
  misc_feature (319)..(320): n is a, c, g, or t
  misc_feature (324)..(324): n is a, c, g, or t
  misc_feature (346)..(346): n is a, c, g, or t
  misc_feature (451)..(451): n is a, c, g, or t
  misc_feature (456)..(456): n is a, c, g, or t
  misc_feature (507)..(507): n is a, c, g, or t
  misc_feature (511)..(511): n is a, c, g, or t
  misc_feature (513)..(513): n is a, c, g, or t
  misc_feature (515)..(515): n is a, c, g, or t
  misc_feature (517)..(517): n is a, c, g, or t
  misc_feature (545)..(545): n is a, c, g, or t
  misc_feature (579)..(579): n is a, c, g, or t
  misc_feature (637)..(637): n is a, c, g, or t
  misc_feature (645)..(646): n is a, c, g, or t
  misc_feature (649)..(650): n is a, c, g, or t
  misc_feature (665)..(665): n is a, c, g, or t
  misc_feature (742)..(742): n is a, c, g, or t
  misc_feature (752)..(752): n is a, c, g, or t
  misc_feature (764)..(764): n is a, c, g, or t
  misc_feature (790)..(790): n is a, c, g, or t
  misc_feature (852)..(852): n is a, c, g, or t
  misc_feature (858)..(858): n is a, c, g, or t
  misc_feature (887)..(887): n is a, c, g, or t
  misc_feature (892)..(892): n is a, c, g, or t
  misc_feature (913)..(914): n is a, c, g, or t
  misc_feature (965)..(965): n is a, c, g, or t
  misc_feature (998)..(998): n is a, c, g, or t
  misc_feature (1016)..(1016): n is a, c, g, or t
  misc_feature (1157)..(1157): n is a, c, g, or t
  misc_feature (1161)..(1161): n is a, c, g, or t
  misc_feature (1167)..(1167): n is a, c, g, or t
  misc_feature (1183)..(1183): n is a, c, g, or t
  misc_feature (1199)..(1199): n is a, c, g, or t
  misc_feature (1256)..(1256): n is a, c, g, or t
  misc_feature (1281)..(1281): n is a, c, g, or t
  misc_feature (1288)..(1289): n is a, c, g, or t
  misc_feature (1293)..(1293): n is a, c, g, or t
  misc_feature (1310)..(1310): n is a, c, g, or t
  misc_feature (1352)..(1352): n is a, c, g, or t
  misc_feature (1363)..(1363): n is a, c, g, or t
  misc_feature (1367)..(1367): n is a, c, g, or t
  misc_feature (1512)..(1512): n is a, c, g, or t
  misc_feature (1547)..(1547): n is a, c, g, or t
  misc_feature (1552)..(1552): n is a, c, g, or t
  misc_feature (1589)..(1589): n is a, c, g, or t
  misc_feature (1601)..(1601): n is a, c, g, or t
  misc_feature (1627)..(1627): n is a, c, g, or t
  misc_feature (1638)..(1638): n is a, c, g, or t
  misc_feature (1656)..(1656): n is a, c, g, or t
  misc_feature (1664)..(1664): n is a, c, g, or t
  misc_feature (1671)..(1671): n is a, c, g, or t
  misc_feature (1713)..(1713): n is a, c, g, or t
  misc_feature (1733)..(1733): n is a, c, g, or t
  Peptide Sequence Number=SeqID_6712
  Probeset Number=SeqID_11144
ggggggtggcgcgngngggncncntnnnncntctctcgnnnnncaannnnnnngnnnnncgcggggcatgcgctgagtgtgangtctgggtagaagatgcanncaaaaaattaacaaagaannccgagactctcganatatanattagaagagnnttaaaacataaaccactnacngcggcgcgcacnagnttgtntagatggtgagaggggagctaatgcgcgctggagtgtacagcgctgcgatnntttttattctgtctcgcgcgcgtgttcggtcgatctntntttattatgagatgatgagctaataanacggnnaaancacgccagcgactctacacctnatgccgaccactatcaacacatcgcactcgtccatacatacaacacacagtaatgatagtatgtagttcacgaccagtattgcgatgatagtgcgtcgggaggcncgtcnactacacgtatactctgatcactcacgtagcgagcttagaactcacatganaggntnanantttctgtatctcgttgtctatactactngtagatgacagacatatatcatcttctcttctancgtctttcggtttcctactctctaatcctctctcagcacactactctgcgtcttctgngcgtgggnnggnncgactctgagcacgncgctgtgtgtgctgcaagtcggtgctatatgtgatggtctgctatgaggtgtgttgcgcgcgagcgctcgggatagngattgctagncgagcagtatangagcgtcgcatggtggcgtgcgatgncgtggtgtgtactcaggacgcagagaggttgatgatatatatatgagactacgtagagatgngtaggncgacacgcgagtatacatatgaagcaaangacancacaacacacgatgccgcgcnntcgctcatcgttgtgtatatatgcaaattgatagatatatgtacatgtagnggctgcggaacacacacactccactctcctccncgtcgcgcggtgctcttngtgagtgtcagcgccctgatagcatcgggtgtgtatatgactgatcatgagacaagattacgcgtgcatctgcgtgtgctgttgctctcattcgtgcgtgtgtgacacctcatacacatcacacacacgctgtgctagtcntacntaccgnatatcgatgtatgcanagagtgatggatgtangagcctagcacagcgcgcatgatgtagtactcacgcgacacgcactcgatgtctagngtacgtatcgccacagccactacgnactgtcnncttnatcgcctgcgactgcgngtctttgtctgctggcgctcgctgctcgctgtagttcgttcnacacgtatccngtgntagtcgtgtgtaccttgcagcgagcggcgctggtagatgctgaatatcgtcggcacagtagtgtcacatccatcatatgacatgcgaatcgagacgctgatctactagactccagatgcacacgttctgtacgatgcacgtgagnagtaatcatcatcatgactcactgatgaaatgatngaggnatgtagtgctatgctcgacgggcatacgacgacgagntaatcggtcaanactcctactgtcggacgcgctgtganatcgatgtgancgtcagcagacgccgtgncgtcgagncgatctnctgagtagctgcttctgctgctagcccgtcatatctctactncgtcgacgtacgcgcagtgn

SEQ ID NO: 1366 - DNA, 1362 bp, Glycine max
  misc_feature (1362)..(1362): n is a, c, g, or t
  Probeset Number=SeqID_11145
tgtgaggcctcgacccataagtatattttctggcagtaggcgggtgtgagacagaacggattgttgtcctatgatgtatgaagaaaaccatttgggcgcgcgagtactcttgcggccgataaataaccacgatatataatgtatatatatcgtatcaatgattgggatcgaaggcacaataaaataaaatggtgggggtggagagcgagcgctgccgtgttgtgcgatgtaatgcgaggatccacggggtcataactcctatgaaccgtacatgatagaaatgatactcgccacccgctgacgccggcggccgcggttttctttatattaattaaataggacggcactcgacacgcgagttagatgtgcttcgggcatatgctagtatttataatcatgacgtgcgcaggcagcacttatttattatagatatgtgagtgataatgtagagatagtaatgaaagtgagggcgcgaaactacgcagtggtgaaatgatgtggggataaatggatcgtgtgttcatcgctgacttaggaaggataactggatggggtaggacgacccgattcggggattggtttattatattattgaccgctcaagacaggacgagtaaatgtgatcgtgtatatactcgcgagtactcagcatagctgtgcgcggcgcactttgatatccagacactgtgctcccagtatacatgaatataacatacctaattcgacgctggcggcacagacacatattacccgttgcagtaattttatatgatttgatatgtaagcgcaaagtacaccatacacccattcgcataaattacagagaagaagagattaggaccagagtagtgtgggctgggatgtatgcgcgaataccaccttaataacgacgcggtatggtgtgtgttagaatcataatagcgacgaatttatttcacatataacactgttatgttcttctatatgtgcgccgacaactatataaacaccgtaacgcaggggggagaaacacatataaatgagaaaattgtttcgcacaacatcgacgatttgcgcgccgacggtgtatgttttctcgtgcgtgattgtgactctacactacaaattattactcttgtgcgcgctcggtgcgtctttgtgtagtgttattcctgccacaatgggagtggtcaactaatattatattctctgtagatcattgtagttggtcgctgctgcgcgaggtatatatatcgtatgatattactatatgttacgtatacatgtagcagacgtgacgagcggctgtagtgtgatcgctcaacatagttatgtctgtactatagtcgtccgtatgtctcgacgctatgatccgccacacgn

SEQ ID NO: 1367 - DNA, 1722 bp, Glycine max
  misc_feature (20)..(20): n is a, c, g, or t
  misc_feature (25)..(26): n is a, c, g, or t
  misc_feature (36)..(36): n is a, c, g, or t
  misc_feature (38)..(39): n is a, c, g, or t
  misc_feature (42)..(42): n is a, c, g, or t
  misc_feature (44)..(44): n is a, c, g, or t
  misc_feature (83)..(83): n is a, c, g, or t
  misc_feature (86)..(86): n is a, c, g, or t
  misc_feature (95)..(95): n is a, c, g, or t
  misc_feature (158)..(158): n is a, c, g, or t
  misc_feature (166)..(167): n is a, c, g, or t
  misc_feature (169)..(169): n is a, c, g, or t
  misc_feature (171)..(173): n is a, c, g, or t
  misc_feature (178)..(178): n is a, c, g, or t
  misc_feature (185)..(185): n is a, c, g, or t
  misc_feature (215)..(216): n is a, c, g, or t
  misc_feature (218)..(219): n is a, c, g, or t
  misc_feature (221)..(221): n is a, c, g, or t
  misc_feature (223)..(223): n is a, c, g, or t
  misc_feature (323)..(323): n is a, c, g, or t
  misc_feature (540)..(540): n is a, c, g, or t
  misc_feature (552)..(553): n is a, c, g, or t
  misc_feature (603)..(603): n is a, c, g, or t
  misc_feature (707)..(707): n is a, c, g, or t
  misc_feature (780)..(780): n is a, c, g, or t
  misc_feature (910)..(910): n is a, c, g, or t
  misc_feature (930)..(930): n is a, c, g, or t
  misc_feature (940)..(940): n is a, c, g, or t
  misc_feature (1069)..(1069): n is a, c, g, or t
  misc_feature (1184)..(1184): n is a, c, g, or t
  misc_feature (1195)..(1195): n is a, c, g, or t
  misc_feature (1198)..(1198): n is a, c, g, or t
  misc_feature (1221)..(1221): n is a, c, g, or t
  misc_feature (1301)..(1301): n is a, c, g, or t
  misc_feature (1314)..(1314): n is a, c, g, or t
  misc_feature (1390)..(1390): n is a, c, g, or t
  misc_feature (1442)..(1442): n is a, c, g, or t
  misc_feature (1444)..(1444): n is a, c, g, or t
  misc_feature (1451)..(1451): n is a, c, g, or t
  misc_feature (1490)..(1490): n is a, c, g, or t
  misc_feature (1576)..(1576): n is a, c, g, or t
  misc_feature (1638)..(1638): n is a, c, g, or t
  misc_feature (1642)..(1642): n is a, c, g, or t
  misc_feature (1715)..(1715): n is a, c, g, or t
  misc_feature (1720)..(1720): n is a, c, g, or t
  Peptide Sequence Number=SeqID_6713
  Probeset Number=SeqID_11146
aaaaaaccacctttgccgcnccccnncccccccccncnnccncncggcgcctgtgttcggtgtgtgtgtggtcgccccgcccnccnccggcccancacaaacattataactgtatattatccacacccccaccatgcgtcaagatcgcacgcgtgccntagggaanncnannnttttntctattnctctattgtgttcatctgtagtgtatgtgnnannananaaggaatgtggaagagagacaacacaataacattacggtcagctgtaaacagagaagataaatgtaattatataactaacctatcatacagtataagatntaggaatctatcatcagagataaagaattatggaagtaacaaaagcgaaccacaaagaatgagataaagttgagagatagaagtttgttgactgtattacctatttctcttcagatgagaatgcgacataatataactcaataaaagcagagtattatgatgtcatagaggaaatatatggtgtgagaggaagagaagacagcacacaggagtgggnggaaagctaacnnagaaggcatagacggccaggatatatgagacaagaaaataaaacaataantctatagatagaagttatgtagtgaggggcagagaaggccgggtcttctgatattgacagatcaatatctcactgttatatatgggcctctggctgtacagagnagtgctactgccctgcagttcttggcctatacatgacggtgagagaatggacaatgcgatagactgtgcattntaatgctgggctaatccacgagggacaagaatcatccagagaccagactcgagagagtggatgaagatgaaggtgagagcacaaatcactcagccaagaacatgcacatacacattccacgtcatcaccntaaccataagcggatcgcantgctgttgcntgagcgtgtaggatgtcgtagacgtagtaagtatcaacatctctatagagtatagcgcctggtgctgtctcaagactagtatactgctaagtatcatagcagatgttagttgtgttctctggacggtgngtggcgagatcagtagctcggagaataattatatacgagaaaattagagaagcagaatcggagaccgcgtctgtgtgctgcgccaggtgcaatgtccagtgagagtgggtttgtngagacccaganccncaccctacatcacttacataatnaaaatccacaacataaaactaatctcaactccataatcatatataactgaccacaccacacgtcagtcgtgtgttgtatntgccatgtgcccncacgcctacaatgtcaagcgacaaaagcatgatgctaatacacatcgtggtgccaatagctgtggacgccggtagntggtacgagatctgagacacatacagacaacaggaggacgcacgacaagtancnacgtccncacacacatcagctcgcatcacactgtcacaagtctcantgtgacatgagccatccaacagcagatcataattgcacgtgtcgcggtgcagtaagatctgtgatagatccgcgcagacgcgcgcntactgcgtgcagagtgcacataggataagtgacagcgagctactatgcattacacgagagtnaganaggtacgtggagatagaaatacgaggatccatgtacatcattaacgatctactctcagacacgcgtgagccgntcgcncc

SEQ ID NO: 1368 - DNA, 1344 bp, Glycine max
  misc_feature (9)..(9): n is a, c, g, or t
  misc_feature (13)..(13): n is a, c, g, or t
  misc_feature (18)..(18): n is a, c, g, or t
  misc_feature (22)..(22): n is a, c, g, or t
  misc_feature (24)..(25): n is a, c, g, or t
  misc_feature (31)..(31): n is a, c, g, or t
  misc_feature (72)..(72): n is a, c, g, or t
  misc_feature (258)..(258): n is a, c, g, or t
  misc_feature (1344)..(1344): n is a, c, g, or t
  Probeset Number=SeqID_11147
atatacacntcanctttntttntnntttttnttcttgtatttgtttctgtcacttcttattcttctccctantccatcacacactctcctctacctcaaatggtatgttatgagatctatccgcgttctctacctcttggtgcggttctatattgatcttttatccgccctctccaccacacacccgcgcatccctccatccatccggcgctttggtgggtggcctttattattttgccgattattacgatttcgcanctccgcctctatccgttcgtgtctcttcctttgttccccacatccaccacctatcactcgtgtcgccacatccatctctcctgctctctcgcccgcccttctccccctgctttacttttggtatttacccgtcgcccaccgcaatcgcttccacccagccgagtgtcgggtgctacccacggcacggcccaacgacaccttgtcggcaacatacctattcaagatcctatgatatcatgcagtcatctatttagtgtgttctcgttactcattcagttgatcttgtgttgtagatgaaataccattaccttctatgtattacttacttctctacgcatcgcgcgccgcgccccgcgtggtgcgtcttcccgcacctgagattcctctcttgctattatcttcctccctacatacacatcttgattttagtgttttgaatatatatatatatcatacaaaaatttatcttattaatcatctcattgatgagaagatgtagaacagcgccaccaacctcgatacatggtatgcccgcgtcgcgtgccgatctactcgtatgtgtgagcacacaccacttgtatgtttcatctcttttcgtcgctctctatcattataatcgtcttctccactcttccctctatttccctcctctcctcagctctcgcgcacgacgccaagacttctctcagccctccttctatacacgtcacagtctgaagtcacaacagactcttacactgtgccacctgcgtgccgcgcaggaccgccgatcgcgtccgcttacctttcatgtcctctgttatattgttcttctgcttctccgtccacattcttcgcactcctgacttcatcatccaccttcacatccggtatcttctcctcccgatctgccctcgcctgtcctctctcctcacattcttatatcgtatctcttatctctctgtatctcctcttctctgatttcctatctatatcttctctatatactgtttgcatcccagtctcgcgctccctgctcgccgttatctccgtgtgaatctctcatgcacactagtcatcgccactccatcacctctacatattccn

SEQ ID NO: 1369 - DNA, 435 bp, Glycine max
  misc_feature (201)..(201): n is a, c, g, or t
  Peptide Sequence Number=SeqID_6714
  Probeset Number=SeqID_11148
ggcggggagaaaaattccccccccaagtttcccccgggggggggggaggggggggggggcccctccaaaaaaatttttttataaagggggccccattttttttttttccccccttttagaacccaccctgtttttcaccccccgggggaaagccggccccagggggccccctccccattccgggggggaacccctttttgngcccccggcgggggcccgggggtttttcgggccccccgggcaataggttggagtccggtatccctccccggcggacatcgggatgatagatcgtgagctgcgcgctcgcccggtgaggattatcgacccgagcgtgcgcgtgtgcggacgacgggagcggacgaacggcggcacgggtgcaccgcggcttgttttggcagtacgcgggtgcgtcctcggcgctctcctaaaact

SEQ ID NO: 1370 - DNA, 1402 bp, Glycine max
  misc_feature (18)..(18): n is a, c, g, or t
  misc_feature (161)..(161): n is a, c, g, or t
  misc_feature (187)..(187): n is a, c, g, or t
  misc_feature (266)..(266): n is a, c, g, or t
  misc_feature (396)..(396): n is a, c, g, or t
  misc_feature (447)..(447): n is a, c, g, or t
  misc_feature (451)..(451): n is a, c, g, or t
  misc_feature (693)..(693): n is a, c, g, or t
  misc_feature (757)..(757): n is a, c, g, or t
  misc_feature (1026)..(1026): n is a, c, g, or t
  misc_feature (1046)..(1046): n is a, c, g, or t
  misc_feature (1086)..(1086): n is a, c, g, or t
  misc_feature (1224)..(1224): n is a, c, g, or t
  misc_feature (1232)..(1232): n is a, c, g, or t
  misc_feature (1329)..(1329): n is a, c, g, or t
  misc_feature (1332)..(1333): n is a, c, g, or t
  misc_feature (1355)..(1356): n is a, c, g, or t
  misc_feature (1358)..(1358): n is a, c, g, or t
  misc_feature (1363)..(1363): n is a, c, g, or t
  misc_feature (1365)..(1365): n is a, c, g, or t
  misc_feature (1369)..(1379): n is a, c, g, or t
  misc_feature (1381)..(1386): n is a, c, g, or t
  Probeset Number=SeqID_11149
tgtgtggatggtgtcagngtcgtaggccagactgcacacgcacctggtgtcaggcttatcagcgcgacgatccgacgcgagcgtctcgaccccagcgctagtcagcgcgcactcgcgtcgagaccgtgtgcagaggcgtgctctcacatcaccttcagagngcgcggcgacgcggcactctatgaancgaacactcacgcagcactagtcacagcacgtagagccagctaacaccacgcgtacatctctcacagcacctgccgcgnccgtcgtgaccgtcttcggggctagtgacatcgcgcgcacacgcatgcttggtagtcttacatagacctcgaggtgtgcgagttgtgcgtgtaccgcagcgtgtcgatgcctgtgttacagtgtgcaacnaaggcatgatcccatctctcgcctctgcatggcacgacgccgagcatccgnggtnacacgtccctgccgtcatcactcataactatcatacacgtcaaaatatatgacactcgtgtctccgcctatctcacccatcactcataactcaaccgccaccgtgtagtatgcgtgtgccacacagagtgcatcactgtcttccgtcactgagtccatgtatgagtcgggtgctgctcgccctttactcattgctcccacacccctgccccacacctcagtgccgcgccatacctagtccgntgaggagcgtaagttatgtgatgcacagacaccacgaccgtgcactcccacgcgtcgttgtgtntctcatctctattcactcagtgacaatatccatctaatcccatacgctgcggactcgcgtccctcgtttgcttgtcttccgtatctgccgtcctcgtgctcagtgattgcgctgtcttcatgatgcgcttcgtgcgcgttctactctccgctcgcgctctcatcaacacaccaaagcacctcttgcactccttacataaacaagcacacaacaacaacccccaccattctctcacttctctcataaggtcgtggtacgcaagtcgtctnctagattctatgtacaatcngaggctgcggctagtgtgctaggtgtggtgttaggtatcncactagctcgcctactctcgaacgagatggagcaagtctaccccgacacgccgctccatcattcccgcgccgcctgcgttgtgacgtccgtatgtgtatattgtagtgccccctcacccccctctctcgctgatatanataaccanatctatatacattctatatcccagatccacacttcccactctaccgtagatgggaggtcgtggtgtcatttctttaatatgtatatataaattaatntgnngcgcgcaagtacaagaagtagnntnccacnanacannnnnnnnnnncnnnnnncccaacaaccacaccc

SEQ ID NO: 1371 - DNA, 434 bp, Glycine max
  Peptide Sequence Number=SeqID_6715
  Probeset Number=SeqID_11150
ctcctcgattcctcgtcgtgcttgctcgcgatccattctacagggaggcgaaaccctctgcgcgccatgggcgaccactacggtacgctcggggtgcggcccgacgctaccaaggccgaggtcaaggccgccttccgccgccgcgccctgcgcgaccaccccgaccgccacgctcaatccggcgacgccggtgcccgagccgaagccgcgcggcgcttccgccaggcctctgacgcctaccacgtcctctccgacgaccgaaggagggccgagtacgacctccgtctccgctcttcctcctatgtccgcacatcctcctccacctgggcctcctcctcgggttcgcacggctacggctacgggcacagagaaagttcttggcggcggccgcctccgggaggcggaggcgcatcggtgggatacgattggggctt

SEQ ID NO: 1372 - DNA, 461 bp, Glycine max
  Peptide Sequence Number=SeqID_6716
  Probeset Number=SeqID_11151
ggcataactactgccaagtataggagaacataaataaacaccactgtcttctcatgggatatgcgtgaccccataaaaaagggactggctaatggatgtggactgctgccaaagcactataagccgccaattcggtgtcatgagtcccgaggagctagaaccttaaaaggcctggcagaataaatggccagtacctgcttgttagactttatgagctgagaaagcagcacgagggaaagggacgtatttgtcatgtccaaacagtttcacacggggcaataagagtttcattagaagcgacagtttgtttcagttttctcctatggtaggcagtaaaatttgcaacatgttgaggccctctctctctctgaatggatgattaaactgcttctagtagcaaggtcatgcaacttccaagaagacgatcctagctgtctttggtttcttctgaactaccaatt

SEQ ID NO: 1373 - DNA, 586 bp, Glycine max
  misc_feature (77)..(77): n is a, c, g, or t
  misc_feature (264)..(264): n is a, c, g, or t
  misc_feature (294)..(294): n is a, c, g, or t
  misc_feature (303)..(303): n is a, c, g, or t
  misc_feature (420)..(420): n is a, c, g, or t
  misc_feature (475)..(475): n is a, c, g, or t
  Probeset Number=SeqID_11152
ttttttttttttttttttgaattgtatttgtagaacagttaataaagaaaatctcaaacaaatacatgatacaaagngtcatatcattcaccattattagtaaaatataattatctgttgaaagtaataaaagctttcagtgattcttcaaatcatacaaaaatatcgttatcaatgttgaacacctgctgttaaactgatgactttatcatcgagtgaaagcaaaatgtcatatcaaatttattttcttttactcttgccaanactgctcttcttagtttgtttattgattgnggtctttgngctttcaatcttcatcatggctttttgcataaattcttccattgtcaatggcttgtctccttcaccttcatcatctgatgcttcttcgaatgatggcatttcatttctgatcttggncattgaaccattgctaagcatatccatagctctcagttccatttccttctttcgngcagcatatgtagcaagaatatgatttgttctttcttcaataactcccaaatatgcagtcaaattactctctgtcactccttgatgtccaaaatctctaggagcaacttta

SEQ ID NO: 1374 - DNA, 414 bp, Glycine max
  Peptide Sequence Number=SeqID_6717
  Probeset Number=SeqID_11153
gcacgaggattttaaaggagtagtatagagacaacagaaaacacaaatcctccatgatatgttttggagaagtgaacaagttcgaacctattagctatgatactatactaccattagtatcccaatctcctactattagactttcctaatgtttcatgttaaagagtaataattaataggttaaaattactaatttggtatttagtttcatgattgatatattttagttcctatagttatatgattgatatattttaggttaaaagtgatttttttagtttttatgatttatattttaatttttttagtcctataatttaaattggaattcttagtctttataatttatattttaattttttttaatttttataatttgaaagtgacctttttagtaaaaaaaaaaaaaaaaaa

SEQ ID NO: 1375 - DNA, 1524 bp, Glycine max
  misc_feature (6)..(6): n is a, c, g, or t
  misc_feature (15)..(15): n is a, c, g, or t
  misc_feature (18)..(18): n is a, c, g, or t
  misc_feature (66)..(66): n is a, c, g, or t
  misc_feature (100)..(100): n is a, c, g, or t
  misc_feature (104)..(105): n is a, c, g, or t
  misc_feature (127)..(127): n is a, c, g, or t
  misc_feature (155)..(155): n is a, c, g, or t
  misc_feature (160)..(160): n is a, c, g, or t
  misc_feature (163)..(163): n is a, c, g, or t
  misc_feature (166)..(166): n is a, c, g, or t
  misc_feature (223)..(223): n is a, c, g, or t
  misc_feature (231)..(231): n is a, c, g, or t
  misc_feature (238)..(238): n is a, c, g, or t
  misc_feature (261)..(261): n is a, c, g, or t
  misc_feature (306)..(306): n is a, c, g, or t
  misc_feature (327)..(327): n is a, c, g, or t
  misc_feature (408)..(408): n is a, c, g, or t
  misc_feature (454)..(454): n is a, c, g, or t
  misc_feature (466)..(466): n is a, c, g, or t
  misc_feature (496)..(496): n is a, c, g, or t
  misc_feature (574)..(574): n is a, c, g, or t
  misc_feature (586)..(586): n is a, c, g, or t
  misc_feature (593)..(593): n is a, c, g, or t
  misc_feature (604)..(604): n is a, c, g, or t
  misc_feature (607)..(607): n is a, c, g, or t
  misc_feature (1082)..(1082): n is a, c, g, or t
  misc_feature (1111)..(1111): n is a, c, g, or t
  misc_feature (1247)..(1247): n is a, c, g, or t
  misc_feature (1313)..(1313): n is a, c, g, or t
  misc_feature (1341)..(1341): n is a, c, g, or t
  misc_feature (1380)..(1380): n is a, c, g, or t
  misc_feature (1396)..(1396): n is a, c, g, or t
  misc_feature (1407)..(1407): n is a, c, g, or t
  misc_feature (1409)..(1411): n is a, c, g, or t
  misc_feature (1417)..(1418): n is a, c, g, or t
  misc_feature (1452)..(1452): n is a, c, g, or t
  misc_feature (1458)..(1458): n is a, c, g, or t
  misc_feature (1465)..(1465): n is a, c, g, or t
  misc_feature (1491)..(1492): n is a, c, g, or t
  misc_feature (1496)..(1496): n is a, c, g, or t
  misc_feature (1498)..(1500): n is a, c, g, or t
  misc_feature (1503)..(1504): n is a, c, g, or t
  misc_feature (1507)..(1507): n is a, c, g, or t
  Probeset Number=SeqID_11154
acacgncgcacacgncgngccgcgatatcatcgctacgccgcatcacgcctcgtcacatcgatcgngagatcggaccgacacgcgacactttcgtacatnagannacgcacgcgcgccacgtgacangacgcgcggtcgccgcgcgcgcgtgcgntgcgntancanacagcgcggatgttgcgagacgagctgtcgtgtcgtcatcacgcgacgcacgcacgncgatacgnatgactntacagtgtcgcgacgtcactccnggcgtactgtcccgaacgatgatgacggcagtcgatgataacgtnacgatataacaatagcgcagnaatgcgagtagcagagtaggatgagtagcagacgctactcgatactcgatacgcggcgcatgcgtggtagtgtgcgtcgtnccacacgcacgtcgctctcgagatatcacacacgaaacgtaacgantcgcgcacatancgatagtagagcgcgaagcgcagatcgcgnctaacactacaagcacgatagtcgttgtggtcattacatctcgacacactgcatcgcgtcgcgtggcgcgcatttgtncatctgtctctnttctctnattctctctgncgntcctgctctcgtctgtactcgtctccaatctaccgtccacaacctactgcgtcgtcacactctcacattcgtcatgacgtcactgatctcgcgcagtcgtatatcgctgcgcgttcttctttggcgtagacgagagagagtacgacgcgaatcacacgtcctcagcgtcgatcggagtgcgggtgtgacgagagttgatgtattcgaatgcgtctcgtcatatcgcacgtctgttatcgagtgacgtatgtatgtcgaagttcgacgcgagagataagagagaaggcgcgctaacatataacgcgcaagcaccgcctcgacacgctcacgcgtcgtcgcgccatcgcagactgcgcccgcaccgcacactgtgtcgcgtacttgacgcgcgtccgtcgaatccgacgtgagatagagatagtattgaggcgcgtcgcgtgtgcatttgtgtcggtcatgtgctatggctacctgntgatgactgattatggcgacaactgtcancgcgaccgctgcgcgcgctgacctggcgggcgagcgagtgggcgtgaagagatcacatgtacataagatattgagacgcggtggcgcgcgcagtgcgatagtaccggtcgcacactcccacaagagcgcgcgaagnacaatgatatatacgcagatcataatcaataaaagtactagtcactatggtaacgtaattcgaccncgtcgcacgtgcgctaggacacaaacgntctgcgaatctcagtagaacgagaatagggagaaagacnttatacgtagttttgntccactaatantnnnttatannagaggagtctaatgaatagtataatgtataatgngaattntcatcanagggtgggcagtagcaaacaaagaannaagngnnngannganaaccacaaaaaaataaa

SEQ ID NO: 1376 - DNA, 665 bp, Glycine max
  misc_feature (606)..(608): n is a, c, g, or t
  Peptide Sequence Number=SeqID_6718
  Probeset Number=SeqID_11155
aaaacccccccaacccggggccttttttggtgttttgggccttttttggggcttttttttccccatttttttttttgggtttttcccggttttttggggtaaacctttttccccccttttggggggggtattcccctttcccccacccaaaccccgagggccacgggtttttgtaggggggaaagggaaaagggccctaattgctaacaccttttttccggcggtttgccggttcttttatacaattggcccgccggttttttcctctggaaagcgggccttggccccacccaaattatgggagtttggtccatccttggcccccccgggtttttccctttttgtttccggttggttttttttggggattttttgcgggatacaaatttcccccgggaaccagttttttccttgttttgcccagcttggaatttatcctcccttaaggggaccaaaagttggggttccccccgggggggggccctttttaaattgtgggttccccggggttccgggaatctttttttttttttttttggggttttttttttttttttttttttttttttttttttttttttttttttttttttttttttttttttnnngagttcatatacaagcaaatttctttatatatcatatactaatatgtataatttttt

SEQ ID NO: 1377 - DNA, 512 bp, Glycine max
  misc_feature (7)..(7): n is a, c, g, or t
  misc_feature (28)..(28): n is a, c, g, or t
  misc_feature (92)..(92): n is a, c, g, or t
  misc_feature (134)..(134): n is a, c, g, or t
  misc_feature (139)..(139): n is a, c, g, or t
  misc_feature (155)..(155): n is a, c, g, or t
  misc_feature (244)..(244): n is a, c, g, or t
  misc_feature (265)..(265): n is a, c, g, or t
  misc_feature (281)..(281): n is a, c, g, or t
  misc_feature (286)..(286): n is a, c, g, or t
  misc_feature (302)..(302): n is a, c, g, or t
  misc_feature (380)..(380): n is a, c, g, or t
  misc_feature (474)..(474): n is a, c, g, or t
  Probeset Number=SeqID_11156
tcagatntgggagcaccaatgttgtttntgggaatgacaacactgtcatatccgggaacaacaacaatgtgtccgggagtaacaacactatngtaaccggtagtgacaataccgtagttggaagcaaccatgtngtatntgggaacaaacatgtngtaactgacaacaacaatgccgtatccggaaacgacaataatgtatccgggagcttccataccgtatccgggagccgcaatactgtatntgggagcaacaataccgtatntggaagcaaccacgtngtgtntgggagcaacaaagtngtaacaggagatgaatgatcaataagtggattggttccatctttcggagctaatgtacgtgtacaagttcagtatgtntcacaatcacgtggtggggccaatcatgttatgtaacttcatggagacatatagcatccttttcctactttcaataaaatttccctaaaatgtnttacatacacgctccaaatatcaacgggcggcttgcag

SEQ ID NO: 1378 - DNA, 1448 bp, Glycine max
  misc_feature (14)..(15): n is a, c, g, or t
  misc_feature (23)..(25): n is a, c, g, or t
  misc_feature (27)..(32): n is a, c, g, or t
  misc_feature (1157)..(1157): n is a, c, g, or t
  misc_feature (1197)..(1197): n is a, c, g, or t
  misc_feature (1358)..(1359): n is a, c, g, or t
  misc_feature (1367)..(1367): n is a, c, g, or t
  misc_feature (1445)..(1445): n is a, c, g, or t
  Peptide Sequence Number=SeqID_6719
  Probeset Number=SeqID_11157
ttattttttttttnntttttttnnntnnnnnnatcaagaatacctccccccccgtacagaacccacttctgtaatttttcctactatcacaaacacattcatcactcaagacccccacctccgaccacctaaataattttgaaaccgaccgactcattttaaaatttataacaccgaggaaacgaaactattattgtttgtgaatcatagggcttttttttcctgctcactgtgaatagtaacatacgccaggccggccacacaaaatatcacattactaacatagaaaatgataacagatagtaaaagatagacaagttccctttaatatattttggacattagtaaataaaataaaaattctttccgcccctccctccccaagagtattcaaaaaatactctccccacgcaaacattgcccttggtggcaaatttcccacttaacaaaggcaaacaatttttggagaaaactttcatacctaggggagataggggatacattttaaaacaaaaacaatagaaaactacgacaaacaaatacccccattacacaattctgcaaaaaaacaaaccgaaccaactaaaaactaacaaaaatacagagaatacactccacgaacgaaaaaaaatatgaggggccacccaaccgaacccaaacaatatacttaccataccccaataaatataaattttacaaactctctctccccatcatccaccgacagactaatctttattaatctctacaaggtaagctataatcctcaccacacttataaaattataccccttctcaccatacaatacacacaatacttactatcttcccctccatctcaggatcgacacccaaagaaaaacagagcacaccatacaacgcaatcccatacacaataagaactgagagaggacattcgcacgtaactacgatgaggatagtccacatgacagcgctccctatcgtaagacatgatcatcacactacctaacatctatataataaaacacacaatctcacacaaccaccaattactacgacaacatgtagtaacctatcacacggcattgcataggtaaactcacttcataaagacacccgataccgagcagcgcagaataacagatgaagagattgatataacaataactaacacnacatataattattccaccacctcctagccttctcacctancgactaaatagacaaagagtagagacatgagcgctatataactcttactctacacctatatatattgagctgatatgtgaatgctatctctattaacacatctatgcagaacataaccctacactccaatctaatcaattaatagatccagtacaacgacnnagagttanacacaaatagcactaatcgttaactcctgaacagcataccagcgaccacatgactcccttcagtatactcactactancgt

SEQ ID NO: 1379 - DNA, 465 bp, Glycine max
  Probeset Number=SeqID_11158
ctctcaattagtattaccgggcaacagtgcgcggccgatggatctagatccagaggtggtgggagcactgtgacaactaccactagtacgcgcaccctcactctctcaagctagctgagctgagcttctctccggcggtccggcgctgctctccgctccctgcccctgctgctcttcacctccgcctcgccgtccgggaacgcagccgcggtcgcttcctctccggcaatgcacttccgtcacctcgccctctcaccgcggcgacgtcggctcccggatctgaaccagccgcaacctaccgccgccggacagcagcagatcaggtactcatccctggccggctgtgctgcgactcaaccccccatttgcagcagcagcagcagcagctaggtagtaggcagcggcatccgtcaccggcagcaaaggcaggcaggcggtgcgcttgagccaacgcgccacgtgtcg

SEQ ID NO: 1380 - DNA, 1352 bp, Glycine max
  misc_feature (28)..(28): n is a, c, g, or t
  misc_feature (55)..(55): n is a, c, g, or t
  misc_feature (198)..(198): n is a, c, g, or t
  misc_feature (1058)..(1058): n is a, c, g, or t
  misc_feature (1064)..(1066): n is a, c, g, or t
  misc_feature (1091)..(1091): n is a, c, g, or t
  misc_feature (1128)..(1128): n is a, c, g, or t
  misc_feature (1303)..(1303): n is a, c, g, or t
  misc_feature (1318)..(1318): n is a, c, g, or t
  misc_feature (1320)..(1320): n is a, c, g, or t
  misc_feature (1336)..(1337): n is a, c, g, or t
  Peptide Sequence Number=SeqID_6800
  Probeset Number=SeqID_11159
ttgttgttgatttagtgtcacggggcgnatagtgttgtgaatgagcgacgttaanagttgtctagagctgtgagacagatataagtcgaataatgtgttgctattatggagttgcggtacaggagttggtttatatatacaaaatgtttgatgtatgagagctagtgtagtgtgtaatggaagtgttgataaatggangtgtgaggtgatgtatgtagtaggttgaggtggttatggtgagtttaatattatttatattggtgtgtttttttgtagttatatgttgttgtagtgtttgaatcacatagtgagtgttgttataggtgagactgttttcattgtttgagctgaatagacgtaattaattgtgtgtgttgtttattctatttatatatcttttgttaaataatgtaatattagatgttatagaattagtgtgtcggttgtgtataatatttgatgtatgatcggaatgattatttttcatcgcttttccacaacattttattcacttttattttttatataatttccacatcccacaccacaacaccgaggggccaacatttattatccatatttattttagcagctatttatattatgtgttatggggattgagaatgtgagaacggggagagtatagagatgtagttgttgtggtgtgttatttatgtgcgtagttataggcaagaaaacaaataattatatagagtgaatttatatgggtactgagatgttgtagggattgtagaataatatgtatgggttgaatgggatattatgttttcagattgtgtgtgtgtttattttatttgatatcagcgagttcataatgttgtgtttttttatcgcaagaaatattatttgttgttagtgatcgttggagagggagtagtgtagggagtgtgggtggtttttgtgtacggtacaagaagtcgattttgttagcaagtatgtgtatatttaacacctaggtcacatatggtcatgttgtttttgtttattgcgattttttattacttctaattttatttttatatcaatttatatttatncacaannnttgtgtgtgtacacaacaacacatnggtgcagtgggtcaaaccagtgcccacggcataaagngtgtggtgtagactatgaagtgtgttttgtttacgtgtggtgttgtggtgtggggtggtgtgaagaggcggtaggtgttagatgagagatgatatatatatttcttttgtgtgtggttgtggttttgacgaagtttttgtgtggttgtgtgtggtggggtgggtgtttgtgtaanggtgcgcggagtaancncacaacggtgtccagnnacaacaaaacaaaga

SEQ ID NO: 1381 - DNA, 383 bp, Glycine max
  misc_feature (241)..(241): n is a, c, g, or t
  Peptide Sequence Number=SeqID_6801
  Probeset Number=SeqID_11160
agttctgaaacaatggtgtcgtcgaagaaaccgaaccaggagaagaagccgaagaatggtgacggtctcaacacgcgcagctccggctccaaaacgaagaagaagacggcgaataaggcgaagttaaaggacgttgcggagaaggagccggaggttcacgagatctcggaatcgtcgagcagcgaagggaggcgtgatgagccgaaggaaagcaatggcgtggtggtggtggaagacgctnagatgattaggttcccgatgaatcggattcggaggatcatgagaagcgataactcagctcctcagatcatgcaggacgctgtgtttctcgtcaataaagccacggaattgttcattgagcggttttctgaagaagcttacgg

SEQ ID NO: 1382 - DNA, 1912 bp, Glycine max
  misc_feature (19)..(21): n is a, c, g, or t
  misc_feature (24)..(25): n is a, c, g, or t
  misc_feature (29)..(31): n is a, c, g, or t
  misc_feature (33)..(33): n is a, c, g, or t
  misc_feature (35)..(37): n is a, c, g, or t
  misc_feature (39)..(41): n is a, c, g, or t
  misc_feature (60)..(60): n is a, c, g, or t
  misc_feature (92)..(93): n is a, c, g, or t
  misc_feature (262)..(262): n is a, c, g, or t
  misc_feature (336)..(336): n is a, c, g, or t
  misc_feature (537)..(537): n is a, c, g, or t
  misc_feature (886)..(886): n is a, c, g, or t
  misc_feature (1063)..(1063): n is a, c, g, or t
  misc_feature (1388)..(1388): n is a, c, g, or t
  misc_feature (1516)..(1516): n is a, c, g, or t
  misc_feature (1749)..(1749): n is a, c, g, or t
  misc_feature (1839)..(1839): n is a, c, g, or t
  misc_feature (1884)..(1884): n is a, c, g, or t
  misc_feature (1912)..(1912): n is a, c, g, or t
  Peptide Sequence Number=SeqID_6802
  Probeset Number=SeqID_11161
ttttttttttttttttttnnnttnntttnnntntnnntnnntttgtgtatgttttttgangtttgttattgcgtgtgcgtttgttgttgtcnngtgtcccccggcctccggcgacgcgccgcctcccctgtctgttcgatctgtgagggctagaagtgcctgtgtgtggttgtgtgtgtgcagttgttctacgtgtttagtcttatagtgagtcaggacttacatctcgtctcggagagaagcaaactttatcgttgttttntatgtgtgtctgtatcctctatgtacggttgttgggcgtctcccgccctgcttgctcgtgccgtttgtctgtgntattcctgttcgtgcgtttttctctgttctctcagaatcggacaggcagttaggtgaccgttcctactacgtgtcctgggctctttactatctttgtgggtcctccgctcccccctccacgcgcgcacctccccgaacccgcgtcactccccgtccgccgacggccgcgcgtgatcggcgcggcgtaggcgcagcgctggncgcaggtcggcgtgttgtactgtatttctttgtgatcatattcagaatcaccgccacacacacaaccaccactctctccgtatggtgtaagggcgagcggcgttgttcgtctctagatatgcgtattctgcgcaccacgctctcacccgaccgacgcccgccacgtgcggatgttctgccgttcacttgtgtctgtgtcgtcgcctcacgcggccctacctacctctcgcgctcgtctccctcctctccgcgccgtgtcgcccgccgcccctcctattctacgcgagatgctctctacgtccctctccctctcgctgtcgtcgaccgccttctcttctctttggtaggntgggtgagtgtgagtggatgtctgaagagtgagcatgcgtgcgtccatggcagggccgaatggatgcgccgcctcagactatacttacgcctctagcatcgctgatccttgtacttttctcctgccttcgccgcctggctcctgctgaacgtgtacacgcctgtcctgctcgcatgnactcgccttccatctattctactcactacttctccttcgcgcgcctcatcaccggcctcttccctcctcgtcctctctgctgctccttcgcgcggctgtcctgccgctcccctcgtctgcgtctcattgagtgtcgtctctgcttatgtcctcggcgctcgctacagcatctggcgctgtaggttctgctgcgtcgtgcagatgtatctgcggtgtggtgtttgtctagtatatacccatcggtccatccccattcctcgcacatcgcctccatacctctccgccgccaccacctcacctcgcgctcgggcccgcgttcctcctncgccctgcatctgacgcagcatattatctagtgcgtcgtcatggtatatatgtcttatttgtctaatcgtggtgattagtacacaaacagtcaccgagtgcgcgtctctctctcctcttctgtggtgncgagccgtactctccgcgcgtcgtgtgtgattctgtgagccgttgagtagtgcgatctcgcttctcctgcgatgcgctgtaattatatctctatcatatccgcgcattctcttcactactatctctccgcgttacatgcatgcactacgacgtctccgcgatccccctcgcatcttctcactccatcactcgaacgctaacgagaacgccgcccgaacgacgacaatacgaancgagacacacagatgtactgtatctaacagcgcatatatgtatgtagtctatcagactgtactagaatatgcctcgctcatctgaacatncaccatgtgaccgcgaacatcggctaccactacatactgtgtagnacgtctactacgcactgatctgcgtagn

SEQ ID NO: 1383 - DNA, 1262 bp, Glycine max
  misc_feature (691)..(691): n is a, c, g, or t
  misc_feature (703)..(703): n is a, c, g, or t
  misc_feature (989)..(989): n is a, c, g, or t
  misc_feature (1219)..(1262): n is a, c, g, or t
  Probeset Number=SeqID_11162
agcaaaggacccagaatttgcccaaaaactgcataatgttctagtagagagtggtgccttacctcctcctgatcttttttcagatataaatccccaagataggggtgtagataaagtaaatgaaaacattgttgattctgttcaagctgacaactctctcataccctcacatggggtgggctctgccagtgatactaagttatgtcaatcagctgactggttagcggaacagcaaaaagaattgcataggaatgttgaattttacaatttttcacagggtagtaatacaaggaatgggtttgtaaatgtttatgatagagataatgacatagagcaatctaacacaatcaatgttgttttggcttctatccattcacataagatatgtaaagaaaagcgtcctgaatcttccttgcccaaggcagctctttcctgcaaaatgcataatggggttgactgtttctgtgaagatgaagaaaatggctttagaaacaatgttgaagcttctttaaataacagtgaattacggaaagattcagccattctaataaatgagatgggggtcaatggagattggtatgatggtagaaacaaggaagttaacccagttcttggcgaaagctcagaatgggaaattcaatgggaggatcttggatattgggtgaaccgtattggtattgggtcttatggngaagtttatcgngctgatgcaaggcactgaaattgctgtaaggaaagttcttggacaagattcttggggatgcctactcagtcaattgaagttggactgatagttcgtgatggctggcaaacgagccacacttgcgggcatcattctcacaactgatgtctcgtcttaccgacttcaacattgattgtcccaaaaacaagctcaacacattaaacgaagttgtctataacatagctattgtaataatacttaaagctgttccttggttcaaagaaccagaacagctaaagtttttctnttcttttctttttttcgtccatcttgacatatcaagatattgctgaactggtaagtgtcaggtacattctaagttgggactggacacaacccattcagaaaagagcagggtccctccccaatatctgcataagtgcagtggaggtttagttggagtaggtacaaatgaagaatccccagagggaagaaaggcaagaaacataaaggaaaaaaaaaaagtacaaaattatnnnnnnnnnnnnnnnnnnnnnnnnnnnnnnnnnnnnnnnnnnnn

SEQ ID NO: 1384 - DNA, 343 bp, Glycine max
  Peptide Sequence Number=SeqID_6803
  Probeset Number=SeqID_11163
gcatatcttcgtgaaaactctgacagggaagactataacccttgaggacgagagcagcgacaccatcgacaatgtcaaggccaaaattcaagacaaggaacgcattcctccggaacatcaacgtttgattatccccggaaagcaacttgaagatggaaggaccctggccgattacaacatccagtaagaatcaacccttcatctcgtcctcaggcttgcaggtgggatcattgagccttccctcatggctttagctctcaaatacaaccagcacaagatgatgtgggcggagtgctatgcccatctgcagtctgaggatataaactgccgccagagaaagtgc

SEQ ID NO: 1385 - DNA, 578 bp, Glycine max
  misc_feature (193)..(193): n is a, c, g, or t
  misc_feature (230)..(230): n is a, c, g, or t
  misc_feature (439)..(439): n is a, c, g, or t
  misc_feature (442)..(443): n is a, c, g, or t
  Peptide Sequence Number=SeqID_6804
  Probeset Number=SeqID_11164
tatgatcaaccaggcttctacatgtgacctgaaagaacttgtttcgaagttcattccagaagttattggtaaggagattgagaagtctacctccagcatcttcccacttcaaaacgtcttcatccgcaagggtgagatactcaaggcccccccagtcgatcttgggaaactcatggaggtcatgccgactacnaaagaggggatgtgtgtgaagcttgaaagggctgtcnagggaaatgaggctgggcaggaagttgctgctgcccaaaaatttggttgctacttctggacctaggcaggcctgaaattggggttgcttttgacggaaactaaaaaggtggctgggtaactgttttccttgggccctaaaatttggtttgaaaaaagtttaaaataaaaaaaccccggggggaaaaaaaaaaaaaaaaacacccccaanaannaaaaaaaaatttttttttttccccccccccccgcgggggggggggggcgagaaaaatttcccccaataagggggaggaaataaaaccgcggccccgggcggcggctttttaaataacggggggggggggaaaaaa

SEQ ID NO: 1386 - DNA, 587 bp, Glycine max
  Peptide Sequence Number=SeqID_6805
  Probeset Number=SeqID_11165
acacctatagctcgaccgatgcgtcgccggacggccgtccacgcggtcctcgttgccgccggcctcctggtgctgctggccacgtactcgccgccgccgctgcgttctcctccagtgctgctactgggtggcgacgccgacgcgggtgcgcagggtagccggtcggcgcagtcgacgccacgtgagaggaggaagctgggtgtggtagccggccggcgcttgggccagagagtgcccgtgaagccaccctcgccggaccccaacggctggaagacgatggtgaagcccgtgccgccgccgccgccgccgccatcatcaatttactaggcgtacgaaagcagtatgccgatctggtgctcactcgcccatgctatgcaacgtcgcgtacttgcgcgtggccgacggctgcaaaatcttgtcttaggactgtcttttcatttcctgtggtgcttctaatggcgcttatggatgactggaacggtcttttgctccgtgcaaaagcatgaaacctccagtttcgctatttgtagccactccctaattttgtttcgtgggrccaaaataatgttaatactctactctttctt

SEQ ID NO: 1387 - DNA, 1352 bp, Glycine max
  misc_feature (5)..(10): n is a, c, g, or t
  misc_feature (334)..(334): n is a, c, g, or t
  misc_feature (1352)..(1352): n is a, c, g, or t
  Probeset Number=SeqID_11166
ggggnnnnnngggggtgaggggaatatactaataaatatatttttattaacatcattctattaagcacacataaaattttgcacctggatgtggagaagagcgacaggcgaacacgagcaggtggtgggcggcttgggatagaattcgaagtataattactatgttgtttctccgcagcaggccgggcagcaccagagtacccggaagggaggatgatcatatgcgtgtccggcgtcgcatccaacatgaccaaatacgacgatacttcactatctcctctcggtgctggacaatggccgttgtgtgtcatcgaaccatccatcaatgaatcangtggtgactcacgcatcccacgtcgagggcctcgggtggttgattaatctagatctcgaattatctgctattacttctatttatcactagcttataccccgttcgatttatataaattatagatattatttttccagaagggacctaacgcatacaacccatagccggtgagatagggtcctcggccatacaccgtccactagctacggccccttcccgcatgggggggtagtaaagcataaattattattactatatagacagctaacggcaaagacacgaagagagagtcgacacacgtattatgcatccatctctctattcactatctgaaatcgccacacactcgtcggactatcacaacacatgagatgcgacgtcaataagcgagcaggccctgaactaacacagccgctcccttcgtgttcctcatctccatttgtatgatgtaattaactataatcgctactctaatatactaataccgacacaaatacacttcaatcgttcctctctctggtcatatcgctccactctttctttcttcgtgcttcaagtagataacattaaacatcgacactaaccacatgttctctatttcaaatgcatcacgaacctccccgctctcacgttccgttgtcatctctctgtgttatatctcactcctcagtctatcgctccagccgctgaccgcgttgctcttcatcgtcgacgccgtctgtcgtatgtgctgtgtgatgcagacctacaactcactcttatcctccgtcgctacataacacaaagctagctacgagttacatagcgtgacctatagtacgcaacctctcacatcatctcagggcgaactctcctcttatgtctctatcactactcactacttctctgctgcccgtacgcgacgactatacagtctgtatatctctctctatctgctctcctcccgcttctttgatatgataggactcttatccgtattgcctgtggttgtggttgtgctcgctcgcgtgatacactn

SEQ ID NO: 1388 - DNA, 1757 bp, Glycine max
  misc_feature (5)..(7): n is a, c, g, or t
  misc_feature (20)..(22): n is a, c, g, or t
  misc_feature (29)..(29): n is a, c, g, or t
  misc_feature (110)..(110): n is a, c, g, or t
  misc_feature (122)..(123): n is a, c, g, or t
  misc_feature (141)..(141): n is a, c, g, or t
  misc_feature (143)..(143): n is a, c, g, or t
  misc_feature (166)..(166): n is a, c, g, or t
  misc_feature (243)..(243): n is a, c, g, or t
  misc_feature (251)..(251): n is a, c, g, or t
  misc_feature (259)..(259): n is a, c, g, or t
  misc_feature (365)..(365): n is a, c, g, or t
  misc_feature (387)..(387): n is a, c, g, or t
  misc_feature (398)..(398): n is a, c, g, or t
  misc_feature (400)..(400): n is a, c, g, or t
  misc_feature (441)..(441): n is a, c, g, or t
  misc_feature (444)..(444): n is a, c, g, or t
  misc_feature (497)..(497): n is a, c, g, or t
  misc_feature (500)..(500): n is a, c, g, or t
  misc_feature (513)..(513): n is a, c, g, or t
  misc_feature (538)..(538): n is a, c, g, or t
  misc_feature (559)..(559): n is a, c, g, or t
  misc_feature (587)..(587): n is a, c, g, or t
  misc_feature (650)..(650): n is a, c, g, or t
  misc_feature (814)..(814): n is a, c, g, or t
  misc_feature (820)..(820): n is a, c, g, or t
  misc_feature (831)..(831): n is a, c, g, or t
  misc_feature (1236)..(1236): n is a, c, g, or t
  misc_feature (1261)..(1261): n is a, c, g, or t
  misc_feature (1330)..(1330): n is a, c, g, or t
  misc_feature (1333)..(1333): n is a, c, g, or t
  misc_feature (1353)..(1353): n is a, c, g, or t
  misc_feature (1357)..(1357): n is a, c, g, or t
  misc_feature (1401)..(1401): n is a, c, g, or t
  misc_feature (1544)..(1544): n is a, c, g, or t
  misc_feature (1568)..(1568): n is a, c, g, or t
  misc_feature (1657)..(1657): n is a, c, g, or t
  misc_feature (1670)..(1670): n is a, c, g, or t
  misc_feature (1698)..(1698): n is a, c, g, or t
  misc_feature (1725)..(1725): n is a, c, g, or t
  misc_feature (1728)..(1728): n is a, c, g, or t
  Peptide Sequence Number=SeqID_6806
  Probeset Number=SeqID_11167
ttttnnnttttccccttttnnntttgttntttttgtgtgttactttagctagtcagtgcttccacccacatagatatatagaatgtggatgaaataggtatgtgtgtaanatgtgtattatnnccccccccccgcgccccncnccgcctcccgcacaggctacacntaacacacaccacaccctctgaggatgtgtgcgtcgccgccatctctcatctataactttatatagagttattctcncacaggcngagggagnagtagaagaggaaggatacgtgacagcgagagtcagctcatcatctactcactcactacatcattacttctatatataactacatcacatgatagatacatctgtntacctagtctcacctaaagaanacggacctaananataaagactgtctcgaatcctacacatctaaaccaaagtanttnctcactctctctctacactcaatcggctcatcagaactcactcatatctccgnatnatcacacacactnctctgatccgtctcctagtctctcncttcattctgcaggcctcctncttccgtcgcccgcactcccctcactcncgtatacgtaatgtcgtcgtctatctacctcctagataagaccacatcgctcactgtctcgcntccgcgcgtgcacacgcatcgtactgtagtatatacatctatgacccaactctccacattacaatccaatcacactagcactaaggtacgacgtatcatctcccgctcacgctatatcatgaatctcgcagaaactgccgataacaccatcacatatagataanacaaanagtatctatcnaaacacactacatatgcaaagtcacagtaaacatacacaatcgctgatataattctgtacctctcatctccatatacactccagcctcgcaccactcatatgaactcgcatggtgcgccggcatggcgattacgtctctagtattctatatgtttactatcctgatagacgtattagtaatatatatgtctatactctcaactgatgtaataaagaaacattggcactaatacgcatcatgtcaccgatcactgtactcatctctcaatctaaatatacagacatatatgacgacacgtagacaagagactctacattacaactctctatataatcataacaaatctactctgtaatctctcactatatcaacaaccacagttatctcatcactctacgtagtgntgtgagacactagacgatatgtcangtagtgatatgtgaacactacgcgcgcacgacatcacatgcagtacctgatcatcaatatactgtgtgntangccgcgcggcgtgccacgcnacgnctagtacggagctacgctcgtcttcgtgctgctgtgctcgtcgncatctacatcacgcatgacaacacgcctgtctcgtgtacactactatctcataccaaccgtcggatatgtagctgcatcgtcgatactgatctaccgagagtgagactacaagataatattcatcatgcataaatcatagctntatcgtgatctcgcgtacacatcntctcgacatcaccactctcacactcagatatgagcctgtgcgcgcatctcatctacctcgcattctgctcgtttatcaagcaaattggnactcagtgagcgntactcgtgtactagatatcactacattncgaaggaatgtgccacgctcccgactncantcgtcgcgcctgactgtcgactggtcgcg

SEQ ID NO: 1389 - DNA, 1486 bp, Glycine max
  misc_feature (879)..(879): n is a, c, g, or t
  misc_feature (916)..(916): n is a, c, g, or t
  misc_feature (951)..(951): n is a, c, g, or t
  misc_feature (1210)..(1210): n is a, c, g, or t
  misc_feature (1266)..(1266): n is a, c, g, or t
  misc_feature (1282)..(1282): n is a, c, g, or t
  misc_feature (1326)..(1326): n is a, c, g, or t
  misc_feature (1398)..(1398): n is a, c, g, or t
  misc_feature (1400)..(1400): n is a, c, g, or t
  misc_feature (1408)..(1408): n is a, c, g, or t
  misc_feature (1486)..(1486): n is a, c, g, or t
  Probeset Number=SeqID_11168
ttgtgggcaccgcccgtattaatctcaatcatggtcaaacatctaccgcagcgtcgacctccccccatatccccacggcggcgcgggccagcgcgaacatatatacggtaatcgctcaacgcaggcggaaagcacagacgtaacaccgccgggcgacgcgggtttattgtattaatgtcacctcaacccgtccaaggcgcggcgcgattttgattaatcttactaacggaggaacgcaggatagcgcgccggttgcttatcctatactctcggcgggacggggcgctataaaggcggggtggaagcgtcgtctcggtcaccgcaaccactcctatatccgcggtctgcccctcatttatgccgagctggtacccactcacaaactttcacgccatacatggctcccttctccgcactatcacacacttactaaatattctctctgataaggtgttgcttgagtaaagacaccgaatcgcgacgacacgtgaatatccatttcttggcgccgtagtgtgctccggaccggctattggtagcccgcccgccaacgaacacgtattctcttgctcaaactacactccacgtccctacacctaatacacgggatccgatatagccgaataagtatagcgcgcctaggagatgctaagcgatttatatccgtcgcgtcgacgcactatatgcgcgggccggtttgttgcaggcgatgtgtcgagtgagcggtagtgaatgcacacgattgcgcccgttaccggacgtgccagttatctgaccgcgatatcggcgtttcgacattgtttctcgacacgcacgcgccgacgaattatccgatacgcgtgagacgcggcgagtgtattgataacgttcagtataatngtcatgtggcgctttaccgtgtccgagatatcgcgcncgcctatcttatcgaccgcgtaataatacctgtanagcatgcgagcgatattcggctactggcacatgtaatagtaagctcgctccaccgcgagcgcatgcactgattcgcctgtatgtgattgcgatgtatgatcgtcccactccgcgtctggtggcgagtaagcgccgcctgtgtccgtatgcgttatatcatatatattatacaccggcgcgacatcatccgcgcgccatcatttatgcgtatatcgatgcagagctgtatatatatatctcgcgactcgctgtgacgaantacgcccgtcgcgttatattatatgtatcgtcacgcgcgacacagcagcgcgcatngaaagatacaaaaganggcgataatttggtaggtcatcactcctgctctgccgtcacgancatagcgtaagacagtataatatcgtattcgtatacgaaattcgtgtgacgcgccgcatagcaatgtatatncnccacgctntatacacatatgagtatatgtacgcgcgtggcgatgacgctatagcgagtatagcacgtctgactgcctgtacataan

SEQ ID NO: 1390 - DNA, 375 bp, Glycine max
  misc_feature (4)..(4): n is a, c, g, or t
  misc_feature (324)..(324): n is a, c, g, or t
  Peptide Sequence Number=SeqID_6807
  Probeset Number=SeqID_11169
aggnccatcatggccttgttcttctctcctctaacctccgctcttctcttcctcaccctctccctcgccctctactgctccatcgaccccttccaccactgcgccatctccgacttcccaaacttcgtagctcacgaggttgtctctccacgtcccgatcaagttccgtgggagagagactcacagaactctctccaggggtccaagattctgttccaggaccaagtccagggtcccgagagcgtcgcctttgatcctctaggacgcggtccctacaccggtgttgctgacggtagggttttgttctggaatggcgagaactgnactaacttcgcttacacgtcaagcaatcgaacggagatttgtgatccgaag

SEQ ID NO: 1391 - DNA, 466 bp, Glycine max
  Peptide Sequence Number=SeqID_6896
  Probeset Number=SeqID_11170
actagtctagtatacttactttccatggcggcgtccccccacctactcgtcttcctcgttgtggcgctcgcggccagcggcagcaacggcgccgtcgccgctgcgggcgaccatgacgatgtgcagctgcggaaggtagacctgtcacaggccatcgaggtcctttcccgctaccgcccggagaccactgatgcagagaccctgaagcgggccgtggcggtggtgaaccgggaggcgcagcggtactggaagcccatcttcaacaacgtcaacaaggtgatgcacagcggcgccaacgactgcaccaaggaggaggcgttcgccgcggccaaggcgctgctcaaccgcgagctcgggcaaggcccggacgccatcaagatggacttcgagtacgtgtgacctgcatgcacgcatgacacatcgccacctctggcttttttttttctttcccttgggccttagcgtg

SEQ ID NO: 1392 - DNA, 1082 bp, Glycine max
  misc_feature (152)..(152): n is a, c, g, or t
  misc_feature (341)..(341): n is a, c, g, or t
  misc_feature (389)..(389): n is a, c, g, or t
  Probeset Number=SeqID_11171
gggtacccagggtttcccattcccgcgtttaaaacgggccaatggattttattcgctccctttaagggaaatgggttcgggccccccctggaataagttagttggcccccccccccccattttgaaatgatgtataatctagctaccttagnccatgggatatgctctttaaaattgtgtgcaaatgctttctggaaatctgaatggatactctgatgtatgtgatattcccaccaccttaccaggggatacctcactcgtaaaattgtatgtacaccttggcattagtatgtttgcttggctaccagtgagtctcctttaatgcccacactgaatgggtnttattgtcatggcatttgattttaggttgccgaacgactactagagcngggaactcggtcccttgggaaacaattgctgttggagctttatctggtgcctggccgcctgttgttacaccgcccttcgatgtcatgaaaactagaatgatgactgcacaagggcccatctgtgtcgatgactttgatagccttctccatactaaaacatgagggaccccttggcttgttcaaaggagcagtaccccaggtccttttggattgctccccctggtgctatgaactttgccggctatgagttggcaaagaaggccctggattaataatgaggagggcaaggccaggccgtccagagtaatatctctagttacctgggattttgtggtcccacagcaaccaaatgtttgggagaaatttttttgagttggttgcaagtaatccttggaataaaggccattggataccggcctctgaaaaaaccacattttgtttccctttccctcattcaaacttcccatggaaaattgccctttttttcccccaaaaattaaaaaaatatttcctccaatatttttggaaaaaaaaaaaaaaaaaattctgcccccccccggggaatccctctttttctagaggccccgcccccccgcggagggaatctccgcttttggccctcttttaaagaggggcgttatttcccagcttggggaacaacattgcataatactggtcctcccgtcggaaaat

SEQ ID NO: 1393 - DNA, 627 bp, Glycine max
  Peptide Sequence Number=SeqID_6897
  Probeset Number=SeqID_11172
cgggggttgggacaaggacgggtggaatgggagagaaaataacggggacaggttggaagggtttttaatatgggggttgtagtgattatgaaggaaatggggttactcggggccccctccttggggggggggtgagtatggaaaggtcccggatacggggtaatacagccgtgaaaggcgtcgtgttaataaagcgcgcacttcagaaaagaatgagttgttagttcatggtagtcatcggggtaagggaacatctaaactagcgcctcaacgcggaaaagcgaaggattgttgcacactaacatgggcagggtttagacttgcatccaggggtggccctgcctattacgttatgttcagtaaagagggtcaaaaaaggtacaagctgctgcagtagcaacattatcctggatgcgcagtcagaaaattttgtatagcagccatcagagtcctctgtgcagatcgccatagggcgcttgtagtttgtcgaccaggagaggcaacacatcatctatgttggtgtgtctgtggcatcaaccagaagaaacctaataacctcggtaaaaatcaggatttgtggaaggcagccttgccaaattaatgcaagctcagctatcccatgtaaat

SEQ ID NO: 1394 - DNA, 744 bp, Glycine max
  misc_feature (744)..(744): n is a, c, g, or t
  Probeset Number=SeqID_11173
aattgttattagaaaatattgactatgcacttgacacgttcctaatttatatgctaacactgtctattttccctggattcctcttagaagatactggatcacatagtttaggcacctggtatgctcttgttttaattgctatgtataatgtgtgggatctgattggaagatacattccactcttgaaatgcttgaagttggagtcccgaaagttgatcactataacaattcttagccgtttcttacttgttccagcattttatttcactgctaagtatggtgaccaagggtggatgatagtgttaacgtccttcttggggctatccaatggttaccttactgtctgtgtactaacacctgttcccacaccacccaatcttactccacaaaatgccaatcgagtgtgaaatgctcttgctcttcttcagtgtgttgctgcacacctggcatacaaggatgctattcctcaatggtattgtcactttcctcattcatctgaaggactttgaacttctgtctggttctgtattgatcacctttgtgttacgcgtctgatagaattagcatgttcgtaaaataagcattttccatttgctcaagtgctttagacggtggtgtcagctttttttgatttggttaatgccatctgggtaatatgatgaattggaagctctggaaactataagatcaagatgagcattgtggggtataatacaagtcaagttgatgagctaaataatagan

SEQ ID NO: 1395 - DNA, 565 bp, Glycine max
  Peptide Sequence Number=SeqID_6898
  Probeset Number=SeqID_11174
tcagagttctcaggtggttgctcccaaagctgagcacgatgataacactctagatttgctcttggttcatgggagtggaaggctaaggctgttaagatttttcttacttctacaaatgggtcgacatctttcactgccatatgttgaatatgtcaaggtaaagtctgtgaggataaagcctgggaagcacactcacagtggatgtggtattgatggtgagcttttccccctcaaagggcaagtgattttttttttgcttccagaacagggcaggcctgttggtcgccttcgtatatgaaaaccgagttcttttccattctttcatggggtctgggaagttcatggcccctctcataaatatgaatccagatgccccatttgtcttgccaattccttatcgctgtaacagctgagctttgtaaatcttttggtccgggtaaaaggatctggtggtgccagcctacccggctttactttgctttcataaaaaagaaaaaaaaaaactgcccctttcctgccacaagaagctgaatgtattgctggtccccctttccctggattggtc

SEQ ID NO: 1396 - DNA, 729 bp, Glycine max
  misc_feature (525)..(525): n is a, c, g, or t
  misc_feature (529)..(529): n is a, c, g, or t
  misc_feature (532)..(533): n is a, c, g, or t
  misc_feature (537)..(537): n is a, c, g, or t
  misc_feature (545)..(545): n is a, c, g, or t
  misc_feature (575)..(575): n is a, c, g, or t
  misc_feature (615)..(615): n is a, c, g, or t
  misc_feature (627)..(627): n is a, c, g, or t
  misc_feature (629)..(629): n is a, c, g, or t
  misc_feature (634)..(635): n is a, c, g, or t
  misc_feature (639)..(639): n is a, c, g, or t
  misc_feature (645)..(645): n is a, c, g, or t
  misc_feature (659)..(729): n is a, c, g, or t
  Peptide Sequence Number=SeqID_6899
  Probeset Number=SeqID_11175
tttcaaagggcctctctgagctctgttactcgttgataatcagaatgaacgcagaaaagttggcaagattggcagaacaggtcagaactggaggacctggatccgtccgcagaaagcgcaaggcagtgcacaagaatgtcactgttgatgagaagaaattgaaagcctccttgaagaaattgggtgttaacgacattccaggcattgaggaggtcaacctcttcaaggaggatggcactgtcatccacttcgtcaaccccaaggttcaagcttccattgccgccaacgtcagcggaacatacgttatcagtggaacagcagagacaaagaagttgcaagacttgctccctggaattatcaaccaactcggcccagacaacttggccaacttgaagaagctcgccgagcaatacaagaaggacgactctgctgctgccgacgacgacatccccgacctcgtcgagaacttcgaggctgtgtcaccgagccaaggccgagtaagcagaggttcctgtcattatatanaaanaannaatnattcaaanaaatattacaaataaaaaaaaattcctgcnccctgggtcccttttttaccgccgccccggggggactccnctttgtcctttntnaggtnnttcngcttgngtatattgctagtnnnnnnnnnnnnnnnnnnnnnnnnnnnnnnnnnnnnnnnnnnnnnnnnnnnnnnnnnnnnnnnnnnnnnnn

SEQ ID NO: 1397 - DNA, 442 bp, Glycine max
  Peptide Sequence Number=SeqID_6900
  Probeset Number=SeqID_11176
ggcttgaaggtcttgtcagaaaaacagcactggattttgatgttgtgaacattgcaaaagcagccaagggttctaaggaagccaagattgctgaagtcggatctgacattgagctgttaacaaagcagagctgaataccttttggttgcttaatctctcctgtttcctccaaataaactcaaggtcagtagtttgtaatggaactattggagttggaaaatcagatggtatctctcaacaaactgggttgggcatacgagcttctacccctagaaacaaccaagataataattcccttgtcaatgataggaggggtcgtcctgttagttcagacaaggaaagggtgaacttcagagttgtaaacaagtcttttctgacttggagcgttcagtgtgtagaatggtccatcgacagggatttattgcatccgcccttaattatg

SEQ ID NO: 1398 - DNA, 1759 bp, Glycine max
  misc_feature (87)..(87): n is a, c, g, or t
  misc_feature (142)..(142): n is a, c, g, or t
  misc_feature (318)..(318): n is a, c, g, or t
  misc_feature (339)..(339): n is a, c, g, or t
  misc_feature (418)..(418): n is a, c, g, or t
  misc_feature (489)..(489): n is a, c, g, or t
  misc_feature (1452)..(1452): n is a, c, g, or t
  misc_feature (1549)..(1550): n is a, c, g, or t
  Peptide Sequence Number=SeqID_6901
  Probeset Number=SeqID_11177
cgagatgctgcgtcgtgcgcagatatggttcgcgattaaaatccgtgcggctctcgtcatcgctcatattcactcgggatttgcgtnttaccaccgcgcgcgcctccgtcctacccaatatcccacacattcgtttccgagnggtcgaggatgcgctccatatatatggttgagcagcgttatatgatcccgcgcgcagtaatcatgcacccgcagaacacattgatacgcgtcgcgtgtgtacgcatattctcactgcacaccatacacgacgcgcctattatcattctgtcgccacctcgcacagcggcgcgcagnactgcaacaattatatcaccncacattattatgattgtgttcatattatgcgccgcgctcgcgcgagccctgctcgcatcgtatctcctcctcatgtatnttctgcgcgctcgtggccggcgctatatattttctctcgtccctcccgcttattattatattttgccgcanatacgccgcgcgcgcgtctccttcccgtgcgtgcgttatttattaagtacgctcttggtcgatctcgcgccacgtcattcgtcactccactctctatatctctacatttattcctcacactacagcggctgttggttctctctatcctacaataactccacatcatattcacggctaacactacgtagtgagtgtatatacaaaacagcttgtatgttaacactatcccatccgcgagcgggtgtagttggtaaacaaaactagctccagcagcgatatacaacattaatctctattagcgtaatatagcgattatctagataccctaccgaccgctttttctcattattttctaggggccgagcgcgtggctcgtcaccttcacacacacccctcatcatcccaccaattatacccgccgcgggttttttcttaaatttccgccgccgcgcacggcggattattttatattcgcggccggggcggaacgcgtatctacaccactaatatagcgcacaaaataataaacaggggggcgggcagaaaagaataaacaaaccccaaacattctgtgcggcgagcactaggtgtatattctctctggcagtggcgtaatttattcataatcctaagccggaggcggcgcggttttattaaacagttaaataaatgagcctcctcacgccgcgcttccttaatacacccccatttccccgtattctgtttttgtgggggcgcgggggggatacgccgcaacccctccctctattatatatatacgcgggcgcgtatcgcgctcaattataattaatatcaggggctgctcggccaattataataatactatgcggcgggcggaaatacgatatattgcaatattataacgcggcgggattaataatacgcgcgatatgttcggtgttgtttaatattataattataggcgcagcgtatactatacantgggcgcgggagtaaagctctggttcataacccctatgtcgtgggtgacatacgcggacaatttctgatttagggtgcgcgtctccctccttatcannctatatcaaacctacaaccacactccgcgcggcccatcgcaccaaaatagatatctcgtacataggggtaattacagtccgccgggtacgcgtctatgacaacacacccaagccatattatatcccccgccccgggtttcggcgcgcctttacaaaatattttagtgtgcgaatattcgtaagcgccgcccgcactgccgccacccatc

SEQ ID NO: 1399 - DNA, 655 bp, Glycine max
  misc_feature (601)..(655): n is a, c, g, or t
  Probeset Number=SeqID_11178
atttcactcagccaaatctgtgaagctcagcttctctcatcaatggcgaaatcagtggcgacggcgacttcttccctcgtgcaaaccctcagacgttacgtcaagaagccgtgggagataaccggaccttgcgctcacccggagtacctcgaatccgttccgaaggcgacggagtatcggatccgatgccccgccacgatcgatcaagaggcgatcgtgccgacctcggatcccgagacggtgtacaacatcgtgtaccacggtagagatcagcggcgtaaccgtccgccgatcaggcgatatctgttgaagaaggaggacgtggtgagtgagaagaagatgttcgaggagacggacttccctagggtttacttgacgaccactgtggaggaggatgagaacgcacgtggcggaggctacgagtaacaaaaaaaaaaggtttccttgtagtctctgacttgctgatgggcgaaggactgcgtgcgatatttctctaccgacagaagattttccatggtttgctttactaataaggtttgtagtagcttaatgtactggcagacacactatttttcttcacaggaattagattgctggtcannnnnnnnnnnnnnnnnnnnnnnnnnnnnnnnnnnnnnnnnnnnnnnnnnnnnnn

SEQ ID NO: 1400 - DNA, 457 bp, Glycine max
  Peptide Sequence Number=SeqID_6902
  Probeset Number=SeqID_11179
aacaagcgagcgaacacacagcatcgtcgcacgccattgcttagtagccagggaaaaagagaagccgatctgattctgctctcatcacacacaccgccatgccggggagagaagacgaagccttcgctgacgaggagagctcgcagtgcagcagcggctgccagtccggctggaccctgtacctggagcattccgggtcaggccagcagcaacgtcgcacgctgccatacgtgcagcccggcgacgtcctgaggcagatgctgccgcaggtggaatactccgacgacgaggaggaggattctatggtctccgacgcgtcctccggcctgccgccgcacctgcgcggcgaagaggaggagctgctgcaagtgcaaggtcagaccagcatgctttcacagcagcgtcggtcggccttcggcggcgaccaatgccactccggctggggtggcagtcgtca

SEQ ID NO: 1401 - DNA, 1795 bp, Glycine max
  misc_feature (32)..(32): n is a, c, g, or t
  misc_feature (34)..(34): n is a, c, g, or t
  misc_feature (37)..(37): n is a, c, g, or t
  misc_feature (72)..(74): n is a, c, g, or t
  misc_feature (119)..(119): n is a, c, g, or t
  misc_feature (229)..(230): n is a, c, g, or t
  misc_feature (234)..(234): n is a, c, g, or t
  misc_feature (272)..(272): n is a, c, g, or t
  misc_feature (334)..(335): n is a, c, g, or t
  misc_feature (337)..(337): n is a, c, g, or t
  misc_feature (339)..(339): n is a, c, g, or t
  misc_feature (376)..(376): n is a, c, g, or t
  misc_feature (440)..(440): n is a, c, g, or t
  misc_feature (455)..(455): n is a, c, g, or t
  misc_feature (640)..(640): n is a, c, g, or t
  misc_feature (885)..(885): n is a, c, g, or t
  misc_feature (1089)..(1089): n is a, c, g, or t
  misc_feature (1101)..(1101): n is a, c, g, or t
  misc_feature (1305)..(1305): n is a, c, g, or t
  misc_feature (1416)..(1416): n is a, c, g, or t
  misc_feature (1426)..(1426): n is a, c, g, or t
  misc_feature (1562)..(1562): n is a, c, g, or t
  misc_feature (1618)..(1618): n is a, c, g, or t
  misc_feature (1638)..(1639): n is a, c, g, or t
  misc_feature (1691)..(1691): n is a, c, g, or t
  Probeset Number=SeqID_11180
gcgcgccgcgcgccggccgagcggcgcggcgngnaangcagaacacaccagaaaccgcagatagaggacggnnngtgggcgtgctccgtcgcccatacatgccaggcaactgacgtacnttatcccccacacagaaggacacgtattatctccatcatacatagcaaacacgcgcgctggacgagtcctgctgtcttttctacacgagcggcaacgacgcgacggccgnncaanacgcgataagataaaaatcgaacgatttaatatatatntaattataatataattatcaagttatttatattattactgcgcagcgctacgactggatgtnntngngaaattaattagtatgtgcgcgataagagaataaganagataaacaagacaagaataggaaaaaaatatattggagaaaacaataatagtagagatagacntaagtaagacataanagactggagatatagatataaagtcacgataaatacaacgcctaataactattgaaatatcaaactagcactatatatagaagatacaacaacggaatcacgatacatagccaacatgccatcgacgccaccactccgatgcggtctcttgtgtctctgctacctcgctcgcacagttataccgnttaccgcgccgcgcctcaccagatcacatgaacatgacaagcagaggagcaccacgcgccccgaggagagggagggagccacgcagtccttagttgtgctctagattaaacaaggtggaggctgatcatatgagactagcgattatatatcgcgtatatatgatactagtactatatgaagtagtagcgacggcgtcgacgacaataattatgaacacgtaatattactgattctactacttgantctcgtgaacataaccaccgacgggcgaggaacataataactgcacgctacgcagagatatataatcgaccctattaacgttcctttcatgttcgttgacgacgatgagggaggaatacaacaacagcaatcggaactccactcgcgtgtcgtgaggtcctatgttgctatcgctgtgcgtcatataatcgcactacatctgantatgtatgtgantgcatataccaagactgatgcgttacgcgagatacacacacactactcacacacatctcacatatataaacaactatatactacctcgcactaataatatactcgtgcatatgctacgtctactatcgaacgtatatacgaatacataattactccgtctacgtatctctatgacaactcgcgacgatctatacacagctcatntaaacgcgtctcgcagagagcgatcatcagacacgagctgacacgcgcactagccacctcggcttgcgcgacaccgacaacacgcgcacgacacatacgagggagagtctnccacaatatntatcacttgctactgtctcgtctgttagaggacacatcggcgcaatccgtcgcgcatagagtcacacacatgtgctaccaagttgaagccctgatatacaatacacagtatgtgttactctctctctgcgcgcacnatcacaatatacacagatcattgtctgcggagagaaggcaaatacatctctctacnttctgcgcgtctggtgtgannatatacagatgtgcacatataatcatcatcgaataaatcagaggatgcaganaatgatgtatatacatagatacatgacaaagagcaaatatgctaatgaaagataataaaagacagaatagagcgccgtcgcacagagcacagacacgcagaatg

SEQ ID NO: 1402 - DNA, 445 bp, Glycine max
  Peptide Sequence Number=SeqID_6903
  Probeset Number=SeqID_11181
aattgctcgaagatgttttgcattccatggaagaagctatcaaggcccgagaagataatctcccaccaggaagttacgagaaagcaagacttaggttcgcacatgcagaaacaatagtccccttctcttgtcttcttggacttttccttgatgcatctgagtttgagaaaatacagaaggagaaaccgttggaactccctccacagcctcctaaaaccagagactttaaaggcagcaccatggctcctttcggtgggaacaacatgcttgtcctctacagttgtcctgcagcttcctcgcctaagtacttcgtccaggttctgcacaacgagcatcctattgcagttccaggttgtgatggaaaagacttctgtcctcttgaagatttcaaggccaaagtggtgacccctcatctcaagcatgcttttaacaacctttgcaatgc

SEQ ID NO: 1403 - DNA, 306 bp, Glycine max
  Peptide Sequence Number=SeqID_6984
  Probeset Number=SeqID_11182
tgcctcaacactgaagattctgtggtgtgcctctgccagtccagtcaatctgaattgctagctccccaaccagtagatattcgcaaacaagacctgttagcgcaacttgccatgctatcaaattcacaaggtccgtgttagggactattctgacgagagatctgaattcttgccccagtttggtgaagaagcgcagtctgagtttggcaagattggataagatgccctcctcgtgattacatgaagctagtgccagaataccagcatgcatagagatcccgatggtaggagttgagtaatctgcag

SEQ ID NO: 1404 - DNA, 658 bp, Glycine max
  misc_feature (601)..(658): n is a, c, g, or t
  Peptide Sequence Number=SeqID_6985
  Probeset Number=SeqID_11183
tcaaaaggtcgggcagaagaggggtagattgaatattgaggaagaggatgattcacagcccaaaaagaaggttcgtttgggggttcctgctacacaatggatttcagtttacaatgcaagactgccaatgaagcaaaggtaccattacaatgtagcggacgcaagattagcacaacatgtggagagagggattgctgatggccttctgattagttgtgtggcttcttgttccaatctctgggcccttattatggatgcaggaactggcttttcaagtcaagtttataagttgtcaccatttttcttacacaagtgggagaagaactattacattacttctattgcaggggctaataatgggagctctctcgtggtgatgtcaaaaggcccacagtatacacaacaatcataccaagtaagtgactcattcccatttcaatgggataaccagaagtggagagaaggttttcatgtgacttcaatggcttctgctggaaagtcgttgggtgttggtttgtccaaaatgcttgattcaatgatcaggttgttgacttgatttctcttttctagtgagggatcccccaccatgggaatatggtannnnnnnnnnnnnnnnnnnnnnnnnnnnnnnnnnnnnnnnnnnnnnnnnnnnnnnnnn

SEQ ID NO: 1405 - DNA, 1489 bp, Glycine max
  misc_feature (9)..(9): n is a, c, g, or t
  misc_feature (25)..(25): n is a, c, g, or t
  misc_feature (77)..(77): n is a, c, g, or t
  misc_feature (105)..(105): n is a, c, g, or t
  misc_feature (282)..(282): n is a, c, g, or t
  misc_feature (440)..(440): n is a, c, g, or t
  misc_feature (502)..(503): n is a, c, g, or t
  misc_feature (549)..(549): n is a, c, g, or t
  misc_feature (940)..(940): n is a, c, g, or t
  misc_feature (943)..(944): n is a, c, g, or t
  misc_feature (1005)..(1005): n is a, c, g, or t
  misc_feature (1057)..(1057): n is a, c, g, or t
  misc_feature (1071)..(1071): n is a, c, g, or t
  misc_feature (1127)..(1127): n is a, c, g, or t
  misc_feature (1261)..(1261): n is a, c, g, or t
  misc_feature (1382)..(1384): n is a, c, g, or t
  misc_feature (1392)..(1392): n is a, c, g, or t
  misc_feature (1457)..(1457): n is a, c, g, or t
  misc_feature (1473)..(1474): n is a, c, g, or t
  Peptide Sequence Number=SeqID_6986
  Probeset Number=SeqID_11184
aggctgtcnagagggagtggtatgntaggagagcaggagttagagcaccatctgttgtgcgattcacatcccaccanctgtccgctgtgtgttcagttgcgtgancagagcatgtatgttgcgcgttcatatagagacagtatcgcggaggagtaaagtacgtgacaccactctgttcacacccagctgcgcttgcgagcacgggacgagacagagcgagactcatcaagagagaggacgaatagcatatacaattatgactgagacactcgctcgtatacntgtgtgtctgcgataacagagcgaatctattctcgacgtatgaggggagatgtgagcgagagacgcgcagcggagcgagcaagacacagcggcatacctatgctgtcagtgtgtaaccgacgctgctcgccgcagatcgagagcggtgatggaagagntagatatagcggacgcagtaggagtgatggcaacagtataagtgcaaagtgtttgtgacaannatagagaatatcagatataagaatcacttgttgatgttgtatgagngttggtgtcatattgctctacgaagctgcaacacggcatacaaaatgtagcgatgtgcagagataataacatattataaatcatctcataatacacagataataagatcacacatagcgcaagagctgaaactattcacggagtggtgagtagagggaggcagtagtcgaatctgttattgtagtgacggcgacgtgcgtcttgcgcagataatgctcgtgcatcctagattaatagtgtgagcgaaatacagtatatagcccagtaatgcgtctctggtgagcaatatcatacgaatcatcgtacccgtgcagtggaactgatggtgtctatgtttacgtcttcctttctctattgatcggccagagtatatcgacatgtttatgtattnatnntgaaatatggatagaacgtctgagtacgcacatcgcgattcatgtctgcgatttggcgtgnaggggcagctcgagatgaccaacgagcgtagcacgctactagtaagataganaacaagctacacantcaaccatctcactatataatgatactactgagttctatgttagagagtgacgcgnaacatcatcggagcggactgtgcacgagcaaatgaattctaatcatccatacatacctgaaagagaaggatcgattatactattgatcgagagtaattgatcaagctgacatatgaatgtcatatgatgattcnatactcgtatcatgctactgttgtatataatgttgtgctatcgaatgccctatacaggacaacataccacatgactattggagatacgcagactgagtggagagtggcggcgtggttgtgnnnggggctgngggctgggtgagtagacgagaaagcacaaagctaagaagagagagcgatagaatactatttgcgngcgcaatagagaaaannaacaaacaaaacaaa

SEQ ID NO: 1406 - DNA, 572 bp, Glycine max
  Probeset Number=SeqID_11185
tttttctgataatctcccatcgatcgattttgttaatacttttctgagatttgtttgaattttctcttgaaaatgtcttgctgcggaggaaactgtggttgtggatccggctgcaaatgcggcagcggatgcggaggctgcaaaatgtacccggacttgggcttttccggcgagaaggccacaactgaggcgtttgtctttggcgttgcaccagtgatgaagaaccagtacgaggcttccggcgagggtaacgcagagaacgatgcatgcaagtgtggatctgactgcaagtgtgacccttgcacctgtaaatgaataaaaaaacctttttcaagaaggcagagataatcagagtctcaatttaagcaataatatagccctgccgaattgtattagctcagcttttatgtgtaatgctaaaaatggctgcagccttgtcctttaagcccataatgttcttcgtttgtgtttacgttgttcttagatgtctctgccatatgtgaccatagttgttgagtcagtttgtatatataataatactcaactaataatataaacctaaaaatgttttt

SEQ ID NO: 1407 - DNA, 1368 bp, Glycine max
  misc_feature (1)..(1): n is a, c, g, or t
  misc_feature (237)..(237): n is a, c, g, or t
  misc_feature (1197)..(1197): n is a, c, g, or t
  misc_feature (1202)..(1202): n is a, c, g, or t
  misc_feature (1311)..(1312): n is a, c, g, or t
  misc_feature (1320)..(1321): n is a, c, g, or t
  misc_feature (1324)..(1324): n is a, c, g, or t
  misc_feature (1327)..(1331): n is a, c, g, or t
  misc_feature (1339)..(1359): n is a, c, g, or t
  misc_feature (1364)..(1368): n is a, c, g, or t
  Peptide Sequence Number=SeqID_6987
  Probeset Number=SeqID_11186
ngctagaaattccgccgcgccggggagagagatgccagtgagtagagggcgtgagcgtgcccgcggctaaataacgagcgtccatcagagccctggtagatccaggacaacatcgtgactgccgtctggcacacagacacacaatatacctctcacttggacagggaggataagaacagagaatgagagccgcgggaagaaaaaaagaaagagagtagagtgctagaggtattaggngacaatacgagcattaccagggattaataaacctattcatttcatcatgaagagaaacgacttatatcatattgattaatgagaagtggctcagcgtgtcactctatatgtaaagatggagagaagcatgcaggcggagaggtcgaccacagcagagagggcgctggcgactatatctaacctaatctgtctgtcattacctctactcttcccgcattccgccgcaactgtacagcgtcaatgacaacatacgcaaaaaatttaaacatacatattataatagtggataggaaatatctgtcgtgttcatactaatagagatgtttgtggaaatatataagacagccaacggttagatattcacaacaatatatactatggcgttccctccttctatgtgatgcacagcaaggcggcacctcgacgacgagagccctattctccgaccactctctctccggcgccttcgctagcacacatatgtgctaattatgaaactaattcctatatcaatgtgtaggcttccatagttcctccagactccatgcctctgggccaaatacacaacactcctcccacgacgccacaaaaaccccccaaaacaacaacgcaaaaacacaaccagacggatggccaccccaccaaactccacatatacatcaacctcctctactattattttttagttatatcactttcctctccctccctcggtgatatccgcacttgtctcggtgcacttgtttttctttgtttcttttttgttttgatttttgcggttgcgcacgtgttattatttctccgggggggcgtcgctggtgccgtttgtagtagaatttgtgtttcttagtgttcgttcccgggagaacgagctaaaatctagcaacacagagggcccgggcaccgaccggaggagataaaagagaacgacacagtactctggactggtctggcacttgnttacnaaaaaaaaacgtgtgtacgcccggagaggagaacacacacccacttctccgtcaacttcaaggaaacacatatttcaactctgtaccctgcctcgttacgcgtccgtgnngcacttanngtngtnnnnntcactaannnnnnnnnnnnnnnnnnnnnttttnnnnn

SEQ ID NO: 1408 - DNA, 1582 bp, Glycine max
  misc_feature (1)..(21): n is a, c, g, or t
  misc_feature (26)..(29): n is a, c, g, or t
  misc_feature (42)..(43): n is a, c, g, or t
  misc_feature (47)..(47): n is a, c, g, or t
  misc_feature (61)..(62): n is a, c, g, or t
  misc_feature (70)..(70): n is a, c, g, or t
  misc_feature (73)..(73): n is a, c, g, or t
  misc_feature (83)..(84): n is a, c, g, or t
  misc_feature (171)..(171): n is a, c, g, or t
  misc_feature (250)..(250): n is a, c, g, or t
  misc_feature (273)..(273): n is a, c, g, or t
  misc_feature (384)..(384): n is a, c, g, or t
  misc_feature (411)..(411): n is a, c, g, or t
  misc_feature (444)..(444): n is a, c, g, or t
  misc_feature (471)..(471): n is a, c, g, or t
  misc_feature (894)..(894): n is a, c, g, or t
  misc_feature (1350)..(1350): n is a, c, g, or t
  misc_feature (1535)..(1535): n is a, c, g, or t
  misc_feature (1582)..(1582): n is a, c, g, or t
  Probeset Number=SeqID_11187
nnnnnnnnnnnnnnnnnnnnnccccnnnnccctttaaggggnnccanacacccacaacgtnnctaacctncantttaacgatnnaataatgatgtgggtttcttgtaacgcggtccggttcgttttttaataccatctcctagaataatcgcatatccaccaaacgtgtanattctgctcaacactcaatttaactatacccacagatatctatcctcttctctactgtctactgtctcatcggaggacnacgctgagcctctgataaccaanggaatctatatatgactctagagcggcgcacgcgccgcgtgagcactggtatagatactactgttatatctacatttatatagtcccaataaagatgatatgttactaganaattgctactattaatttagcccgccnagactcgcctcggcgctattcactcattgctcntactgtttttttctctcttctcgctcnctttatttatactcactccacgtttgttctactggacatacgtagtataatatttatgatatgtagtttcacatatcagacatgttgatatacattattatatacttatctaatgacattactggacacctcctcttatccgcacttctccatacatattttattttcatctacatcatgtgctcccgctctctgccacgcattacagctatctactctaacaccacagacactctgtccacactgctcgaacatatgtaacccacgcacacatctaccacgcctaacactagataataatatcactgtctgacctgctgtctctacgtcgctcggtgccctccgtctcttcgtctcttcacagcattgatactcatctgacttatagacacgttagttatatatcccacccaacgctgattncttctcttcggctgggggatgctgccgcacactgtcgcactcgtctccctcttctcaacttatctcagctcactttgctctcacaacgaatctatttaataaattatttttctcttgatgcgtgtttcttttgatggacttgcgttcgtcctcctccgtcacattcctacataagagaatgttatgagccgtggccctatcctagctctgtactcgctcccctgtcgcgcgcacggctctatacattctcactctctgcccctctgttctatgatctgccgtcgtcgtgttggtgagtgctcatcgcgcggccactcacgtcttctggcggcttctcttgcgcgggtatacgctcatgcgctatgaccgttcccgtacattagcattcttgatcgtatcctctcctcacccgctgttctagttttggatgctggttctagtataatcccggtcttnattcctgatgtgctatacctcgcgcagcgcgcgttctctgccttactggacatgctcaccactgccgacatatatacgacttactctacggacacgccatccgacagcgtgtatgtagtgcacccgatcccttcgttatcatatatgctcacacccatgtatatcgtccttcaggcctagtttgncttggtgttatcctcacgctatccatgtgcgctctcttctaattgcn

SEQ ID NO: 1409 - DNA, 1653 bp, Glycine max
  misc_feature (9)..(10): n is a, c, g, or t
  misc_feature (17)..(18): n is a, c, g, or t
  misc_feature (53)..(53): n is a, c, g, or t
  misc_feature (69)..(69): n is a, c, g, or t
  misc_feature (82)..(82): n is a, c, g, or t
  misc_feature (84)..(84): n is a, c, g, or t
  misc_feature (115)..(115): n is a, c, g, or t
  misc_feature (118)..(118): n is a, c, g, or t
  misc_feature (1180)..(1180): n is a, c, g, or t
  misc_feature (1241)..(1241): n is a, c, g, or t
  misc_feature (1302)..(1302): n is a, c, g, or t
  misc_feature (1386)..(1386): n is a, c, g, or t
  misc_feature (1430)..(1430): n is a, c, g, or t
  misc_feature (1480)..(1480): n is a, c, g, or t
  misc_feature (1494)..(1494): n is a, c, g, or t
  misc_feature (1534)..(1534): n is a, c, g, or t
  misc_feature (1548)..(1548): n is a, c, g, or t
  misc_feature (1638)..(1638): n is a, c, g, or t
  misc_feature (1649)..(1649): n is a, c, g, or t
  Peptide Sequence Number=SeqID_6988
  Probeset Number=SeqID_11188
agaaagganngagggtnnggggaggagaatgggagggtagagaatacgagatntattatttacaatatntgcctacgaattncnactctagttcttcttatattgttgttatttnttncaccccccccccttctcgcgctcgtgggaggatgtggtcggagaggatgacggtataagtcgatactcacgaaactgtgtccctatccttcgcctctttctctattgttatagcgaggctcccgatgctcttaaccacggtttttctctatatctttatctcgacgtcgccagcttcgtatatttagagagagagacaggagaggcgtatgagtagcgtgtgcaggttaataccaaatatctgttgttaagctatctagtagtagacacaaccacaacctaaatattataaaagcagccgatctctaacgttctcctttctgaccttaattgtacaacacagatgaattagtacgatgaacacatcagaacaagagtctctcgctcgataagcctataacagaaatacgggctatgcctaatgaaacgcaattatgattgctccttaccgtcctgttagcggtgatcgtctcttgcccgctccataggcggtttgagcgggtgtctgctcaccatgtatagagcgcacgtgtgttattactgtgcgattcctggccgtctctatcttgctctaaaaacgtttatgctgcatctgcctgacacgtcacgactacacacaacaatatactgctcgtcggaacgatatgtgtgtgcaagtaggaggaaagcacatcggtcacggagtgtcgttgagacgattcacaagtcatgcatttctacatggcgttgacgatcaagacctattcggaactcgaatcgtttccgatgcataggctgaacataagataataagtatgaatatgaatggaggctgagatcgcgcagtaagaggacccgaatagaatagcatcgcactcgtcagtcagctagtattactatatgagacacaatgaatgacatatagacacgagacaggtatgacaactcatgacgatgctgatagcgtatacaggcagtctgtacgtagcgtattcggttatgcgcatagtgatgtagtctgtcacactcgcgtgtgtattataattaccagtatatagcttcattctcgacatctcgcatgtanctgtactacgattatgtgtgtttggtacagatgttatagctagtctacatcgatcggcgcncgtaccatagactactgctgcctggtacgcgttctgtacatcctggatcacatctatgcancgcatacaagacgagcatctagcgagaaggtactagcagctgcactcttatgtgtggacatacacgccgcatgcgatgatgatntactgcgcatgggtgatagagcgcatggtactatcgcgagatcngaactgagataatcacagaagcgcgactagcaagtgcgtagaacgcgcgngggaccattagacncggagcagacgctcagatctagtgtctatatgatgactgntgcgcgctgcagcngctatgcttgcagtagtagtggtagagtttgttctgcacttgaatatcgtcacactatgtatcacatagaatgaatgataccgcacgtgntacgatgatcncaag

SEQ ID NO: 1410 - DNA, 373 bp, Glycine max
  Probeset Number=SeqID_11189
gagtaagcttcagagtgatgctttgcgtgaagccatctcaggaatcatggccgattccaaggagaataatcacaaatttgtggataccatcaaactccaaatcagtttgaagaactactatccacagaaagacaaacatttcattgactccatcaagttaccccacatccctcaccccaatataaaaatttacatgcttgatgatactcaccatattaaataagcatacaagataagactgtactaaataaatatataacccttgaaaaatctaaacaaaaatgaaaaggttattaagaatctagctagaaaataccatactgtgttagcatctgaaggcatcattgagcagattcctcgtctggtaagtcct

SEQ ID NO: 1411 - DNA, 1454 bp, Glycine max
  misc_feature (24)..(25): n is a, c, g, or t
  misc_feature (39)..(39): n is a, c, g, or t
  misc_feature (42)..(42): n is a, c, g, or t
  misc_feature (95)..(95): n is a, c, g, or t
  misc_feature (191)..(191): n is a, c, g, or t
  misc_feature (314)..(314): n is a, c, g, or t
  misc_feature (486)..(486): n is a, c, g, or t
  misc_feature (594)..(594): n is a, c, g, or t
  misc_feature (643)..(643): n is a, c, g, or t
  misc_feature (666)..(666): n is a, c, g, or t
  misc_feature (669)..(669): n is a, c, g, or t
  misc_feature (785)..(785): n is a, c, g, or t
  misc_feature (827)..(827): n is a, c, g, or t
  misc_feature (865)..(865): n is a, c, g, or t
  misc_feature (991)..(991): n is a, c, g, or t
  misc_feature (1114)..(1114): n is a, c, g, or t
  misc_feature (1427)..(1427): n is a, c, g, or t
  Peptide Sequence Number=SeqID_6989
  Probeset Number=SeqID_11190
gttctttttttttgcgctcttctnnttcctctctccccnccntctcgacatcctcgtttgatatgtatattttttctctttgcttgtcgtgtccncctctgcataattcttggttttgttcagtcgcgaacacgtaaggtgatttatagtcaccaccccgcgcgggcacgacgggcctgccgacccctccnaccggccggctattaggaagaatcaaaccaactattatacgactaatgacgcgcgccaactgtgtccgcttgtctgattgaatattgcttctataagtatctctgtcatgacataagtgtgtncgtctcctccgctttacccagtacggagtcgcgtgctgtggtgtggtgtggtcgttttagttcccctctccctcactgtgctcaaccatatctctgcgcacacatattgtttgtgatattcttttgtgttttttactttttgtagtttgtgcgggtcgtgaccagtagtttngatgagtgatagaaattgagaataagatgtgggtgttgtattaatattcagactgttatcactaacgaccaggtgctatcggcgtgcctccgttcgctccgtttcttnccgctcccctgcgtctatccgtcgtgtgcgtagtatgatgtatcggcgnctgctgcgtatgagtagtggagnggngcgcggaggggggggtgaaagatgaatatcatgaccggcgaagtgaggtgcacctcatcatacatacttgtacttctcaatttgtaatgtatatatataatattgatatagtaaantaagattatatactggttttattggatatgaaatagtgaaanggattatattagattaagatggcggtctggtgaaggtnagggttacgcactcggcacagctatcactactctctagtggttgatggcttaatatatgtggtggggtgtggagtggtgaaggatgtctagctgggtgtgtgggaacacacttcacaccaccagtnctctatgcgcgcacacaaaccctccacgacggctgtcggatactaaaccggtggtcggtatcaaaaatgcaagcaggtgtactagtgaacaatctaagacagattgatcgggcgagttaattncggatgtggtatgctgtgtgattctcaggcgctgtatcatccgtgttgttagtatattaggtggtgcgctgcggacgtcgccggggatgtgctgtatgcataacacacgggcgtggcgtaagaaacatcaacggatgcgtcaggatgtgtagagattataggcggccgcacacaggagctgcaacaacacccaccaccccatcctcctgcttctgactgttgattatttatgttattagtataccagctcgtgcttgtgctgacgctcgtgtgtgatcattagtgtgcgatatccggtgcacacactgtcagnaatggtgtgcttagtctacggaaataa

SEQ ID NO: 1412 - DNA, 1945 bp, Glycine max
  misc_feature (13)..(13): n is a, c, g, or t
  misc_feature (26)..(26): n is a, c, g, or t
  misc_feature (35)..(35): n is a, c, g, or t
  misc_feature (45)..(45): n is a, c, g, or t
  misc_feature (77)..(77): n is a, c, g, or t
  misc_feature (95)..(95): n is a, c, g, or t
  misc_feature (107)..(107): n is a, c, g, or t
  misc_feature (113)..(113): n is a, c, g, or t
  misc_feature (135)..(135): n is a, c, g, or t
  misc_feature (144)..(146): n is a, c, g, or t
  misc_feature (185)..(185): n is a, c, g, or t
  misc_feature (196)..(196): n is a, c, g, or t
  misc_feature (228)..(228): n is a, c, g, or t
  misc_feature (230)..(230): n is a, c, g, or t
  misc_feature (244)..(244): n is a, c, g, or t
  misc_feature (255)..(255): n is a, c, g, or t
  misc_feature (259)..(259): n is a, c, g, or t
  misc_feature (261)..(261): n is a, c, g, or t
  misc_feature (267)..(267): n is a, c, g, or t
  misc_feature (336)..(336): n is a, c, g, or t
  misc_feature (348)..(348): n is a, c, g, or t
  misc_feature (391)..(391): n is a, c, g, or t
  misc_feature (446)..(446): n is a, c, g, or t
  misc_feature (504)..(504): n is a, c, g, or t
  misc_feature (536)..(536): n is a, c, g, or t
  misc_feature (545)..(545): n is a, c, g, or t
  misc_feature (551)..(551): n is a, c, g, or t
  misc_feature (563)..(564): n is a, c, g, or t
  misc_feature (572)..(572): n is a, c, g, or t
  misc_feature (584)..(584): n is a, c, g, or t
  misc_feature (586)..(586): n is a, c, g, or t
  misc_feature (588)..(588): n is a, c, g, or t
  misc_feature (599)..(599): n is a, c, g, or t
  misc_feature (604)..(604): n is a, c, g, or t
  misc_feature (608)..(608): n is a, c, g, or t
  misc_feature (612)..(612): n is a, c, g, or t
  misc_feature (709)..(709): n is a, c, g, or t
  misc_feature (714)..(714): n is a, c, g, or t
  misc_feature (716)..(716): n is a, c, g, or t
  misc_feature (732)..(732): n is a, c, g, or t
  misc_feature (764)..(764): n is a, c, g, or t
  misc_feature (774)..(774): n is a, c, g, or t
  misc_feature (778)..(778): n is a, c, g, or t
  misc_feature (782)..(782): n is a, c, g, or t
  misc_feature (785)..(785): n is a, c, g, or t
  misc_feature (789)..(789): n is a, c, g, or t
  misc_feature (791)..(791): n is a, c, g, or t
  misc_feature (793)..(794): n is a, c, g, or t
  misc_feature (796)..(796): n is a, c, g, or t
  misc_feature (840)..(840): n is a, c, g, or t
  misc_feature (868)..(868): n is a, c, g, or t
  misc_feature (882)..(882): n is a, c, g, or t
  misc_feature (886)..(886): n is a, c, g, or t
  misc_feature (889)..(889): n is a, c, g, or t
  misc_feature (933)..(933): n is a, c, g, or t
  misc_feature (939)..(939): n is a, c, g, or t
  misc_feature (947)..(947): n is a, c, g, or t
  misc_feature (950)..(951): n is a, c, g, or t
  misc_feature (987)..(987): n is a, c, g, or t
  misc_feature (1039)..(1039): n is a, c, g, or t
  misc_feature (1088)..(1088): n is a, c, g, or t
  misc_feature (1144)..(1144): n is a, c, g, or t
  misc_feature (1148)..(1149): n is a, c, g, or t
  misc_feature (1163)..(1163): n is a, c, g, or t
  misc_feature (1170)..(1170): n is a, c, g, or t
  misc_feature (1245)..(1245): n is a, c, g, or t
  misc_feature (1255)..(1255): n is a, c, g, or t
  misc_feature (1399)..(1399): n is a, c, g, or t
  misc_feature (1405)..(1405): n is a, c, g, or t
  misc_feature (1501)..(1501): n is a, c, g, or t
  misc_feature (1511)..(1511): n is a, c, g, or t
  misc_feature (1587)..(1587): n is a, c, g, or t
  misc_feature (1615)..(1615): n is a, c, g, or t
  misc_feature (1659)..(1659): n is a, c, g, or t
  misc_feature (1725)..(1725): n is a, c, g, or t
  misc_feature (1760)..(1760): n is a, c, g, or t
  misc_feature (1815)..(1815): n is a, c, g, or t
  misc_feature (1831)..(1831): n is a, c, g, or t
  misc_feature (1834)..(1834): n is a, c, g, or t
  misc_feature (1846)..(1846): n is a, c, g, or t
  misc_feature (1896)..(1896): n is a, c, g, or t
  misc_feature (1911)..(1911): n is a, c, g, or t
  misc_feature (1940)..(1940): n is a, c, g, or t
  Probeset Number=SeqID_11191
gaggtggtatggngggtgtgtgaagngtctcaacnacacactccnctgtgtggtatatcttcattatagtctggtantagatgcgcggcaccccnccccacacacanacacanccacaacctgaaggacgagttntgagtatgnnngtaatagatgaagcatgtgtaacttcgtggtggtatagngagccgcgagnacactcgctctctacgcggctgagatggagananactgtgcgcacggngcagcgcagcncacncngggggngatgtgtgctgtgtgcgagttgcgtagcgcagctacgattgcgcgtcgatcgctctgtgtgcgagcggngtagagaagcanagagcgagagagatgcggctcgcgcgattggtaggcatgcganacacaaacaacacacagagaataacgcagtagatgtatagtggtagtcgactcancacacctatgatgtcgtgcgcgtcgtatgtgcacagacacgacactgtgtgtgaattngattgtgtctggtgctggtgttgctagtttgntgcgtgctntcgtcntcttctatcctnncacgcgcnggtgcggagtantncngagtgatgtgnagtgnattnactntactaatatgatgatatgcgagataggagaaatgacttatggagatatcgtaagactgtggaaatcttattgatatatgataatgatagactcacgncgaantnacgacatgacaagatnaaaccacgaataacataagcatatggacaganatgtagtatnaggntganganggananannantacttaatcatacgtgagtggaatgtgaacggtagtctgagtgngctgtcgtgtcaatggtgagtctatccnatatctcacaccanaccnccnaccaccacccaagtagaaaaggacataacgagagaacgaagatntagttntatatagnaannataagcatatacattatttcatgtatagtagatgtnatatatctactaggtgatgaatggtggtgagagaatgaccaggcggtgctcngccaggacagcatagtcgatgtatctttattacgattaacaaccaaacnacacttatctatgtgtgggcagtgtgtgattgaggtattagtgttgatcgatgaanaaannacacacggagtganatgagangttatctcagagtccgtgagctattagaagtgcatgacgggcgcgtctgtcattgtgaatgatcctctgcccacnccacgcacanctgcgtgtgcgtgtgatgatgtgcgccatgtcacgagacaacatgcactctagcctctctcgtgtgtaggtgctggggtgtggtgtggagtgtgtgtgtgggatcgtggtctgctgtcttgccgatcacgcatgagattagcgnagtgcntttgtggctgtcttgcgttgtgactgtgtttgtgtctgatggagtacttcatgatgtgtagccgatcacaccagtctcgcaggacggtgtgtgagntgagttatgncatgttgtacatgtctacttgctgtgatctgtgcggtctctgtgttcactgtgcacgtctgcatgcagcctgcgancgcgtgtgcactgatcacatttgtagancgtggatcgtgtgagcagagaatgatggagtgatgtatgtatgntgtaccgtacgaagatggagacccgcatacagctctcaatctattaatactagagagagtgtgtangagtatactgagctgagccatgagtgatctattantcatatctagcatccctggtagtgcgagcgagggtgcgtgtgcactcgcacggtngagtgtgttatgatgncgntgtcgagcgttntagcgactcttgcactgtaattatcgactgtagtgtcgtcagatacgtantgcttgtcttgactntctgctcgtcggcttgtgtgtggtcggcntgtag

SEQ ID NO: 1413 - DNA, 400 bp, Glycine max
  Peptide Sequence Number=SeqID_6990
  Probeset Number=SeqID_11192
catagttcttatgacaatgtctacccgacctgactaggctagttgcttgggctttatggctaagcaggtctatgttatttaccgtattcgtgttaggaggggtgggcgacatagaccaattcccacaggaattgtgtatgggaagcccactcaccatggatttacccaactgaacttactgcgaaacaagacgtcagttgcctaggagcgagctggactgaatctgggtggacttagggtcctcattcattactgcgtgaatgatgactctacttataaatactttgacgtgatgctgttggatcttgctaatgctcctatgatacatgatccctgaattcgttgggtcgtcatttctatgcacaatcgcatagagctttgtgggcttacctctgtcggc

SEQ ID NO: 1414 - DNA, 519 bp, Glycine max
  Peptide Sequence Number=SeqID_6991
  Probeset Number=SeqID_11193
aaaatcatttacttacaaaacaattaaaacaaaaaatggcgttcccttcaaagatcaccacatgcctcctcgtccttgccgtctacatggcagccccatcagagtcacccataacgtgtgggacagtgacatccacactggctcggtgcatgggctacttgaccaactgtggtccagtgccatcagactactgctgcgcgggagtcaaagcattgaaccaaatggctcagaccactccggaccgccgacaagtctgtgagtgccttaaagctgcggctaaggatatcactggcctcattaacaccgaccttgtggccacactccctaccacttgtggtgtttcagttccctacccctttcgtttcagcaccaattgtgacactatatcgactgccgtgtgaaggaggctagctagagatgtacgactaatcaaagttgccagccttttaacctagcatcataagtatatcctgcggctttccattttatgacctcattgtcttattattagtagttgtc

SEQ ID NO: 1415 - DNA, 4288 bp, Glycine max
  misc_feature (4288)..(4288): n is a, c, g, or t
  Peptide Sequence Number=SeqID_7072
  Probeset Number=SeqID_11194
cgggcgggaagcctttgatatataccgatcatgtttgagaatcacaagaatatggggcaactcaaggtcgtagcctcaacctttgtggtgttgcggtcatggtggagctttgatggtgcagttggagaccctcaactctttttactcaaatgggagtgcagcgtagtcgcagtacacgacttgctcaacttcaaccaaaatctaaacgcaagtttggtcgaccttagagcacaagtgagcaaccacagaaaacactttaccacgtccctattaaggcgaatgggtaccgggcccccccctcgaagtcagctacgtaggccccccccccgttttttgttattcagagacttgatgcagtcaggcgttagaccaaatgagtatacattttccggagttctaaatgcatgtgccgaccatgctgctgaacacctgggaaaggaggttcatcggtacatgatgcgcacagggtatggtccgttttcatttgctataagtgcccttgttcatatgtactcaaagtgtgggaacactagagttgcaagaaaggtgttcaacgagatgcatcagccagatttggtatcatggacttctctaattgttgggtatgctcagaatggtcaaccagaggaagcacttcatttcttcaaattactactccaatcaggtaccaagcctgatcaaataaagggttagaatatttccattcaataagggagaagcatggattgatgcatactgcagatcattatgcatgtgttattgatttattggaacgatttggccggttcaaagaggcagagaatatcattgataacatgcacataaagcctgataaattcctttgggcatccttacttggaggatgtagaatacatggaaccttgaactggctaaaagagcaccaaaagcattatatgagatagagccagagaatccagctacctatatcactctgtaatatctatgctaatgctggtctatggaccaaggtagccaaagttagaaaggatatggacaatagggggatagtgaagaagccaggtaagagctggattgaaattaaaagacaagtgcatgtgttcttagtaggagatacatcccacccaaaaacaagtgatatgcatgaattcctaggagaactctcaaagaaaattaaggaagaaggctatgttcctggcacaaactttgtgctacatgatgtggaggaggagcagaaagagcaaaatcttttttaccacggtgagaagcttgctgttgcctttggaataatttcaactcccacaggaactccaatcaaggtttttaaaaatttaagaacttgtgtagactgtcacaccaccatcaaatatatatcaaagattgttcaaagaaaaataatagtgagagattcaaataggtttcattgttttgaggatggaagctgctcgtgtaaagactattggtagcactccacttcaacagacatgccaagcattgagtgaattgctgtctttgatccatgattctgacagaatatgcctttgacagtatttgcattggtcagattctttttcctcctttccctatcatttaaatggtgttgctttcaagcgaaattgttagattccccactgcaaccagatatgaaatgttcaataaagattgagatctacattatgcaggaatgaccattgagacgtctataaaaatggaatcttagaagtattttttacagatatattatttatctatggattatgtaataacaataatggtgggggctgtgtattcaaaattacagtactgaccacaggcttgcattaggcttggcatcctttgtttccgagttactgagatggaggtaaattattctgaactgacgcctgctaatatctgcagtggaggatcaaggacagttccattatacagagttggtttgacttaaaatccaaacagcatcaagcgcagctagattcttggattttggtatcacgatcataacaataaagaacttaaaggattttagccccgcattcggtaggggagatcaattatagactgactagaaccaattgatatttatagatggacatatgtacaaacagatatttagttggtccccccctccgaatgttaattataagctataaatatagtgatcctttttaattttgatgctattgatcgaataggggactatgaaaaatgggaaagttgttgcagtcaagaaattaatttcaggaaattccagcaacatagatgatgaatttgaaagtgaagtaacgcttataagtaatgttcatcatagaaatcttgttcgtcttcttggttgttgcagtaaaggccaagaaagaatccttgtttacgaatacatggcaaatgccagcctagacaaattattatttggtaactatttaacatgttatttgtgtaagttttactttcttaatcctcttttctcctttaatattttgagcatataaatttgggaaataggacaacgaaaaggctccctcaactggaaacaacgccgtgatataattttgggcacagcaaggggattgacttatctacatgaagaatttcatgtttctatcacacatagagatattaagagtgccaatatcctattggatgaacaacttcagcccagaatttctgattttgggttggtgaagctccttccaggagacaaatctcatattaccacaagatttgctgggacattgtaagtaaaaaaactgcaaatgatcctcagcctgaaaatttaaaatagcaatatatactgccctcacatgcaaaatagtctcatttctcataatttctttataatatatgtggtataaatgttatgcacttgtcagaggatacatagcacctgagtatgcactccatggtcaattatcagaaaaggctgatacatacagctatggaattgtagtcttagaaatcataagtggtcaaaagagtaccaatgtgaaggttcttgatgatgatggcatggaagttgtatgaaagaggcatgcacttggagttagtggacaaaagcttagacccttatagctatgatgcagaagaaatgaagaaagtgataggcattgctttgctgtgcactcaagcattggctgcaatgaggccaaacatgtctgaagtagtagtcctacttagtagcaatgacttacttgagcatatgagaccttccatgcctatcattattgagtcgaatttaaggccccaaagagatatctcttcttcaactgcttcctctacgactaatgcaactatctccaattcaatagtacccgctcgatgattaaatatatgatgtaaaattattttttttttttgtccagttcattattaaggatgattattgttaaatcttacttatttttaatagcaaattatattgctgactttttctcaaaaaaaaaaaaaaaaaaatccttccaccccaaggagaacacttcttctagggcccccccccccgccgcggcgctccccctccttggccgtccccctgtggtccctagttgcgagatcgttgggaacccgaggccggaaacctcctctcccactctgctccccccaattccccctcccccggaatgtctctttaacttaccccccgctcccctcactcatgccttccccccctctcccccctctgcccttcccctccctctccccccccctgcctttttggtagtgttggatgtttgtataaacacatagatttgttgccctagcgaagtttttggttgtcgccctccaaccgatatgaaatgttcaataaagattgggatctccattatgcaggaaggaccattgagccgtttataaaaatggaatcttagaagtattttttacagatatattatttatttatggattaggtaataacaataatggtgggggctgtgtattcaaaattacagttctgaccacaggcttgcattaggcttggcatcctttgtttccgagttactgagatcctggtaaccctccctgaactgacgcctgctaatatccgcagtggaggatcaaggacagttccattatacagagttggtttgacttaaaatccaaacagcatcaagcgcagctagattcttggattttggtatcacgatcataacaataaagaacttaaaggattttagccccgcattcggtaggggagatcaattatagactgactagaaccaattgatatttatagatggacatatgtacaaacagatatttagttgttactttgttccgtttttcaaaaaaaaaaaaaaaaaagaaaaaaaaaaaaaaaaan

SEQ ID NO: 1416 - DNA, 1930 bp, Glycine max
  misc_feature (1)..(1): n is a, c, g, or t
  misc_feature (4)..(4): n is a, c, g, or t
  misc_feature (6)..(6): n is a, c, g, or t
  misc_feature (50)..(50): n is a, c, g, or t
  misc_feature (57)..(57): n is a, c, g, or t
  misc_feature (84)..(84): n is a, c, g, or t
  misc_feature (93)..(93): n is a, c, g, or t
  misc_feature (159)..(159): n is a, c, g, or t
  misc_feature (167)..(167): n is a, c, g, or t
  misc_feature (172)..(172): n is a, c, g, or t
  misc_feature (176)..(176): n is a, c, g, or t
  misc_feature (184)..(184): n is a, c, g, or t
  misc_feature (187)..(187): n is a, c, g, or t
  misc_feature (213)..(213): n is a, c, g, or t
  misc_feature (265)..(265): n is a, c, g, or t
  misc_feature (275)..(275): n is a, c, g, or t
  misc_feature (313)..(313): n is a, c, g, or t
  misc_feature (353)..(353): n is a, c, g, or t
  misc_feature (400)..(400): n is a, c, g, or t
  misc_feature (436)..(436): n is a, c, g, or t
  misc_feature (470)..(470): n is a, c, g, or t
  misc_feature (475)..(475): n is a, c, g, or t
  misc_feature (505)..(505): n is a, c, g, or t
  misc_feature (507)..(507): n is a, c, g, or t
  misc_feature (571)..(571): n is a, c, g, or t
  misc_feature (587)..(587): n is a, c, g, or t
  misc_feature (663)..(663): n is a, c, g, or t
  misc_feature (670)..(670): n is a, c, g, or t
  misc_feature (679)..(679): n is a, c, g, or t
  misc_feature (681)..(681): n is a, c, g, or t
  misc_feature (690)..(690): n is a, c, g, or t
  misc_feature (692)..(692): n is a, c, g, or t
  misc_feature (727)..(727): n is a, c, g, or t
  misc_feature (757)..(757): n is a, c, g, or t
  misc_feature (782)..(782): n is a, c, g, or t
  misc_feature (828)..(828): n is a, c, g, or t
  misc_feature (856)..(856): n is a, c, g, or t
  misc_feature (1018)..(1018): n is a, c, g, or t
  misc_feature (1163)..(1163): n is a, c, g, or t
  misc_feature (1212)..(1212): n is a, c, g, or t
  misc_feature (1225)..(1226): n is a, c, g, or t
  misc_feature (1235)..(1235): n is a, c, g, or t
  misc_feature (1264)..(1264): n is a, c, g, or t
  misc_feature (1272)..(1272): n is a, c, g, or t
  misc_feature (1339)..(1339): n is a, c, g, or t
  misc_feature (1345)..(1347): n is a, c, g, or t
  misc_feature (1370)..(1370): n is a, c, g, or t
  misc_feature (1383)..(1383): n is a, c, g, or t
  misc_feature (1387)..(1387): n is a, c, g, or t
  misc_feature (1472)..(1472): n is a, c, g, or t
  misc_feature (1485)..(1486): n is a, c, g, or t
  misc_feature (1512)..(1512): n is a, c, g, or t
  misc_feature (1542)..(1542): n is a, c, g, or t
  misc_feature (1601)..(1601): n is a, c, g, or t
  misc_feature (1603)..(1603): n is a, c, g, or t
  misc_feature (1610)..(1610): n is a, c, g, or t
  misc_feature (1625)..(1626): n is a, c, g, or t
  misc_feature (1641)..(1641): n is a, c, g, or t
  misc_feature (1659)..(1659): n is a, c, g, or t
  misc_feature (1681)..(1681): n is a, c, g, or t
  misc_feature (1685)..(1685): n is a, c, g, or t
  misc_feature (1687)..(1687): n is a, c, g, or t
  misc_feature (1713)..(1713): n is a, c, g, or t
  misc_feature (1745)..(1745): n is a, c, g, or t
  misc_feature (1760)..(1760): n is a, c, g, or t
  misc_feature (1796)..(1796): n is a, c, g, or t
  misc_feature (1808)..(1809): n is a, c, g, or t
  misc_feature (1811)..(1811): n is a, c, g, or t
  misc_feature (1813)..(1814): n is a, c, g, or t
  misc_feature (1818)..(1820): n is a, c, g, or t
  misc_feature (1823)..(1823): n is a, c, g, or t
  misc_feature (1845)..(1847): n is a, c, g, or t
  misc_feature (1869)..(1869): n is a, c, g, or t
  misc_feature (1871)..(1871): n is a, c, g, or t
  misc_feature (1895)..(1895): n is a, c, g, or t
  misc_feature (1915)..(1915): n is a, c, g, or t
  Peptide Sequence Number=SeqID_7073
  Probeset Number=SeqID_11195
ngtnantgagtcgatgatcgagacacgaaagtgacgttatcgtgagtgancgtatgnagagtagtgagagtagcatggtagatngcgacgtgngagcggagtcatcggcagctgcagttgcgcaggtagtatacatagactttgtctatagtgatgatnatgtgatngttgncacngtgtttgnttntgacagttagagactgcgcatgctcntgtagatggtatcagtcgcagtgtctgcgctcgccagcatagcacacatganaggatagtangagacagagatacacgcagacactgcgctgaatcgatncagcagagagatgactactcgtatacgatacctagtacanaccgtcatatcactgatagcacgacattgacatgagtactagatcangacatgagcacagcagcgagatatatcaacatcccncagagcatagagtgtagaattgatgcgtgttganagaancgtacgcacgcatgagcagtcaggtatgantngtgtgttactgcccacacatagtatatagtgctcaccagctatgagtcagtgtcatagaccagngcgcgcagtgctaganggagtcgtagatagtagacacagtatgagagacagacaagacagagacagaagatattgatgatcagtagatgagngacacgnccctaccancntatgttacntncacatagtcatcatcgtacgtacgtggaattgtgnccctatgatgcgtacatcgagtactatagngatacagataattagtatatatatnatgatagagcatataagatgatgcatagtagtgtagtagagtgagnagtgatatatgacgcctgataggagtanagcgccacaatcagcagcgatataagtatgatgtgtgagttagatactccgctcacgcgggtcatgcgacatctatgacgacggatacgacgtcatagcacacacgagtacgagcgcgtggtagaagcaccgcacgcactcaaaatgtgatagaggtatgancagtagatatatgtgagaacgctatgagtagtaggacagtagtacactgtcatgatgatgacgtacgacgactgtactactagtcagcacatacgaagtcgacaatagagtgtagatgagtaacgctgtcagagcgcagatgctnacattactaggatgatcacaatatctcaaacacaccaccagaaatattntatgtatatgtanntataattgngttagatgagtagtgtaatcatatatagnatcagatnaatagtattaatagtatatatatcatataaaagtcgttgtagcgagctgatgtgacgagatagcagncacatnnncgtgagtgcgcgcggcgagcggnggcgcgcggcgangtgngcgcgagagagagtgatatcagcgagatgtgctagccgtgatgatttatcagcgtatgtgcgctatactcgtgcacgacgagatngatcgtattcgtnnagatacgatatgtagatggagatgangacgtagtgagatttatcagagatgatcanagcacgacatctactatcattatcctagatctactaacactacacatacacaacgcgcncnctcgtcngtccgacaacacacnncacaccacacagcgnactgtcgcgtgctcgacntgcatgcagcgtgcgagtatcntctngncgattagccgcatatacgtatcgatnatcctcgtcgtatctacagtcatgcgtcgacngctgtagatcgacanaagcagcgcagagagctcgagcacaccaagaccacnaagaatcacgcnnancnnttannncanctattatacacataacaacatnnntactatatatctcacacacatntnatatataacactatctttggtagnggggtgtcgatagataggtntaggtgtggtttaag

SEQ ID NO: 1417 - DNA, 1486 bp, Glycine max
  misc_feature (15)..(15): n is a, c, g, or t
  misc_feature (24)..(27): n is a, c, g, or t
  misc_feature (33)..(33): n is a, c, g, or t
  misc_feature (35)..(35): n is a, c, g, or t
  misc_feature (37)..(40): n is a, c, g, or t
  misc_feature (50)..(50): n is a, c, g, or t
  misc_feature (52)..(54): n is a, c, g, or t
  misc_feature (72)..(72): n is a, c, g, or t
  misc_feature (113)..(115): n is a, c, g, or t
  misc_feature (127)..(129): n is a, c, g, or t
  misc_feature (132)..(134): n is a, c, g, or t
  misc_feature (139)..(139): n is a, c, g, or t
  misc_feature (143)..(143): n is a, c, g, or t
  misc_feature (163)..(164): n is a, c, g, or t
  misc_feature (203)..(203): n is a, c, g, or t
  misc_feature (217)..(217): n is a, c, g, or t
  misc_feature (244)..(244): n is a, c, g, or t
  misc_feature (267)..(267): n is a, c, g, or t
  misc_feature (270)..(272): n is a, c, g, or t
  misc_feature (275)..(275): n is a, c, g, or t
  misc_feature (302)..(302): n is a, c, g, or t
  misc_feature (307)..(307): n is a, c, g, or t
  misc_feature (338)..(338): n is a, c, g, or t
  misc_feature (399)..(399): n is a, c, g, or t
  misc_feature (402)..(402): n is a, c, g, or t
  misc_feature (425)..(426): n is a, c, g, or t
  misc_feature (432)..(433): n is a, c, g, or t
  misc_feature (436)..(436): n is a, c, g, or t
  misc_feature (538)..(538): n is a, c, g, or t
  misc_feature (594)..(594): n is a, c, g, or t
  misc_feature (611)..(611): n is a, c, g, or t
  misc_feature (621)..(621): n is a, c, g, or t
  misc_feature (849)..(849): n is a, c, g, or t
  misc_feature (851)..(851): n is a, c, g, or t
  misc_feature (853)..(853): n is a, c, g, or t
  misc_feature (855)..(855): n is a, c, g, or t
  misc_feature (857)..(858): n is a, c, g, or t
  misc_feature (860)..(860): n is a, c, g, or t
  misc_feature (864)..(864): n is a, c, g, or t
  misc_feature (866)..(866): n is a, c, g, or t
  misc_feature (909)..(909): n is a, c, g, or t
  misc_feature (936)..(936): n is a, c, g, or t
  misc_feature (977)..(977): n is a, c, g, or t
  misc_feature (1025)..(1025): n is a, c, g, or t
  misc_feature (1080)..(1080): n is a, c, g, or t
  misc_feature (1113)..(1113): n is a, c, g, or t
  misc_feature (1122)..(1122): n is a, c, g, or t
  misc_feature (1164)..(1164): n is a, c, g, or t
  misc_feature (1187)..(1187): n is a, c, g, or t
  misc_feature (1193)..(1193): n is a, c, g, or t
  misc_feature (1221)..(1221): n is a, c, g, or t
  misc_feature (1235)..(1235): n is a, c, g, or t
  misc_feature (1279)..(1279): n is a, c, g, or t
  misc_feature (1284)..(1284): n is a, c, g, or t
  misc_feature (1300)..(1300): n is a, c, g, or t
  misc_feature (1318)..(1318): n is a, c, g, or t
  misc_feature (1341)..(1341): n is a, c, g, or t
  misc_feature (1381)..(1381): n is a, c, g, or t
  misc_feature (1407)..(1407): n is a, c, g, or t
  misc_feature (1412)..(1412): n is a, c, g, or t
  misc_feature (1429)..(1429): n is a, c, g, or t
  misc_feature (1440)..(1440): n is a, c, g, or t
  misc_feature (1456)..(1456): n is a, c, g, or t
  Peptide Sequence Number=SeqID_7074
  Probeset Number=SeqID_11196
gtttgttgtagtggncgtgtcccnnnncccccncncnnnntttatccacnannnacccaccaacaaggatangaggatgtaaacgagcagtactataataatacacacctccnnncgacaaatatannntannntctcncttncgagagatacatgacttggnntagagtgtcctctcctctccccccacacatacctcttantaaattcatagatncttatagtcaacatatagttacccctnacacggagagtgttgcctacagncannncancggtgttgacggcgcagtgtatcgagntgcgngaagatatagtctatgtgagagaagctctanatagtaggtatatatatttcttactaacgatagagagttagcgctggatggagagcctccnccnctctgtacaacagagctcttgannttgaannccngtaggtttgtatgtagttgtccttccttggcagagtatcggagtgtatttgcactgatggttctgcatgaagcgcatagtgatcatgtatcttatatctatntatctgagaggaggatgtagagagagaacaagtaggagagaaaataatagtagagnaggtatccgtgtactgncctaacattntgtgttggctcttcgtattggtggtactacgcgcgtgtgtgctgttggatgtatgtgtgtagatagtaaggagatgttatgtgaagccgctacagaggacagataccctagatatatgcttcacaagagatgtcattgcttatatcagaataacgagtagatacgttgtgagttctatgatgttactatcatgtgagtcgacgtgtgagtgtacacccgctggtgtgntnancncnncnagcnanacaagacaacagacgacagcatagtcatcgtatgctatactcncgtacgctcgcatctacatgcacttcngccctcgtcctcaacagcagcaccgcctacgtcgcgcactnacgtacacagcactatagccgactttgcgcagactcacctagacacancgcatgcccctacagcgcgagcgccacgtattactgcgcgtggtgcacgtcgcgntgacacccgtgtgcagcgcgccgcacctcgcgncgcgcgatncgtcgcgtcgcgcgctcgtttcgcggcgccgtccgcgtatgnacagcgtatcgcgtcgacgacgnatcgcntcgccggcgcgatcgcgattcgtccgtncgtcggcggcgcgngcgcgcgggccgtacgtcgtaccgatcggcagcgcgcgctcgcnacgtnagtcgcgcggcgtcgnagtcgcgtcgcgacgtancgtacgcgatgcgatcgcgtcgncgtctcgtcggctatcgtcttcgcgcgtctcgcgacagantgctcgatccgccacgtcgcgatcgntgcgnacggcgtgtcgcgcgtncgcgaccgagncgttcaggtacgaggngatagcgttgtcggtacgcgcgtacggacg

SEQ ID NO: 1418 - DNA, 410 bp, Glycine max
  Probeset Number=SeqID_11197
atcttaaaacccactcgtacgcggaatttgtttttgatcattcttgggctaatgcttaccattttaatgtgtccaatgattgccccaagtaacgatcttgtgtccccttcacacctgtaaatggtccaaggatcggcctttgtaacacctccttcaaacatcaagttttcgacattattgtctccgcaatgaagaaactcgctttcacctcccagctttcatcattacatgttgcttttccctctaaaaatgagtggcacaagctctctgagaaaggcttcctccccagtattggaatgcagtgccactggaaaacccgtaactacaaaaattttccccacgtcctcatgggcttgctccaaaaaaaaaaaatagataatatagagcggcagcggcctagtgagcaggac

SEQ ID NO: 1419 - DNA, 506 bp, Glycine max
  misc_feature (505)..(506): n is a, c, g, or t
  Peptide Sequence Number=SeqID_7075
  Probeset Number=SeqID_11198
acaccattccttcccccgacccgtcgtcacatccacctctgaaaagctcgccggcgagatgtcgttccaccgcggcagcagctccggcaccggcggcggcgacggaccgagcgcgtggccgtcgagcctgagcacgccagagacagaggagctgtaccggtttgggctcctcgtgccgccgggttgccgtctgccggacaggaagctcgacaaggacggctacccgaggcgcgggcccggcgccaccgcggaggagaagcggaccggcggccgcaacaacatcgccggccgtcacgcgttctgggacggcaaagactacgccgccgtcattcgcgagtgccggctcacggagtccggcgacacggcagacctcgtcccgcgcccccgtccagaagcgcgcggccgtcgggcccctccaccacctgcgccggcgaccgccaatccccccgccccgccggaggtggaactgccgccggagcagttggttcttcgggaggacggcgann

SEQ ID NO: 1420 - DNA, 1473 bp, Glycine max
  misc_feature (56)..(56): n is a, c, g, or t
  misc_feature (251)..(251): n is a, c, g, or t
  misc_feature (282)..(282): n is a, c, g, or t
  misc_feature (1312)..(1312): n is a, c, g, or t
  Peptide Sequence Number=SeqID_7076
  Probeset Number=SeqID_11199
attactgctgctgcggcagcctacgttgtgaattgtcgatgccggcggttttagtnatataatatagcgcgcggcgctactgatgtagggcgtgtcaatatcagtctatgaaacgatacattattcttccgtcgtgtcggtggggcgtgagttcacacgcgcaataaaacggtatgatatatctctttccggcaaggctacctgtgaataaataaataatatcgtaggcggcgtcggttcgcgtgagcgangtgatagatgagcaggcgaaatgcgctcaanggtctgatgaagtgcggcggataatatcatagtaaatggacaggaaagtcgtgatatgttggcaagcgggtgcggtgtagagaatccccacatcagcgttagggatcgcgcggggtggtgagaaattaggtaatgtagtattatctaacgcgggcgaggatactaggaaatacgcagcgagagaggagggtggataatgacaaggaagggccgcagcaaatacgtgtcggtatgattagggcgacgcggggtgtatgggtatgtatagtgaccatcccgcggagaaaggataggacatgagcgatacaaagatggcctcagcaagagtgcgtagtcgggagatacagtatgcgtcagggtgtggcacccacgaaaatatggggcgacgattatagggcgtatagggtggtgggtaaaggtcgggatacgtattctatgcgcggaacaatatgggatcaacgtgtagggataagatgaggggggcggtgcgcggtggttcgcggtcaccaatcagtactacgcggccggtgtgtggtgacatagtatagaacaacaaagcgggaaaaataatagaaatatagaagtggtcgtataggcgtagttggctacctccttatcatttccccccagagattatgaggaggtgtgggtagacagcgtattgggtagcgattgaggttgtttggtagattgtcgtgattacactgggtgatataagattcgggggcgataaggagatatattagagaggcggaggtcggcccatggcgcagcgaaagaccggcgagtagtgttcagcgcgcggataaggggaggacgaccgcgtggagaaatggcagagtgaggtgggatagtaaaccgagttgtggatgtgatagggaagcgaccgaaaataatatatggcgtgcagctgatccgttgctaaaggggaatcagcgttggcggtaatataaccgcataatatagaagacccacacctctcctgggcctggattagggggttgatgtaatagatcgacccgagaaattngggaattttcatgtggttataaattgttcttctgcctttccttcgcccacgacaagctttgagtatatgcggggggggacgggggggcgggaacgcaccgggaaacacagatgatagtgagggtggaagaatatacttgcgcgtggggtagggggcaaaac

SEQ ID NO: 1421 - DNA, 1868 bp, Glycine max
  misc_feature (22)..(23): n is a, c, g, or t
  misc_feature (25)..(27): n is a, c, g, or t
  misc_feature (37)..(37): n is a, c, g, or t
  misc_feature (43)..(43): n is a, c, g, or t
  misc_feature (67)..(67): n is a, c, g, or t
  misc_feature (112)..(112): n is a, c, g, or t
  misc_feature (115)..(116): n is a, c, g, or t
  misc_feature (118)..(121): n is a, c, g, or t
  misc_feature (123)..(127): n is a, c, g, or t
  misc_feature (211)..(211): n is a, c, g, or t
  misc_feature (309)..(309): n is a, c, g, or t
  misc_feature (329)..(329): n is a, c, g, or t
  misc_feature (446)..(446): n is a, c, g, or t
  misc_feature (473)..(473): n is a, c, g, or t
  misc_feature (485)..(485): n is a, c, g, or t
  misc_feature (501)..(501): n is a, c, g, or t
  misc_feature (562)..(563): n is a, c, g, or t
  misc_feature (694)..(694): n is a, c, g, or t
  misc_feature (802)..(802): n is a, c, g, or t
  misc_feature (809)..(809): n is a, c, g, or t
  misc_feature (813)..(813): n is a, c, g, or t
  misc_feature (829)..(829): n is a, c, g, or t
  misc_feature (1030)..(1030): n is a, c, g, or t
  misc_feature (1129)..(1129): n is a, c, g, or t
  misc_feature (1185)..(1185): n is a, c, g, or t
  misc_feature (1229)..(1229): n is a, c, g, or t
  misc_feature (1267)..(1267): n is a, c, g, or t
  misc_feature (1306)..(1306): n is a, c, g, or t
  misc_feature (1308)..(1308): n is a, c, g, or t
  misc_feature (1323)..(1323): n is a, c, g, or t
  misc_feature (1421)..(1421): n is a, c, g, or t
  misc_feature (1441)..(1441): n is a, c, g, or t
  misc_feature (1462)..(1462): n is a, c, g, or t
  misc_feature (1594)..(1594): n is a, c, g, or t
  misc_feature (1671)..(1671): n is a, c, g, or t
  misc_feature (1690)..(1692): n is a, c, g, or t
  misc_feature (1770)..(1770): n is a, c, g, or t
  misc_feature (1778)..(1778): n is a, c, g, or t
  misc_feature (1866)..(1866): n is a, c, g, or t
  Probeset Number=SeqID_11200
ttttggtgtttggctgtccttnntnnntttttttttncttctnttgcgcgtgattgttcggcgggcncgacgcgctctatcacatctgagactccgatggtcgccgcgcggnttnntnnnnannnnntgttgctcgtgcctcctcctctctctctcctccccctctccattttgttgcgccaccccgctgctgcttgcccgcccatccggnagcctcccgcgtcgggtcctctctcacacttgctcctcttcgccctcccttctgcgcctcacccgtccggtagcgccgctcgcgcgctcgtgcctggncggcgtcgcgtgcgcgcctnatctgtcgtctttttgtggtcgcgctggtgtgtgtgcgtcggtatcgcgttccctctgtgtcgcgctcgccctcctcgccgccccgagcgggtggagtgtctcccactagccttctntccgccctgcgccctcgctcgccgctncgtgttccatgntgtcacgtgcccacgntcgctctttcttgctgtttcgctcgctgcgcggcgtggcgccgcgccgcgtgcgcttccannaaataaccccgcgactgcgcgtgtaccgcgtcgtgttcgcgactgttgtgtattcgttgcagcgtctgctgtcgcgccgactgtctgacgcggtgctgcgctggtggtgccggtgcgcctctctccttcgncgccctctcgtcctactaccgctcgcccgcgcgcagctcatgtgtgctggtgggtgtggtctgcgcgtcgctcgcctctccgatcgtcgtcgtgttgtgtctaacatngtatgcnatgnctcggccacgcgcacncgttctcgcaccgcgagcgcgcccgctcttgtttgttgttgtgtgtcgcttctcggtgtccttctctcttctcgctgtctcgttccgtgacgctgtgcgtggcatggcggcgctcgctgcgcggggtgcgccgcgcgcctctggtcgtgtgtttagtggctgtctgtgtgtcggcgtctcgtcatcgtcgctgcggcgtgnctcggctgtgcgcgacctcgttgtgccgtttgttggtgctgttctctgctcgtgcgtgtcggttgtcgcctcgccgctgtgtttgtatggtgttcgctntctcggtagctcgtgtactggtcgtcgtcggagtctgcattcgttcttctgtattntgtgagagccgtctcgctctgcgtgtctatctctcgcgctctcnactctcgactcgcctctgctctggtcgcgcgccctctnactccgccttccatgtcgtgtctctctgttctcgcgtcncngcctcgtcgtgtctntctctctgtgccgcgtacgcgctcgcgttgatgtgatgtttgtgaccccccacgtgtgtcgccgcgagcgtgtctcgccgctctacggcgcgtgtgcngtgccgagcgcctgcgcacngcagtctacagtgctcgcttntgtgtgtcgctatcgtcggctctcgtgcctctcctgctctctgtcgccgccgtgatgcgcgtgcggccgctggcctgcgccgtacgatgcgtcgcgcacttgcgctacctcgcggtcctcgtcctgcgcatnttgtctaactcacactctcagagtctcgcattctgacgtggagctagcgcccctcccgcactcctgcccccgttctngctcgtcttttcgtcgccnnntcgagtgtgtgcgcttgtgcgtgccgcacacctacttccatgtgggtcggctctccttgccgcgcctcgtcgtcggcngccgtccntcgtgtctgccctctcctgtgctacatcacgcttacgtttgcacggcccgccttctttgttctattcacgttgcgttcgtctcgtccncc

SEQ ID NO: 1422 - DNA, 1626 bp, Glycine max
  Peptide Sequence Number=SeqID_7077
  Probeset Number=SeqID_11201
gaaatgaactcaatgaattgactaaattaagagaagatcataaagctttgaagagcatacaaactcaatggactcaagaaaaggagaattatatcaataacgaaagatcttataatgaaaatctcaagaagattaaagatcaatatttgaggctttctggagaacttgagattttaaaaactgagattgcaaataaagaccatgagatagtgaccttcaagaaggaacatgaggactttttaaatgaaagggatagtctttaccaagagattaatggttataaagacatggaacctaaattgagacaagagattagcgattattcttcaaagatttctggaatttatgagcaacaggagagcgaaattaaccaaatgaaggatcagtatctgaagctcgctcaagatcacaagaatttgacaaagacaatcatattgaaagatgatcaacttgcgaaaatcagagacgaattgcaatatgtgtttgtcgaaaaggaaaagttgatggaagacttgaaagctcagaaacagactgaagttaaattaaagaaagagaaacaagagtactatgagaaagtcactcgcttaaataatgatcaatatcttttactcaaagaaattgacaatttaaataaagctaatgaaggtgctgctaatcaaaataatatggctcaaaagatcaagcatttgaataaacttaaggaagaaaataatgaacttammactgaaaaagctcaattgtgtgaagatcttgcattagcaattgatcaacgtgagacactccaaaagaaacttgatgaacaacttttgatgaaaggaaamcaagatggatytaatgacttcaagcaagatattgagaaaaggaatgttgatagtcaaatattggtggaaagtttatcaagaataaattcgattgtttatacaaatcttcataaagaagactctaaattctttgttccaaaagtcaaagatattgaatcgactcttcgtggagttcaaatcttgtgtgctttaattatggaaaaaaataatagaataagaaacagagaaagtgagttggaaagcactttgttgaccaacagtattttagaaaaggaggttttattgttgaaacagaaaatcagtattgggaattcgattgcaagtgagctagtgagtcagaatgaaagtttaaawatcagcaaatytcaacatccaccattggacctgagaaacaagaatcgtatgccaactcctaccaggatgcaaaataccaacgagagctattataaagtcgtaccacaaccattaaactcttctcatagagcaggcagtacaaatgtaagaaggcaagaaaatgaagtgcctggttttgatgaaaatttcagaagtaatacctctgacatcagaaaatattctcacttaactcgaaatccttcagcaaaataaagttttaaaaaatagtctattgttgttattttcatttttatttagtaataattttctcaattttttataatgaaacaaccaacatattttatttatcaatatcaattgtttcatgttgatgatatgaattcactcgtttacttatttatgactctgttttgtctatattccgaatataattcgaataataaaaattctg

SEQ ID NO: 1423 - DNA, 511 bp, Glycine max
  misc_feature (240)..(240): n is a, c, g, or t
  Peptide Sequence Number=SeqID_7078
  Probeset Number=SeqID_11202
gcggaacaaggtcttctctttggccgaggtctctcagcacaacaatgccaaagactgttggcttgtcattcatggcaaggtttataatgtgacaaagttcttggaggaccaggctggaggggatgaggtcctgttgtcttccacagggaaagatgcaaccaatgattttgaggatattggtcacagcaccaccgccgtacccatgatggatgagttctatgttggagacattgatacatnaaccatccccagcaaggttaagtacactcctccaaaacaacctcactataaccaggacaagatgccggagcttatcatcaggatcctccactttctagttcccttgtttatcttgggtttggccactcgtttttccttctacaccaaatcaccttaatcatttaactgccacaacacattaatttccgcatttgcaatattccgttggtgctgaaacacccccccttccccccccctttcctgtcctcccccgccaggcgccccctccccc

SEQ ID NO: 1424 - DNA, 576 bp, Glycine max
  Peptide Sequence Number=SeqID_7079
  Probeset Number=SeqID_11203
cagctacgtaggcccccccccccccaggaaatacacctacagaggactctcccttgagcagctcactgaaatgaagaatgagcaactcattgagctcttcgaatccagaattagaagaagattcaacagaggtcttaagcataaataccagagattcgtccaaaagctcagaaagaacaagaagaacctccaacctggtgagaaacccgctccagttaagactcaactcagaaatgccattgttcttcctgaaatggtaggttcagtcgttggtatccacaccggaaaggaatatgccaatgttgaaatcaagttcgatatgattggtaaatatctcggggagttcggtctttcctacaagccaactacccatggtaagccaggtgtcggtgctactaagggttcttccaacactgataagaaataaacaagaaatagaagaaggaaagaagagaagacgtatgggtcttttgttttttcgtggatatttgttgctcacgataatgtaatgttttgtgctcttgcataaggttatggctttagcaaattgaacttaagaattaagatgagaagctc

SEQ ID NO: 1425 - DNA, 672 bp, Glycine max
  misc_feature (601)..(672): n is a, c, g, or t
  Peptide Sequence Number=SeqID_7160
  Probeset Number=SeqID_11204
gcattcaagaccaagaacacaaaaaccacttaattagtccttctcacatccaaaatcttgtgccagcaaatcaaacatggcatccatgactatgcttcagaccatgattcctaagaatgcaccgaacctccctcctcgtgttggtgcttcttccaacaacactactaagatctcatttggtggctcaggtagggtactgtggaccgggattcagaggaacaggaataataggtcttcttcgattgtagttgctgcagttggagatggttcatctgatggcactgcgtaccttgttgctggtgccattgctgtggctctagttggaaccgcctttcccatcttcttctctcgcagagacacatgccctgaatgtgatggagcaggggttgtgccgaatgctaatgtgacattgatagccaatgcagcacggaaggcacagacccgaatgggtggtgctctgctgaatggttggtgcatacgtaaacgaattgacaatgagagacagtatgctccgacgtggccggtgctggctttgcttatactatgtagtagttgagggtaatataggtggaatgccatgctggtgtggcgtggactatgnnnnnnnnnnnnnnnnnnnnnnnnnnnnnnnnnnnnnnnnnnnnnnnnnnnnnnnnnnnnnnnnnnnnnnnn

SEQ ID NO: 1426 - DNA, 1722 bp, Glycine max
  misc_feature (19)..(19): n is a, c, g, or t
  misc_feature (38)..(38): n is a, c, g, or t
  misc_feature (64)..(64): n is a, c, g, or t
  misc_feature (67)..(67): n is a, c, g, or t
  misc_feature (75)..(75): n is a, c, g, or t
  misc_feature (112)..(112): n is a, c, g, or t
  misc_feature (117)..(117): n is a, c, g, or t
  misc_feature (157)..(157): n is a, c, g, or t
  misc_feature (159)..(159): n is a, c, g, or t
  misc_feature (198)..(198): n is a, c, g, or t
  misc_feature (243)..(243): n is a, c, g, or t
  misc_feature (553)..(553): n is a, c, g, or t
  misc_feature (555)..(555): n is a, c, g, or t
  misc_feature (607)..(607): n is a, c, g, or t
  misc_feature (724)..(724): n is a, c, g, or t
  misc_feature (918)..(918): n is a, c, g, or t
  misc_feature (928)..(928): n is a, c, g, or t
  misc_feature (978)..(978): n is a, c, g, or t
  misc_feature (1071)..(1072): n is a, c, g, or t
  misc_feature (1075)..(1075): n is a, c, g, or t
  misc_feature (1077)..(1077): n is a, c, g, or t
  misc_feature (1081)..(1081): n is a, c, g, or t
  misc_feature (1084)..(1084): n is a, c, g, or t
  misc_feature (1087)..(1087): n is a, c, g, or t
  misc_feature (1151)..(1151): n is a, c, g, or t
  misc_feature (1162)..(1162): n is a, c, g, or t
  misc_feature (1173)..(1173): n is a, c, g, or t
  misc_feature (1178)..(1178): n is a, c, g, or t
  misc_feature (1202)..(1202): n is a, c, g, or t
  misc_feature (1212)..(1212): n is a, c, g, or t
  misc_feature (1227)..(1227): n is a, c, g, or t
  misc_feature (1229)..(1229): n is a, c, g, or t
  misc_feature (1261)..(1264): n is a, c, g, or t
  misc_feature (1266)..(1269): n is a, c, g, or t
  misc_feature (1323)..(1323): n is a, c, g, or t
  misc_feature (1340)..(1340): n is a, c, g, or t
  misc_feature (1343)..(1343): n is a, c, g, or t
  misc_feature (1371)..(1371): n is a, c, g, or t
  misc_feature (1426)..(1428): n is a, c, g, or t
  misc_feature (1431)..(1431): n is a, c, g, or t
  misc_feature (1435)..(1435): n is a, c, g, or t
  misc_feature (1452)..(1452): n is a, c, g, or t
  misc_feature (1526)..(1526): n is a, c, g, or t
  misc_feature (1545)..(1545): n is a, c, g, or t
  misc_feature (1548)..(1548): n is a, c, g, or t
  misc_feature (1550)..(1550): n is a, c, g, or t
  misc_feature (1553)..(1553): n is a, c, g, or t
  misc_feature (1562)..(1562): n is a, c, g, or t
  misc_feature (1565)..(1565): n is a, c, g, or t
  misc_feature (1592)..(1592): n is a, c, g, or t
  misc_feature (1594)..(1594): n is a, c, g, or t
  misc_feature (1614)..(1614): n is a, c, g, or t
  misc_feature (1621)..(1622): n is a, c, g, or t
  misc_feature (1692)..(1692): n is a, c, g, or t
  misc_feature (1695)..(1695): n is a, c, g, or t
  Peptide Sequence Number=SeqID_7161
  Probeset Number=SeqID_11205
atttggttgttaggtgtgntatcttttatgtgctatgncgcgtgagatgaatgcatagagtctnctngtgtgtgntctctattcctatctcggcgcgcggccctgcacgtgngtatngtctctgctgacggagaggtctatacgccagcaccgcagncnagcagtacgatgcacactacgacatccagacaacacaanacatgcaataactattattataatacttacctctgtctatataantatatcgcatcaacatgagtgggtctgatgctctcaatgagtatgagccgcgagacaatcatcgagtcaacagagtacctgagatatgtgcatattggtgttcgtgtctcgtgggctgttcggtgcgcgagagcgcgccgcattcaagtacacgcatacgtcaacaacaaacagagaagagagagaccgacatacccaacacctatttacgtcgtgtgtgcgagcgtatgtgtgtgggatatgtcccactcaaacttagcaagggtgcatgtatgtttagtgttatagtagccgcgtgtgtcggtgggtngntgtggctctctagcgactgagatatagcagagactgccggatgtaggcaggncgcgggcgtgggctagttaatactgctatgtggatttacagataggagagtgacgacgtgctcgctgcaggccatgtactactcacatttatataagtaagcgagcacacgatatgncgagcggtaccacgggacgcggtaaggagtcgagggtcggtcatcagacacggcacatcgatatatccactgttgtaatggtagctccatatctgaatcactgcatagatggatcgtggcactcacgcacggcactgtctgatactcgcctactatcggaagcttgtatagtgcgactgaactgtagtgcgccngatccggtangctgatgctgtagtgcgatatatatgatctatattagacactcatgagantatatactcgtaggatacagtattgatgtaaatgatcttagatgatagtgagaagcatacgagagatagactgcactgaatgatgaacgatgnnccncnccanctnctntcaatatcacacgtgtcggaagcgcgtatatctgcacatctactaacgatcggtatgcgtgctncggctgcgagntgatgccgacnaggtntgtagcacacaacgcgcgcagctnttcggcgatnacggatgcgcgactnangctgagacagaagcacggatcgcgcgtcactnnnncnnnncttgctcatgcgcttcccagtgctatagagagtatactaatcgactgatgctgngtcgtgttctggactcncantcgcgcgttcgtaactgagactagacgnacgaatcacatatgatatatacacatgacgatagtgagatatgatcacacgactnnnccnacanctatacatcatatcatnactgggacgtgtagactacgagctgtgtcgcggctgctgcgtgatgcgctgcgtggtatgatagcgagtcgacncatgatcagcgagatatgntgntnggncacttgctncgntcagtgtcgctgcagctacgtacactnangtactgcactgcgatactgntcttacnnctacgatatacacgtagttgcgtgtgtgtgctcacgatgcgatatatctgtgactgatcagcgagatganctncgtgatgtagtatagctgtcttggtgg

SEQ ID NO: 1427 - DNA, 1402 bp, Glycine max
  misc_feature (33)..(33): n is a, c, g, or t
  misc_feature (43)..(44): n is a, c, g, or t
  misc_feature (71)..(71): n is a, c, g, or t
  misc_feature (139)..(139): n is a, c, g, or t
  misc_feature (153)..(153): n is a, c, g, or t
  misc_feature (805)..(805): n is a, c, g, or t
  misc_feature (967)..(967): n is a, c, g, or t
  misc_feature (980)..(984): n is a, c, g, or t
  misc_feature (1042)..(1042): n is a, c, g, or t
  misc_feature (1061)..(1061): n is a, c, g, or t
  misc_feature (1239)..(1239): n is a, c, g, or t
  misc_feature (1328)..(1328): n is a, c, g, or t
  misc_feature (1385)..(1385): n is a, c, g, or t
  Probeset Number=SeqID_11206
gtatatagtgaatagattactgagtctatgagngggtggtgtnnacatggagatgtatattcgtttagtanaatacatgatttgttatcacttgccacgcatcacggctactactaaccatggaaaaacccaccacccncgccatgtcggcgngcgcgcggcgactcatcaaagatactcacacgaatgattactacccccccaggaggctacagagtgggggagaactacggaccaatctctcttctgtatatattctatgatttataactataacaactatctatgcatggagcaagggtaaatgaattttaggacgcatatagaaaacaggatagaatatatctcttcacaatattaactacccagcccatagatctaccaaattttccgctgcttcacactttcgcgcctgaaataatcaatatagcattcttatatctggcgcatagatccgcctcatccacctcactattactgccgaggttctcgcccacgaccccggaccgatctgcccaacctcttcgtgtggctgtaacatccactcctagcgcctcacattgcacgttgacgctcgactctactcatctcatgatcactttaaggcttgaaatctgtataaacttatccacaatgaaccaacaccctgacagaactacccatcttcacccacctaagtggtgagcttcttatatatcgcttcgatactagcgtgcactctatcttctcaccactctcgtgaggatactgggtgttattgtatggagattttaaagaggagttaatagggacacgaagaagttanaatggtattgccgcaagccgcacaccaccaccacacccccacacgctatattggtagggtaggtgttgagagattatgaggattatacagatgagatataccctgtgtgtaacccaaatacatcttcttcacaaattaatatggagtgtgtttagtgagtgnagaaattttgtgnnnnnaactgtggtttgaacacccaacacaaaacctgacataatagatagtgtgtgtgcgtgntgctgcccgccccgcgcgnaggggtggaaacaacacatatatgatgatattttatatatgagtaccgagcgtcggaatagtctcgcacttgtatcctctgcttactatccctcagtcttgcagttattagtgtactactctagcgaatattgccctccactccctatcgtccatcactcatcctctgtctgcgtttntttgtgtagcagaatcactcagagcgtaactgtgaagatgtcctcttacacctcgttgcacaccacttcactagttaaactcatcgctnatcctgagtgtcctaacgcgattctctatcctggtggactctcgtgatctatccatngtagcattggcgtatcg

SEQ ID NO: 1428 - DNA, 1416 bp, Glycine max
  misc_feature (3)..(3): n is a, c, g, or t
  misc_feature (254)..(254): n is a, c, g, or t
  misc_feature (351)..(351): n is a, c, g, or t
  misc_feature (354)..(354): n is a, c, g, or t
  misc_feature (644)..(644): n is a, c, g, or t
  misc_feature (885)..(885): n is a, c, g, or t
  misc_feature (929)..(930): n is a, c, g, or t
  misc_feature (983)..(983): n is a, c, g, or t
  misc_feature (1154)..(1154): n is a, c, g, or t
  misc_feature (1169)..(1169): n is a, c, g, or t
  misc_feature (1174)..(1174): n is a, c, g, or t
  misc_feature (1176)..(1176): n is a, c, g, or t
  misc_feature (1179)..(1179): n is a, c, g, or t
  misc_feature (1185)..(1185): n is a, c, g, or t
  misc_feature (1203)..(1203): n is a, c, g, or t
  misc_feature (1207)..(1208): n is a, c, g, or t
  misc_feature (1237)..(1240): n is a, c, g, or t
  misc_feature (1242)..(1245): n is a, c, g, or t
  misc_feature (1261)..(1261): n is a, c, g, or t
  misc_feature (1263)..(1263): n is a, c, g, or t
  misc_feature (1297)..(1298): n is a, c, g, or t
  misc_feature (1326)..(1326): n is a, c, g, or t
  misc_feature (1335)..(1335): n is a, c, g, or t
  misc_feature (1345)..(1347): n is a, c, g, or t
  misc_feature (1349)..(1349): n is a, c, g, or t
  misc_feature (1372)..(1372): n is a, c, g, or t
  misc_feature (1377)..(1377): n is a, c, g, or t
  misc_feature (1382)..(1382): n is a, c, g, or t
  misc_feature (1384)..(1385): n is a, c, g, or t
  misc_feature (1387)..(1387): n is a, c, g, or t
  misc_feature (1390)..(1391): n is a, c, g, or t
  misc_feature (1397)..(1397): n is a, c, g, or t
  misc_feature (1401)..(1401): n is a, c, g, or t
  Peptide Sequence Number=SeqID_7162
  Probeset Number=SeqID_11207
ccntgacgaactgtgagcatttgtatatacgcgactcatttctatatgtggagaatgtggcggagggacgccgcaggttgtgataataactgacaccgcacttagataattagtgtgatgagtatgagatgggtaagagtacagagttgtattaaacagcaacaccagtatgtagtagatcgagtggtattggagcgcgacctatatgtagagcgagtagaggtccgtcgcttgatagtcggataacagctagncagatgttatgtagagtggtgttatatgtacgcgaccagtatatgcgtatggggtatgatagaagtatgagaaacggcatattatagtgctcggcgncgncgtgttttatgtatattatatattgatgtgcgcgctcaggtgtgtatctctctcgcgccgaacgaataagtaatgacacgagtgtatatcgcgcagtatatgtgagttagagttattactcaccgcaccacggcagcggtgagatgtgatgcgtagagtagtgtggttgaccgggtggtggcggtgtggcgggtgcgagcagcacacaatatatacatgggtcgcgacgtgcgcaggatggacgcatggtgatggcgtgagagaggagtgaagagcgttgggacgctggngcgggcgagagggggtcggtgagctgagtatgagtggaataagataagctaacaattatatcacccatatctaatactacttaagtataatcacaagaaaagagaagtagtgtcgtgagatctgataactaacgtgcacatcatcagcagccgccgccgccacgcccacgccacccagcaactacaacaacgataattcagatgtcacaacattaggagatgaagataaaatgttagactnggggtgtggtggtgttggcgcgtatcacagagtgatgtctgggnntgcgcgcgtcactgtggtgcgatgcacacgggcatgacgacactacaaatatntatgtgtgtatgttgtatgtgcgcgtcgcgcgccatcgtgtctccgcgcgctctttaattataatcggtatatatatgaggtacgcaatactctagtatcgcgctctcgacagacgcgtcgcgcgatagctcatatcgtaaaggtcgcagagcacgggtagtatcatgtcnccgaggtgtgttatnttttntntgncggcgngaccctacacagatacancacnngctcgtcacgccgcggagagtatgagaannnntnnnntgcctacacagagatnanatagaagacacgagagataagagagatataaaannaacagagtcttgtcatttattcagtcgngtcttgctntttggttgcnnntntcgttgttgactgatatattctnatatntaaanannanaannaaacanaacntctattaacacaacc

SEQ ID NO: 1429 - DNA, 984 bp, Glycine max
  misc_feature (393)..(393): n is a, c, g, or t
  misc_feature (819)..(819): n is a, c, g, or t
  misc_feature (984)..(984): n is a, c, g, or t
  Peptide Sequence Number=SeqID_7250
  Probeset Number=SeqID_11208
ctagctccagttatactccactaacacccggggtttcaattgggggaaacatttcgcacggagctgaaatggtacagacaaacaagtaccttgggcaatttggatttcctccgcagccttcttttggtgatcctatgtacatgcactatcatcagctaccttttgtggagggtatatgctattccgggtcattttgagccaccggcaccttgagcccgtggtgttagccaaattagtccttatgattcgcaaaaaaggcccagtactggtgcctatttggatgataaaaaattacctgatcagagaactgctgctaatatgacctctagaagaggtggagtatcaattcctagttattttggacacatgccaaacatgggttttgtaatgcancatccgagttcaccacttcctagtccagttttatctggatacccagaaggaagtccaggccttccaggagttaggaatgaaataaatctttccccggcttctggaagaaatggaggcataatatctggatggcaagttcccagatcttttgacagtgctcatgaccccaaaattgttaattttcttgaagacttaaaatctggcaaaagtcgaagattggaactatctgatattattggacatattgttgaatttagctctgatcaacatgggagtcgatttatacagcagaagttggaaagttgtagtgtcgaagagaagacattaatgtttaaagaagttcttccacatacttctaaattaatgactgatatttttaataactacataatacaaaagttttttaaatataaaaacccagagcanaaaagagaacttacagatcgacttatgtaccagatactacctttaagtttacagatatataactatcatagtagccagaggacacttaaaattattcagcttgggcagaaagctcagcttgttcatgatctagatagaagtaggatgagatgggtgcgtgagcgn

SEQ ID NO: 1430 - DNA, 832 bp, Glycine max
  misc_feature (504)..(504): n is a, c, g, or t
  misc_feature (788)..(788): n is a, c, g, or t
  Peptide Sequence Number=SeqID_7251
  Probeset Number=SeqID_11209
ccctcttacacgccccggcccccacccatgtaagaagcgggcacccactaaaaaaggtgcagctccgcgcgggtggcggccgcagaatcgttgccgcccagaaagaccgcgtgcgaacgatggcttcgtcaacagcgtccagaaactacagagacgcgaaatcagctcccagcgtgatcgcagctttcaccatgagcgacgctcaagagagattccggaatattcgcttgcaggaagaatatcacacgcatgatccgaaaggtccttcatctatgatgttgccgctcctgagaaaaggaccaaagagtattgagattgtagcagcacgcgatattgtttctgctcttgcacaatcgggtgcttgtgcgggatttatccgagagaccatgcaacggatatgctttttgaatggtacgccggagtgaaagttataagaagcccgttttataacaagaagacccgggcgccctttatcaaagttatccggatatgcgtcacgacaanggcagaggctctttggaagccgctgaaggccccgagggatggaaacctgtgcaggcaggggtacccccaaaatgcctgggttattgggcctttttgggaatccccaaggtcctctggaaagtggcgccgggcttctgagcgaggtttgagatcgaagcaaaaaggggaaggggaattaacaccaatcctgactccaggacagccacctcgccagggcatttggaccagggaaaaacctatccggatggcgggtacctctatctccgggaagagaaaagggtcancaaaagattaaggaatcggccccggggaacgccttgtgttgctc

SEQ ID NO: 1431 - DNA, 502 bp, Glycine max
  Peptide Sequence Number=SeqID_7252
  Probeset Number=SeqID_11210
gcgcgcgtccatctgactaggaattcggcctgcgcagttttttttcttttttttggtttttggccatttgtccccttttgcttttattatttccagcgttttagcgtttggagattccgtcgtggacccacgcaacggcaacaacaaaaaaacattgggtcaagtgcaacttcccacctttttttttggattttcagggaggaaacccaacgggttgattttgcaatggaaaaattccttctgacttattagttgaacaattgggtattaaggagtattcgtctgcgtatttggatccgaatctcaaatctagtgatcttgttaccggagtctgctttgcctccggtgcttgaagatacgatcctttgacacccaaaataacgctcgttctatcgttatctactcaacttgacttgttcagggaatacatatgaaagctgaaaggcatttgtggtgagagcagaacaaactacatactatccaatagtctttattcttgtgg

SEQ ID NO: 1432 - DNA, 1642 bp, Glycine max
  misc_feature (1)..(1): n is a, c, g, or t
  misc_feature (7)..(7): n is a, c, g, or t
  misc_feature (18)..(18): n is a, c, g, or t
  misc_feature (88)..(89): n is a, c, g, or t
  misc_feature (91)..(91): n is a, c, g, or t
  misc_feature (112)..(112): n is a, c, g, or t
  misc_feature (122)..(122): n is a, c, g, or t
  misc_feature (129)..(129): n is a, c, g, or t
  misc_feature (147)..(147): n is a, c, g, or t
  misc_feature (220)..(220): n is a, c, g, or t
  misc_feature (278)..(278): n is a, c, g, or t
  misc_feature (350)..(350): n is a, c, g, or t
  misc_feature (360)..(360): n is a, c, g, or t
  misc_feature (367)..(367): n is a, c, g, or t
  misc_feature (410)..(410): n is a, c, g, or t
  misc_feature (412)..(412): n is a, c, g, or t
  misc_feature (417)..(417): n is a, c, g, or t
  misc_feature (447)..(447): n is a, c, g, or t
  misc_feature (452)..(452): n is a, c, g, or t
  misc_feature (470)..(470): n is a, c, g, or t
  misc_feature (473)..(473): n is a, c, g, or t
  misc_feature (540)..(540): n is a, c, g, or t
  misc_feature (654)..(654): n is a, c, g, or t
  misc_feature (662)..(662): n is a, c, g, or t
  misc_feature (684)..(684): n is a, c, g, or t
  misc_feature (711)..(711): n is a, c, g, or t
  misc_feature (742)..(742): n is a, c, g, or t
  misc_feature (765)..(765): n is a, c, g, or t
  misc_feature (771)..(771): n is a, c, g, or t
  misc_feature (814)..(814): n is a, c, g, or t
  misc_feature (844)..(844): n is a, c, g, or t
  misc_feature (868)..(868): n is a, c, g, or t
  misc_feature (888)..(888): n is a, c, g, or t
  misc_feature (956)..(956): n is a, c, g, or t
  misc_feature (991)..(991): n is a, c, g, or t
  misc_feature (1060)..(1060): n is a, c, g, or t
  misc_feature (1159)..(1159): n is a, c, g, or t
  misc_feature (1181)..(1181): n is a, c, g, or t
  misc_feature (1242)..(1242): n is a, c, g, or t
  misc_feature (1350)..(1351): n is a, c, g, or t
  misc_feature (1422)..(1422): n is a, c, g, or t
  misc_feature (1438)..(1438): n is a, c, g, or t
  misc_feature (1461)..(1461): n is a, c, g, or t
  misc_feature (1506)..(1506): n is a, c, g, or t
  misc_feature (1541)..(1542): n is a, c, g, or t
  misc_feature (1564)..(1567): n is a, c, g, or t
  misc_feature (1571)..(1574): n is a, c, g, or t
  misc_feature (1583)..(1583): n is a, c, g, or t
  misc_feature (1587)..(1590): n is a, c, g, or t
  misc_feature (1612)..(1612): n is a, c, g, or t
  misc_feature (1616)..(1617): n is a, c, g, or t
  misc_feature (1622)..(1622): n is a, c, g, or t
  Peptide Sequence Number=SeqID_7253
  Probeset Number=SeqID_11211
ncggtgngatgtgaggtncgttgtgacgtcccgactagcgtcgacgatagtatctgactatgatatatcacagcatgtcgaacgtacnntncagtcattgcgtagatcaggnacgagtctgngaacacnatcctatgagtacgtcantatgcgagtactagacatcgttgtggaggtctcatgctcatgcgcatagagacgtgtcagtcgtcctgtagangcgtcgcattcgtctacgcatctatcgtactatagacatcgatatatacagcatacantacacatcgacataggcatatagcactcacacgtgtcccatacgtttcgactgtcgacatctacaagtgtgngtgcaagatnctacagngcaactacgtgcgtggctgattgccgacatctcacgttcacantncactntcacgcagctcaatgacgtctcgcgctagntaatngatactggtgtttgtgtnatnttcactataatagtcgcagagttcactgcatcacatcacaacgacgtgagatgagcaggatagtagngagtgctgacaggagagagcgtcatcttgtattacgtttatggctagatcagatgagattgcgttctccgctggtcgacgtcgtgacgatggtatagtgttagcgcgtgtggtngtgtgtgntgaggtgggggtgggtttcttncctctcatatgagtctagcaccgattncatattaatctatcagatctcactatctcantccagacttgtgcaggtggtgtntcacancccaacaccttcatctctacatacatcacgagacgaggaccanggacgacgctcggtactcgactcagcacgngctgggatgttatatgagactatnccatcatactcgctgtgcgngtgagtggcgttctctccatatcgtacatcttacttgcgctgtgcgtgtgactacacactatacacanaacacaacagcgattagtgtctatcgagcagtgtngtgtctggtcgcattgcgtctgattatttatattatccacggccatatctctttactctctagcagagngaggagagccgacacatcactacaaatacccacctccctaccaacaccctcctcagtccagacacttagtagcgtgatgcgaatcactgaggagtgatntatgtgtaatgtagactgaganaattatctctaaatatatcgctcactacacacaatacacccgcgacgctagtgctcatagnatgtatagaagatgtagaataatgtatagaatgactgtcctgaggatctctctactatattcttatattgtcttttgtgtgtgtcaggcgtgagctatctagcttacnngtatatgtataatactacaaatacttatatagaatgtgatagtagtgtgtatactaatcgtcatatcaatncatctcttatctactnattagtaggtctcgttcggttgnggcgctctacgttcacgtagttgtcggtctattctattgtgggtngttccctctcgttttgtgcgttttattaggatttnngagagagatgtaagtcgtgtcnnnnccannnnataatgatnaaannnngccgagagcgagaaaagcaggngggnnggggnggagagcacaccacaaatac

SEQ ID NO: 1433 - DNA, 649 bp, Glycine max
  Probeset Number=SeqID_11212
gaacacagctcacagttccaatctaaaatcgaccatggggtcagcaggtgagactcagattactccaacccatgtatctgatgaagaggcaaacctttttgccatgcaactagccagtgcctctgtactccctatgggtctcacaccagctcttgagcttgatccgcagaaaatcatagccaaggctaggcctggagttcttctttcccccagtgacatcccttctcagcttccagcacacaaccctgatggacccgttatgttggaccgcattttgcgaatcttggcttgctaaaaaatcctttcttttttctctccgtactgtccctgatggcaaggttgagagggtctatgggctccacccccgttggtaaagagctggtcaagaccgaaaatggcgtcccgactttgctgctcttacccttctcgaaccacggacaaaggccccagggaagagccggcaccatttgggagacatgcctgccgttggcaagggggcaactccgttctagccatacgggtgagggaagggccccccctttggcattagcagtggaaacggtaccccaaggcctgaaacaagggtctttccatcctagggggagaagggcgtgaacgacctccccgggtccgccgggggagcgaagag

SEQ ID NO: 1434 - DNA, 1683 bp, Glycine max
  misc_feature (179)..(179): n is a, c, g, or t
  misc_feature (288)..(288): n is a, c, g, or t
  misc_feature (324)..(324): n is a, c, g, or t
  misc_feature (340)..(340): n is a, c, g, or t
  misc_feature (410)..(410): n is a, c, g, or t
  misc_feature (671)..(671): n is a, c, g, or t
  misc_feature (1371)..(1371): n is a, c, g, or t
  misc_feature (1406)..(1406): n is a, c, g, or t
  misc_feature (1432)..(1432): n is a, c, g, or t
  misc_feature (1483)..(1483): n is a, c, g, or t
  misc_feature (1565)..(1565): n is a, c, g, or t
  misc_feature (1586)..(1586): n is a, c, g, or t
  misc_feature (1626)..(1626): n is a, c, g, or t
  misc_feature (1628)..(1628): n is a, c, g, or t
  misc_feature (1634)..(1634): n is a, c, g, or t
  misc_feature (1649)..(1650): n is a, c, g, or t
  misc_feature (1652)..(1653): n is a, c, g, or t
  misc_feature (1656)..(1656): n is a, c, g, or t
  misc_feature (1659)..(1659): n is a, c, g, or t
  misc_feature (1661)..(1661): n is a, c, g, or t
  misc_feature (1664)..(1665): n is a, c, g, or t
  misc_feature (1668)..(1668): n is a, c, g, or t
  Peptide Sequence Number=SeqID_7254
  Probeset Number=SeqID_11213
attatatgttgtcaatgatctgagcgtatagagatgtgtatatgttattatatatatagatgattattctcatattcgtattagtagattacatatagtatagatcatcttgctcacatccggcgtgccgcgcgcgcgtcagattagtctatagatattctatcagtagtgtgatcatncatacgcgacacataaggagagtaatgacatatatatatgtatatatactacacataataatataacaataccatagcataacgcacacacatacatacgcagcgtggngagtgagcgacgacgcatgataacaagagagatatntcatatagtcgatgcnagagaagactcaagagacaacatatgtcagcaaagcgagatctatagaataatatcagcacgcgtcgaangcatagcaaagtacagagagtagagtgtagtagtaggcggagcgagtgtgagatggcagtgcagtagcgtgtaggcacggttgcggctgatgtaagaaaagagaagagagatggaagagaatatcagaatgactacgcacgtgacagtagatcaatggcgtcacggcgtagtgtagagatatacgtatatagtaacagtaagatcaatcactatagatgacgtggcgattggtacgatacggtataatgatgagtgatgtngtcaagcgaatataagtcgtatgttattatgcaacgcacgcgtacattagtatgctgcgatagtagtagacatatgctgatgtgagatagtaatgagaaggtacatcctacatcatcatacactcttaaacgcgttacaatacgagtgtatcatgtctagcattacacgaggtggtgtgtggacgatatcactgttgttataatctcaagattatcagtacgacagtccgacgaggcgttgatgtgtggtctatggtttcgctatgacatcgaattatctataatgtacatgatgacaaatagaacgacataacaaacacagagaaattgtgcgcgagagtagtatgctagatagtggtgtatgcgtgtctatgagctttatatagttatatggatgatgcagttgatacgatgcagcgaatgttcatgttatagtgtgttcattgatataagatatctaaattaattatatatattgtatgagactagaatgagagaatcagaataaatgagagatacaactacgcgtacagtctgcgtgacacggacgcttgataggatgttggcgtgcgggtgacagctgcgtcgctctagacacgcatcggaatgcgatgttcaccaggagccaaaagaacaggaacaaacaagacacgacatgagcacggcgcaacagaccacagcctcgcgctctgccgctccncgcagggcaggcggaggaagaagatgagagactantagagcaggtggcatgcgcagagaancgagccgagaagtaggaagagatgagaagaagagagagcacagccgcaacngtgatttactcttatcacgtcgagtggacacctccacgacgtgggtgaggtccgttcgcggctattgctcgccctgactccngccgcgccgcacgtctaccantggttttcagatctgcgtgaagtataaagtaagataagtnanaagaangtcacgcacccgccnncnnccnccncnccnnggncggggcggggccgaa

SEQ ID NO: 1435 - DNA, 1632 bp, Glycine max
  misc_feature (1)..(1): n is a, c, g, or t
  misc_feature (62)..(62): n is a, c, g, or t
  misc_feature (73)..(73): n is a, c, g, or t
  misc_feature (166)..(166): n is a, c, g, or t
  misc_feature (249)..(249): n is a, c, g, or t
  misc_feature (256)..(256): n is a, c, g, or t
  misc_feature (459)..(459): n is a, c, g, or t
  misc_feature (473)..(473): n is a, c, g, or t
  misc_feature (533)..(533): n is a, c, g, or t
  misc_feature (539)..(539): n is a, c, g, or t
  misc_feature (639)..(639): n is a, c, g, or t
  misc_feature (1423)..(1424): n is a, c, g, or t
  misc_feature (1467)..(1467): n is a, c, g, or t
  misc_feature (1474)..(1475): n is a, c, g, or t
  misc_feature (1506)..(1506): n is a, c, g, or t
  misc_feature (1510)..(1510): n is a, c, g, or t
  misc_feature (1512)..(1512): n is a, c, g, or t
  misc_feature (1517)..(1518): n is a, c, g, or t
  Probeset Number=SeqID_11214
ngcttgcgcgctcacgtcacctctgtatgtctgctacatagtcgtgcgctatattgtctgtncgtgtgagcgnttggttaggcacacaatggatgtggttgatcctatcgagtaatgatgtctttgcgtctgccgccgctgctcgctcgtgtgttattagtatatnctagtgcgagggctagacacagtgaagatgtagtatatcgcgcaccagctctgtagtagcaccgcgcgtgtagtcactgcacntgcggtncgtattgcgttacgccagagccgcatagacggaggttgttcacgctcgcaggatgttctgtcgcctcacgactcactccgtgtgtatagcgtctactgcccgtctctccctatccacatatctaaccatattggcggaccctatttggcgactggcgcatagcttatgtcgacgagttgtagcgtggagttagagcgcggtgnaacacatatgcggngcgatctcatctatggatgtgcgtgtattgacgtagatatgtcgcgagagtcctatctantatacnagtctatatcacacagttccaccgttctaatcgagacgagaagtgggggcgtgtcttctataagatatgtcgcctccgacggtcgtttgcatctgtttantgtatagtcactgtggtgccgcgccgttctttgcgggtagcgcctcctcgtggagcgcacctttcggtgagcgccgctgtagacagcgcttgctgacccatatgagtatgcgcaggtgtatcccgttggcgtggcagcaccagagtgcggattctactgcgtcgctgcgcgagtctgaacatgcgtcggatgtggtcggtagtctgttccgcactatagcttgacacatgtgaatctatgtcaatttggcacatatgttgtccgaggccgtcgcggtttacaacggttctgggtagctatcttctgtgtttacaaatcgattaaattacctcactgggcttggtttagcttttcgcaccaactggaatagctgttaggatgttcgttcgttgcgttgggttctccgcgccgatgcgtagatgcggttttcgaggcctgcggccggtaagtgtcgtatttctggctagtatagaacttttcgtctgctgggtgcaaaataatgaaagcgcgctggtgttggctgcgctcattgtaactacctccaccttccatgaaagcaggatgcggtgtgtgtgtctttagtgccgactttctttcctacgtgcaattagtatcgtgtgcgccgcttcatcgaagagacgatggatcatcctgccttcgctggtgtgtggtcacatcgtgtgcgactttatgagatacagcgctgtggggcgcggggtgacagtgggtggatgtgtgtctctttcgcacacgcgctttcttgtgctcgctatgctgtcggcanntccgcgctcctctctgttgtggtgaaaacacttcccctctctntctcccnnccccctccttctttttttttgctaacctccncctntnttggnnggggcgcctccccgtgcactctcatatttcgtcatagagcgcccgcgccgcgagagagcgcgcccccaccttataccgccgactgggtggcacttggctcggcgatgcctcgac

SEQ ID NO: 1436 - DNA, 1469 bp, Glycine max
  misc_feature (7)..(8): n is a, c, g, or t
  misc_feature (12)..(13): n is a, c, g, or t
  misc_feature (16)..(18): n is a, c, g, or t
  misc_feature (22)..(23): n is a, c, g, or t
  misc_feature (26)..(26): n is a, c, g, or t
  misc_feature (28)..(29): n is a, c, g, or t
  misc_feature (34)..(34): n is a, c, g, or t
  misc_feature (69)..(69): n is a, c, g, or t
  misc_feature (71)..(71): n is a, c, g, or t
  misc_feature (73)..(73): n is a, c, g, or t
  misc_feature (75)..(77): n is a, c, g, or t
  misc_feature (85)..(85): n is a, c, g, or t
  misc_feature (87)..(87): n is a, c, g, or t
  misc_feature (90)..(91): n is a, c, g, or t
  misc_feature (93)..(93): n is a, c, g, or t
  misc_feature (101)..(101): n is a, c, g, or t
  misc_feature (112)..(112): n is a, c, g, or t
  misc_feature (149)..(149): n is a, c, g, or t
  misc_feature (166)..(166): n is a, c, g, or t
  misc_feature (168)..(174): n is a, c, g, or t
  misc_feature (180)..(180): n is a, c, g, or t
  misc_feature (182)..(182): n is a, c, g, or t
  misc_feature (191)..(191): n is a, c, g, or t
  misc_feature (193)..(193): n is a, c, g, or t
  misc_feature (204)..(207): n is a, c, g, or t
  misc_feature (233)..(233): n is a, c, g, or t
  misc_feature (248)..(248): n is a, c, g, or t
  misc_feature (250)..(250): n is a, c, g, or t
  misc_feature (253)..(254): n is a, c, g, or t
  misc_feature (256)..(256): n is a, c, g, or t
  misc_feature (259)..(259): n is a, c, g, or t
  misc_feature (261)..(261): n is a, c, g, or t
  misc_feature (354)..(354): n is a, c, g, or t
  misc_feature (413)..(413): n is a, c, g, or t
  misc_feature (415)..(415): n is a, c, g, or t
  misc_feature (469)..(469): n is a, c, g, or t
  misc_feature (482)..(482): n is a, c, g, or t
  misc_feature (567)..(567): n is a, c, g, or t
  misc_feature (738)..(738): n is a, c, g, or t
  misc_feature (1269)..(1269): n is a, c, g, or t
  misc_feature (1277)..(1277): n is a, c, g, or t
  misc_feature (1421)..(1421): n is a, c, g, or t
  misc_feature (1435)..(1435): n is a, c, g, or t
  Peptide Sequence Number=SeqID_7255
  Probeset Number=SeqID_11215
ttggttnnggcnnttnnntccnnccncnncgccncgccccccgggggggcgcggtggcggggcgggggngngngnnntgcgtggngnggnngngttgtgtngtcggcgtggnttctctctctctgcggtctgcgtgcgtgcggtgtgtnggtgtggtcggcggggncnnnnnnncgcggngngcgcggggngngtgggcgtggnnnnggcgcgccgcgcgcgcgcgcggcgancgcggtgggggccgncncgnncnctncnaccgctctcgtgccttcccgcgcatccattcgtcgtcactcgcaccccctacgcgatactatgcccggaccggtagctatccacacagatcgnacctcgcatgacttgtgatgtctgcacacgccaccccgacacgacaccacaatagatcncncaacgcacgcacgcacgtcgcacaggctctccctctctgacgacgtcgtgtggnggatgatggtgtnttgttttttgtgtgtgtgtgtgagagtgctagacaagagggatagatgatgaagtagaggtatgacatgtatataaataataacncaatataagataatcaagacgatagcacaaatacgacaatctctatataagtactaatgtaaatatagagagagttgtggagatgagtcagtgaacgagagatgacagggggaggcatgagaagcgggtgcagaaagcgaaagtaagagaacaagagagatgagagagtanatcaaatacataagacaaaataaaatactatagcagatcactagtgggaggaggatgcggtgaaagattatgatataatatgaccggatgagcgaacacatgtgctgccacacacatcactacccacagctcgtagcggtgttgtgtgcgcggatgacatgcggagccacatttcgtctggcgacgtagagcgtcgggatagcggtgccagcgctagggtgtggcagagagctaggcgtgagatgggttgaggtgtgttgtcggacgcgcactgctcccacccacacggctcgtacacgtgcacgctctctcctcggtcatcatgtcctgctgttgtctgttatcgctatctctccctatgctacgtctcgtgtcgcgatcctacctgccgcagtctcagcgcgatagagtatcaacacccactcgcacccactccacactcactcgctgagcggtgcatgagacatgagtgcgagagtgtgaaatgatatatgagtatatcgcttatcgcgataccccaaacgacgagtngcgagagntaagaacaagaccgtgaatctcgacacagcacggcgccacacgcaccgccacacctcacagctcgccgacatgcgacacgcaacgcacgagaggccgacgtcccgacgactacactactcactgccacttcgcacgcgcatgcngtcttggcgctcantgcgtcttgcgcctatatccccccagtctcgccg

SEQ ID NO: 1437 - DNA, 863 bp, Glycine max
  misc_feature (1)..(53): n is a, c, g, or t
  misc_feature (789)..(789): n is a, c, g, or t
  misc_feature (863)..(863): n is a, c, g, or t
  Probeset Number=SeqID_11216
nnnnnnnnnnnnnnnnnnnnnnnnnnnnnnnnnnnnnnnnnnnnnnnnnnnnncgtatgggtaccgggccccccctcgagtcagctacttaggcccccccccccaatcatttaatcactaacttaacaaattgaaaaattaagaatgtgtctcttaagaccaaatgaacgaaataatagctgtttgcacgaagaatgcaaacaattgagtgctgctaacaagcaaggctgcctattcagccttgcccaagccgtcagatctgatgatctatcatcatcttcaaacattttaagacaacctcaaattccttccagaacattgtcacaagcttcacaattactcaaaaactccatgaaccaaaattccgcaaaccaaccaattgcccaccctgctccagttcatgatgactcagatgatgaggaacagtttgtccttaataaaaagaagattaaattcgaaggaaacaatcatattcgcaatgaaaacaaacaacaatccttcccaaagatccaactccctactcacaacataaataccatccaaactccattatcggaccttgtgtacggaagacaacaaactataagtgcccctagatctcaccatcaggactcaaatggccaaaatcaaatcaatttcccagtctatcaagcccctcaaccaatctatgttccttacatgcaaatccctcaggataacaatcatctcatcaaccaaaatggcctcttcttgacttatcctcaaggcttcaatggtcagaattcaccagttctccaaactacgctctcnacaccaaagctttaatgaagtcccacatcagccactccagtgaaagaacacccaaagaaataatcctggagttn

SEQ ID NO: 1438 - DNA, 827 bp, Glycine max
  Peptide Sequence Number=SeqID_7336
  Probeset Number=SeqID_11217
ccgagagtttgaaagagaagcccttttttttataaagagaagggggggggggatttcccccccctgtttgctaaaaaaaaaaaggtccttaaaatttgaaccaaggacctgggggtcaaggggaaatgcctctgaaaaaaattattgaaaggttttgggagggaaagaagaaaaattttttccaaccccaaaaggtggggggaagggaaaagtttccccccaagtggtttggaggtctttgcaccagctgttttacaaggaagagtcattggtgggggggttttttttccaagtgggggtccgggcaaggccaattgcaaaagaattcttgggaaaaaaaagagaaaggccaaaaagttgttgaccataaatgagtttttgaagcgggttaatggagagccctacaacccaaggggtggatcccctggaagaggaggacgcagtggtggtcttggccagagggatggaaaagtcaacggagggggaaaccaaaggaatgggggggcctttgctccttgtccaggttttggagacagggctcagttcccatcgttgggcaaataaaggcaccctttttgggccttcaagcatatgcctatgtatggcccctttcttttagtttaagtttgttgttttagttgcccaccattttttgttcccctttcactgcaaaacatgtttggtagctggctttttgatggaaaaacaaaattatgatacccttttgtttcaaaattttgttttttttcgagggaagaaaaaaaaaaaaaaaaaaaataggaaaaaaaaagaaaaaaaaaaaaaaaaaaataaaaaaaaaaaaaaaa

SEQ ID NO: 1439 - DNA, 529 bp, Glycine max
  misc_feature (111)..(111): n is a, c, g, or t
  misc_feature (126)..(126): n is a, c, g, or t
  misc_feature (138)..(138): n is a, c, g, or t
  misc_feature (144)..(144): n is a, c, g, or t
  Peptide Sequence Number=SeqID_7337
  Probeset Number=SeqID_11218
ttgagtgcggcggtccaaacactcttctctgcagcttttgcctacaactcccttcaccatggctgaacaaaccaagaaagcttttctgaagcaaccaaaagtgtttctcancacaaagaagactgngaagggaaaaanacctgnaaaaggtgggaaccgcttttgaaagtccattgagcttgaatttaagactcccaaagaagccatcaaaagaacctatattgacaagaagtaccccttcactgacaatgtttccatccataaccatatcttgactaaaacatatcacagtactaagataaacaagactattattattagaaagaattatctccattttatcaaaaagtaccagaaatacgagaagaaacactcaaatattcctactcatatatcacctaccttccatataaaagaaagaaatcacattattattaatcaataccaacctctctctaaaacagtaaaattcaatatcttaaaaataatcccacctacatcttctattaatacaaagaaaacttttact

SEQ ID NO: 1440 - DNA, 655 bp, Glycine max
  misc_feature (604)..(604): n is a, c, g, or t
  misc_feature (655)..(655): n is a, c, g, or t
  Peptide Sequence Number=SeqID_7338
  Probeset Number=SeqID_11219
tcagctacgtaggccccccccccaaaacatagaaaaaaaacaggcgaataaatcatctttacacggcagacatatgatgatgtacgaatctctttccaccccacatgttcttccttcttatgaccaagaaaataccccaccacaagcctgcaatcctgaagatcactccgctcccagagactgccgctccgaatgcagaaacgaaagaaatacttatgtattagccgagcgtcttgctgatactaaccaagaagtccttcaaacttctcaagagcaaggcaagacatcaagccaaaaggtaggcgatgaaaacagccaagctgatgctttgaaaaaagatcaattggctcaacttatgcaaaataaaaaacttcaaaagtatacagttaagcaattgcttcacatttcaaagtcacagattgacttcggcactaccttccctggacaaatccttgatgagtcccttgatatcatcaacaagagtaaccaaaatcttgttgttcaaatctctttggagtgcgagaaccctgattttcaagacactgacgaatatgtgtactcaatccgtagaagccatttatacgagttcaatgataagcactgncttatcatggcaccatattcttcagcttcattcagagtcaccttaaaggcn

SEQ ID NO: 1441 - DNA, 1342 bp, Glycine max
  misc_feature (46)..(46): n is a, c, g, or t
  misc_feature (90)..(90): n is a, c, g, or t
  misc_feature (953)..(953): n is a, c, g, or t
  misc_feature (983)..(983): n is a, c, g, or t
  misc_feature (1084)..(1084): n is a, c, g, or t
  misc_feature (1115)..(1115): n is a, c, g, or t
  misc_feature (1280)..(1280): n is a, c, g, or t
  misc_feature (1319)..(1319): n is a, c, g, or t
  Peptide Sequence Number=SeqID_7339
  Probeset Number=SeqID_11220
ttttttgtttcttttttttgtgttcttcggcagtggtgtttgtttnttatatttgactttttacttctgttttggttccctttgtatttnttgtgggcgcccgacacacatcatatctctcgcggcacacggcggatctcgactcaagtcgctcttcgttcgttgttgctctcgtctccgccacttgcttggataggatatatatgaatatatatctaataaataatattaatagatatacaagtatatatagcatgaaaaagaaagaacgtcgccggggcgctgcccagcgacacgtatactacagacgaaatcttgtagtctgtgtagagagtgtcttgttccctaactcatttttaatttatatagatatactaaataagaatatcaaacatgtgctcgatcatattaataataaaataaaaaatttactatatatcccaccacataccatatcacttgccagatcgtgtcatatatgtaatcatcgagcctaggtggtagaagaggagacctggctgtcgtcggcccgtagttcgttgtctctttactcccccagcattctgatgacgaatatctgcctcgtctcatacatatgaccacctcctcaccacaattagtatagataggtgtgcgtaatctatcgataagagacaagatctattcaactaccgacccgacagtgttatgtttacaaatatgactatcaagtcgtgtgtgtgtgtcgacacaacactacactctctcttatcagatgtagattctatacccacccttctaatatcctatatatacgtacgatcacgactgtcgtctagtgtcatacatctctacgcatcttctttttatgtgtaatactatatatactgggactctatctcattatacacgccactatattcggaatgccagagtcatctgctgtagcgagtaatagagcatagaacccccanccgacactctcagacgccacgtacatgcantctacctctcctctctataagcgccgcacgcgacgacccatacaagagttcaacaatacgtcatactgtcgtctatagcacatgtgaacgtgtgtacgcgngaatggataagttacttccactagagtgttnactccgccactacctcaaccgtcttgataatattatgttatcgcacacgcactcattactctagctgtgatctataaagacgcgcgtagctatacgcgtagatacagttttatgcacaacatttctgtactttatcatacccgtcgcgtcatcgacgactatgcnctaccacatcgctatatatgacagacgatcgaatatacntacagtctatatatcaatatatg

SEQ ID NO: 1442 - DNA, 2395 bp, Glycine max
  misc_feature (1)..(196): n is a, c, g, or t
  misc_feature (2395)..(2395): n is a, c, g, or t
  Probeset Number=SeqID_11221
nnnnnnnnnnnnnnnnnnnnnnnnnnnnnnnnnnnnnnnnnnnnnnnnnnnnnnnnnnnnnnnnnnnnnnnnnnnnnnnnnnnnnnnnnnnnnnnnnnnnnnnnnnnnnnnnnnnnnnnnnnnnnnnnnnnnnnnnnnnnnnnnnnnnnnnnnnnnnnnnnnnnnnnnnnnnnnnnnnnnnnnnnnnnnnnnnnnnaaactcaaaattgaagaatagagaaaaatttatagagagtttcatcgaataacactggatcggaactgagctttcatatataaatatcacggcaatgtcaaattatgatcttcctccaccggctactccttcggaaccaagggtcccccaatggacaccacctttgccaacaacatatcgaccaccaacgtcttatttttcatcaacatttgatgattcatcttcatcttcttccacatccacctttggcatcatcatcggagtcttggttggggtcttttgacttacggacacagaaccgagcttgcagcagcgatttctcatttcatttttcacacttcaacaatggcgaaaaccttcaaatacatcatcctcggtggaggagtttccgctggttatgcggcgagggagtttgccaaacagggcgttaagccaggggagttggctatcatttcgaaagaagcggtagcaccttatgaacgtcctgctctgagcaaggcttacctttttccagagtcccctgctagacttcctgggttccatgtctgtgttggaagtggaggagaaaggttgcttcctgagtggtacacagagaaagggatagagttaattcttagcacagaaatagtaaaggtagaccttgctgcaaaatctctgatcagtgctggaggagaaacattcagttatcagattttgattgttgcaactggctcaacagttataaggctgacagatttcggtgtagaaggagctgatgcgaaaaacatcttttatttgagggaggttgacgatgctgacaaattgtacgcagcaatcaaggcaaagaagaatgggaaagctgtggttgttgggggaggatacattggtctggagcttagtgcagtgttgaaactcaacaatattgatgttaccatggtctacccggagccttggtgtatgccacgactttttacggctggtatagctgaattctatgagggatattacgcaaataagggtgtaaatatcattaaaggaactgttgctgttggattcacttctaattctgatggagaggtaaaagaagtcaaactaaaggatggcagggtcctggaagctgatattgttgttgttggtgttggaggaaggcctcaaacagtcttagtcaaagggcaggttgaagaggagaagggtggaatcaagaccgatgctttcttcaaaactaatctctccgatgtatatgctgttggtgatgttgctactttccctttgaaattatacggtgaattgagaagagttgaacatgttgatcattctcgcaaatcggctgaacaggctgtgaaggccatcaaggcagctgaggaaggaaaaacagttgaggagtatgattaccttccatacttctattcccgttcattcgatctgtcttggcaattctatggcgacaatgtcggcgacacagtgctattcggagacaacaatcctgcgtcttcaaagccaaagtttgggacatactggattaaagacgggaaagttgtcggggtctttctggaaggtggaactcctgaagaaaaccaggctattgctaaagttgctaaggtccagcctccggttgcggatgtaaatcaacttgctaaggaaggcctttcctttgctagtaaaatataatggttttatttgggaaggataaaaatgcttggtggtttgcatagattgtatctgacaggctttattttactctggtttatgcattactgtgttttttcgtttgatgtggttgcaagggatattatataatatatatatatgttttgccgtatctattccatttgtctgtataagtttttggtcactcacagtcgctggtggaactggcttgccttgacgccactcagcagctagcttttgcgtaaggggaccaactgtggttgatgaagattttggactatgtgctttatcagttccatcgcatatgtagaagattgtatctgatctttctctgaatatgcattacattggggtctttggacttattttgttgtcccgcatttggcacaagtatcttaagaagagatgctcaaaggaattaatcatcttctagatatatatgttgagtattaattatttcatttcaacaacataaaagtttcctttctttggctgtgtgtaggcctgaaaattgatgttcacgtcaataatgctcgttcctgttgactcatn

SEQ ID NO: 1443 - DNA, 596 bp, Glycine max
  Peptide Sequence Number=SeqID_7340
  Probeset Number=SeqID_11222
ttttttttttttttttttgcatgtgttgcttccatgggctgcccttaatgtgatggtcattaagaaggacgctgatctcatagttgccggggtctggtaggctgtaagagaccacatatgtgccatcaccgatatccttaatgttaactttcttaacctcttcgtgtgagcctgaatttacaatcttcacgttgaagctttcacctccctccttcttgtcctcattggcttgtgtctttgtcctgatcacaaacgagaagctgtcgatgtgtgtgttgtcatatgatgcaccctctttcacattaacagtcacaggggtgttgcccacaggcttgtccttcaaccttacatcaaccttgtgctttcctgttccctttggtttgtactccacagagtaggtgccatctccgttgtcaaccaattggtgcatcaagctgctggccattggcgtctgtgactttgacatcgaagtcatctcctcccttggtcatcttctttccatccttgtcgcgagcctcaattgtgaacttgccaggctttgtgttaagtaatgtgttctccacaccaggtccataaacaagcgatttgcttgcatc

SEQ ID NO: 1444 - DNA, 306 bp, Glycine max
  Peptide Sequence Number=SeqID_7341
  Probeset Number=SeqID_11223
aactttggctgcgtttcaagcagcctacttcaaactctatttatgatatcaaaaggttcatttagttcttgaagacaaacatcaagcttgttcctttcttgttctttacttttcaataaagctcctttgagctaatcctagtttatgtttcaataaagtctttcagacacaaatctatcttgttctacaaatctcttcatggtatcagagctgcagtcgattcatgggtttatctcttgattcttctccagcttcagctcaagcttgtaaagctccaaactttaaaaaaaaaaaaaaaaaaaaaaa

SEQ ID NO: 1445 - DNA, 1354 bp, Glycine max
  misc_feature (1)..(1): n is a, c, g, or t
  misc_feature (6)..(7): n is a, c, g, or t
  misc_feature (22)..(26): n is a, c, g, or t
  misc_feature (38)..(38): n is a, c, g, or t
  misc_feature (50)..(51): n is a, c, g, or t
  misc_feature (55)..(55): n is a, c, g, or t
  misc_feature (57)..(57): n is a, c, g, or t
  misc_feature (65)..(65): n is a, c, g, or t
  misc_feature (1005)..(1005): n is a, c, g, or t
  misc_feature (1086)..(1086): n is a, c, g, or t
  misc_feature (1193)..(1193): n is a, c, g, or t
  misc_feature (1291)..(1291): n is a, c, g, or t
  misc_feature (1313)..(1313): n is a, c, g, or t
  misc_feature (1320)..(1320): n is a, c, g, or t
  misc_feature (1330)..(1330): n is a, c, g, or t
  misc_feature (1332)..(1332): n is a, c, g, or t
  Probeset Number=SeqID_11224
nttttnnttttttttttttttnnnnnttatttttattngttatttcctcnntccntncatcaccncccccgggaaggcacctgagtcttgctttttaacaagatagtttcttttctatagtgctatagtgtaataaattcactgagaagtacagtacactcgaatagatatcttaatcgacacgagaatgcaatcttatacagatcgaagccatgaatataagactctcataaacattcaaccacagctgggccctgcgtgaactagtcaacccccggccctgccccccgctgtagaaagcttattgaaatgaaaccgataactaaaccagcatatgaccttatgcaaagtctccacccagcgctttctaattcttactccagcctaccctggcgacacgagaagacgacattctgtccacaccaaccatacacaactcatcacctcccgccacgtttatctcagacaacatatttctctcccgagtcccacccctgaaataagacattacgacaacgccatgaactctctcccctaatctagtatcaaagtactgagtcgcgataacacacaaccctgtccatattctgtagcctctagctacctaaagcacaacctacactaacatccgagatcgcccactgccccaatgtcaacagtaaaatccaccaaaccacctctcacgtatgctctatctccctcaccaacgcaccccaccacgccaccctcgccaccttcattgctgcggcagacgcccatagcactcccgccctcaccgcccccccacgccatcgcccagcccgctccgcgccggcggtcgtacgatgggtcgcaccctacaactaaccgcccgaaatgccgcctcacaccctcaccgtctgtgcgacgctcacacgcgccacacgtcaccatccgtctcactatcgccgccactatcatatgcagacacccctctcacctctccactcgccgaccgacgcgtccatctcctggtatgcgcagtanctctccagccacatacgaaatgacgatcttgcaacagcatgaggcacacacacaccatctcacccgccgctcacctcctgncgaccctctctgtgtacgtacacatctccatgaacatccaccattatcatcatcccacaatccgcgcctacaacactacaccacctctctcacaagttaaacacgtntaacaataagcgtcgtctcatcgtagtcgtgacccagatcaacagatccacactcgactcactcacttctcacaccgcaccacctccactagcgcagnccactctaccaagcaatgatgntactagngaggtgaaancngcagcacgcaagagtccaccgc

SEQ ID NO: 1446 - DNA, 726 bp, Glycine max
  misc_feature (726)..(726): n is a, c, g, or t
  Peptide Sequence Number=SeqID_7342
  Probeset Number=SeqID_11225
tcgagtcagctacgtaggccccccccccaaatagcaagaatttcagaaatattttacatcatcacataaatggacgccggattcaagaccaccgaagaatgtattcaagctttcgacaagctcaagatgcataagaacgttagataccttgttttcaaagttgtcggcagtgaagtcgttttggaatcccaaggtgaaagaaacactgattgggaagaattcgttaaagccttacccagagaacaatccagatacgttgtctatgacttcagctacaagaccgaagacaagccccctagagacgtcagcaagttgatcttcatctactggtctcccgatgaggcacccgcaaaggataagatgctctccgccactgctaagggagctttcagaaaggctcttatgggagttgctagagatttccaagcaaaagatattagcgatctcgaatacaaggaagtcagagaaaagttgtaagtgtgaatatgggaatatttcacataaatatcctatgagatgaatcttggaggatttatttgtcttcttacggaagagtaatataaaaaccatttatttgaaactttgagatatatatgctataatcttatatgatacagtcttgcatacagtaaattttttgcaaggctcttatataagtatcctctctccctaaatctctcatgttaaaaaaagataaccctctaatacaaaaaaaaaaaaaaaaan

SEQ ID NO: 1447 - DNA, 469 bp, Glycine max
  Peptide Sequence Number=SeqID_7343
  Probeset Number=SeqID_11226
ctgcagaaagagtacttcaagtgtgcacatgactgcttcgataggcgacggactcaagaggggatcaccagctgtgtagagaactgtggtgtgcccgctctttctgccaacaatgttgttgagaccgagatggccaagttccaggaaaggttgaatcgctcgttgatggtctgccaagacaagtttgaagcagcaaagctccagaagatgaagacagacgcaaccaatgagctggagtcgtgcgtgaacagatccatcgacgacagcatcagggtcctgccccatctggttgagcagatcaagtccaccattaatatgaagtagaggaatcggaaactttccccggctcgtttttgctatcgttagctgaatctatccagagtctctagcaacactagtgtaacatgagcatttacttccatgagaagtccagagaagggttttttgctgagagatactagactcaatg

SEQ ID NO: 1448 - DNA, 1421 bp, Glycine max
  misc_feature (92)..(92): n is a, c, g, or t
  misc_feature (200)..(200): n is a, c, g, or t
  misc_feature (203)..(203): n is a, c, g, or t
  misc_feature (213)..(213): n is a, c, g, or t
  misc_feature (228)..(228): n is a, c, g, or t
  misc_feature (268)..(268): n is a, c, g, or t
  misc_feature (273)..(273): n is a, c, g, or t
  misc_feature (291)..(291): n is a, c, g, or t
  misc_feature (412)..(412): n is a, c, g, or t
  misc_feature (502)..(502): n is a, c, g, or t
  misc_feature (507)..(507): n is a, c, g, or t
  misc_feature (663)..(663): n is a, c, g, or t
  misc_feature (1172)..(1172): n is a, c, g, or t
  misc_feature (1421)..(1421): n is a, c, g, or t
  Peptide Sequence Number=SeqID_7424
  Probeset Number=SeqID_11227
tgagagagacaagaagaaggacaaacaaggagggtgggtagagtatatgatactatacaatgcgagtatacacatataaacatacatactcnaatccctacaacaatttagaattatggaggataataaaagagatattaaaaatgaatcctgttgttggtagcgggacatcctaccgggtcacccacctcacctccccnaanaatgcacacncgcgaccaacaaaancatatagcgtcgaccccgcgccggcgcggatccacctccnacaanaaacaaaaggcggaggantattcatcgtatatataaactatgcgcatactacgccgtcgcgttattcctcacctaacctcgtagacttattatttcttagaggtgtgtatagatagacccttacactaacagttataancaaaatgtggctcagaccactaccactacacccttaacatccaaatgtcaatactacaccatgagaccatactgctctcgcatcctcacncaccnccaataacttttgttgtcacaaacgtatgtttactcgggcgccattctaatcgagacctcaccatccgtcgtgagtattaacccggagttggtttaataattaatatgtgttttttgattatatttgtgttatattaatattattattaaaatatnatattatatgtgtgtggtggctgcaacatatattgtgtgggtgtttggataatatattaatctgtgcgtgtgtataatattctgctcttgttctatctatatgcggttatatatatcacattactacacttcgctggctactttgtgcgaacatactatctaccgcgcggttccattctaattatattttcgtctgtgctcctatattgttacttctcccgctgaaactctctcctcctcctacttttttctttgtcatcactctatcttctttatatccgctcttacatatcactgtggtgttttaacacagcatacatagttgtgttgttgtttgtcacacaatatgtgtgcgcgtgtggcgcatataaaatatgtgtgttgtggtgtaaattcatgctgcgattgtcatcacttcgctctataataactatttgtctcttataattcgttggttcttatacataatgtgtgttatacatgtatactgtggggtgggtgacatgttnatattactaatacattgcaacacacatctgtgatgtggctatatttcggggggtggatatatatacaatattggtggccgtcagaagatatattaataatagagaaataatagtgtgaggatgagtcgttgtatataatactatggtaaatataataagtgcggtgtcgctctgtgggtcggcgtttatattttaatctcgtgcatataatctcctcgtgtgaactctcctcgagtgcctggataatan

SEQ ID NO: 1449 - DNA, 978 bp, Glycine max
  misc_feature (896)..(978): n is a, c, g, or t
  Probeset Number=SeqID_11228
ggcgaatatatttgacacattcgaattatggaaagctgattaataatactaatggtggaacagggaaaaagtttgttttctatcctagttttctcagataattaaaaaataaacaactatttttacatttggagttaggagttttccccacacttgaaacctgatcttttggacatcatttctttttcatgccttatgtgaatcttctctgtacataactgacaaatttatcattgctccatttcaatttctcaattgaggtacttaatcagcttggttaattgtcaaccatgcctaaatgctagttgattttggtgatttaactaaaagaaagtaagtctaaatagcaggacttgaagagcagtatccattgtgataacttgtgcctaatatttgtgctttgtagtaattggttattcacgtgctaagtgttgcttgttaggttgggaatatgcctttagggcctgaatttggcaatcaagctggaaatgctacacaagtagacagagggtcttctttgatgcccagtccctcagataacctagctcatctttctggtcctcctggatacgtagtttctgctcagatgggtgctgctaatcagcctcttcggcctcctgtgttgacaccagatttggagaaggcactgcttcaacaggtcacgagcctcaccctggggcagataaatctcctatcaccagaacaaagaaatcaagtgctgcagctacaacaaatgttgcatcaatgatgcaatacacacacaccataaagttaggcaatctttaatccttccagtttggcagagattgttgtgtcatatatatatatatatatatatatatatatatatatattatgtccaaactattggctgccaagttttgtagaattaattnnnnnnnnnnnnnnnnnnnnnnnnnnnnnnnnnnnnnnnnnnnnnnnnnnnnnnnnnnnnnnnnnnnnnnnnnnnnnnnnnnn

SEQ ID NO: 1450 - DNA, 814 bp, Glycine max
  misc_feature (1)..(213): n is a, c, g, or t
  misc_feature (814)..(814): n is a, c, g, or t
  Peptide Sequence Number=SeqID_7425
  Probeset Number=SeqID_11229
nnnnnnnnnnnnnnnnnnnnnnnnnnnnnnnnnnnnnnnnnnnnnnnnnnnnnnnnnnnnnnnnnnnnnnnnnnnnnnnnnnnnnnnnnnnnnnnnnnnnnnnnnnnnnnnnnnnnnnnnnnnnnnnnnnnnnnnnnnnnnnnnnnnnnnnnnnnnnnnnnnnnnnnnnnnnnnnnnnnnnnnnnnnnnnnnnnnnnnnnnnnnnnnnnnnnnaaatggtgatgtggtgtgggacatggaaggaaaaccctcataaattttaagcattggataatcaaaactggttagtggttagggttagacacttagtttaatcaactaccttaattaactaattactgggtttggcctctcttgcaatggagttatcaaaatgatttaagtcttcattatcaaaggaccaatcaacttgagttatcacgtatcacttatcaacctaataagcttatgctgaagtcatgttgatagctagatgaggcgataaagaaacaatagtcgtagtaatttaattcataaggtcactttccttgtaataaaaataaagttactttagtgagtacctgactaaaaaaattatgctactttcttctttaataaaacatttgttagaatgtgatgattttgattttgattttgatttcgcgggtcaattgttactctttagatggataaagccactttactggctgaagtgattagccaagtgaaggagttgaagaaaaatgcagcggaagtaagcaagggttttctgattccaaaggatgctgatgaagtgaaagttgaaccatataatgatcatgaaggaggagaaggn

SEQ ID NO: 1451 - DNA, 846 bp, Glycine max
  misc_feature (577)..(577): n is a, c, g, or t
  misc_feature (589)..(589): n is a, c, g, or t
  misc_feature (600)..(600): n is a, c, g, or t
  misc_feature (609)..(609): n is a, c, g, or t
  misc_feature (624)..(624): n is a, c, g, or t
  misc_feature (638)..(638): n is a, c, g, or t
  misc_feature (653)..(653): n is a, c, g, or t
  misc_feature (679)..(680): n is a, c, g, or t
  misc_feature (723)..(724): n is a, c, g, or t
  misc_feature (732)..(732): n is a, c, g, or t
  misc_feature (846)..(846): n is a, c, g, or t
cagagaagagagccgaagtggccgaagtggcggacctgggacccgcatgggtgagaatgaccccaccctatgggtatctccgctttcactgcctccttcttcttcacttcgtcactccaccttttcttttttcatttctcgctttatccttaggtttttttcttcaacggatgaaggaatcatcttgatcgtacgggacttgttctatctttccgtaatcgaacttggtggccactgtatataaataagttgtttattttattcggtcatgcagttcagttcaacaacacaatcattttttatatgatcaaattaagtgatggggggaagtttcccagtcatgtgcaaggaatgtgtgcgcggacagtcagatgaatagaaagcttgggataaaaccagtataatgtttttgatgggaagcccaccagattttgaagaaaccaaagagcctggcccaaacgttactcccaagaagagcttgagggctactgaaagattttgtcagaaaagcccttagagactgcccaataaaggaagacccattgaaaaattccaggtaaacggtacaagtgaaggntgacaaaacagncataatgacgnactgcaaanagacttttaaggctncatgggaagtgccntgttgttgaggcacnccctcagaaagcagaggctcagtgtnngctgcccctttgcaaagctggaaagggtttaatgctgtggctnntctgaagnacatggattccttaacatttggatctcctaaatttcttcgccacctaatggatccaagctcaaaaaaaaaaaaaaaaaattccttcggccgcgaattcttcctggtgccgaatn

SEQ ID NO: 1452 - DNA, 440 bp, Glycine max
  Peptide Sequence Number=SeqID_7427
  Probeset Number=SeqID_11231
ctctctctctttctccgccgacgacagcaacaatgggtgccaaggcgaagaaagctctgaagaagaacatgaagaagattaccgcttccgctgctgcttcttcctcttctcagctagctgctcccaagaaccccaaaccatcagctgattttctgcctctagaaggcggtccagctcgaaaagctccagcgaccaaacctatcgagaacaaagccacggtgctatacatcggtcgtctccctcacggcttctacgagactgagattgaagctttcttcacgcagtttggaacagtcaaaagagttagagtcgcccgtaacaaaaagactgggaaatcaaaacattttggattcatacagtttgaggaccctgaggtggctgaaattgcagcgggtgcgatgaatgactatctgctgctcgagcacatgcttcaagtccgt

SEQ ID NO: 1453 - DNA, 1479 bp, Glycine max
  misc_feature (1)..(1): n is a, c, g, or t
  misc_feature (68)..(68): n is a, c, g, or t
  misc_feature (76)..(76): n is a, c, g, or t
  misc_feature (194)..(194): n is a, c, g, or t
  misc_feature (204)..(204): n is a, c, g, or t
  misc_feature (389)..(389): n is a, c, g, or t
  misc_feature (440)..(440): n is a, c, g, or t
  misc_feature (518)..(518): n is a, c, g, or t
  misc_feature (852)..(852): n is a, c, g, or t
  misc_feature (1043)..(1043): n is a, c, g, or t
  misc_feature (1091)..(1091): n is a, c, g, or t
  misc_feature (1133)..(1133): n is a, c, g, or t
  misc_feature (1141)..(1141): n is a, c, g, or t
  misc_feature (1213)..(1213): n is a, c, g, or t
  misc_feature (1240)..(1240): n is a, c, g, or t
  misc_feature (1264)..(1264): n is a, c, g, or t
  misc_feature (1369)..(1369): n is a, c, g, or t
  misc_feature (1371)..(1372): n is a, c, g, or t
  misc_feature (1374)..(1374): n is a, c, g, or t
  misc_feature (1411)..(1411): n is a, c, g, or t
  misc_feature (1415)..(1415): n is a, c, g, or t
  misc_feature (1417)..(1417): n is a, c, g, or t
  misc_feature (1419)..(1419): n is a, c, g, or t
  misc_feature (1433)..(1433): n is a, c, g, or t
  misc_feature (1458)..(1458): n is a, c, g, or t
  misc_feature (1479)..(1479): n is a, c, g, or t
  Peptide Sequence Number=SeqID_7428
  Probeset Number=SeqID_11232
ncgctatacgaataagtgtgagcagagtggcgtggtgatatgaagagacatgcgtgactgcgcgatgngcgagtgnttatgcaggtgcgagtcaatcatacacacgtcacttagacgtagagagactacatatcagagtctgagatcagataggatcctatcgcagagtacgcagatcgtgtgaagacgatcantgtatcgagnactgttgtatctatcgtagatatgccgcacgtgtgcgactctgtgagaggcatgcgacacgtgatgtccgtttgtcgctcgttctagctcgtgtgtctatacgagagttggaatatggatcgcttcctcatctcgctgtacgtcgcgtgcgtcggcacgtgcagtatacgactgtgacataattncacatagatgagtggtagaagtcgtcacgactgagcagtatcgccgtgcgncggaggtatggatacgcatcgacatctggataccgcgtgagcgcgagtagtgtatgtctcatgtgtgttaagtcgagngtgcggctgatgacagtgacaacatcactagtaacacatggctagatcgcacagatatggctcgattcatctcatacttctctactatctatccgtcgccatctcacacacgctgtatattgatattgagctgatcgtgatagtcgttcctacatatccatacattccacatgagagctggtagtctgacttcgctccggtgtctgtgctctgacctattgttgttatctgtactcttagtacttctcaatcttatatagtcataggctgcggcgcgctcacggctattgtacggtggagagattgtcgctaggatgtaagttgacgtgatganaggttaggatgcgaacggatcagtaatcagatgtgtgtggctgggcgcacgacacattccgtgctaatcaatatttcagtcactgttgctctataagcatctgtatcacatgcctatcgcagagcaagcgcagcgggtcgtgtcaggatgagagaggtctgtgagatgatcgatagtgtggagagagtagngcgagtatgtaatgagatcgaacagagaagcagcgacagtagtagaancatcacagcccagagccttatgcagcacaccagatccgccancttcgagncagtcatgtatcacttcgcgctcgattgcgatgactccaacagtacacacacaagatgatgcacaaagtacnaacctcttctcccgggctatatgatgncgtgcgctccaccccacacacacnacacccacgacggagcacctattaactactagttatatatgtgagtgtgagtccacagacacgtgcgcactcaggtgagtgagattgatgcgcacacctgaatantnnanaatatttgggtatattctctatgtattcgtctctctntgtncntnatttgtgtgtgtangtgttgagcgccccccccgcactanacacaaagccacccccacccn

SEQ ID NO: 1454 - DNA, 763 bp, Glycine max
  misc_feature (90)..(90): n is a, c, g, or t
  misc_feature (97)..(97): n is a, c, g, or t
  misc_feature (148)..(148): n is a, c, g, or t
  misc_feature (161)..(161): n is a, c, g, or t
  misc_feature (198)..(198): n is a, c, g, or t
  misc_feature (200)..(200): n is a, c, g, or t
  misc_feature (212)..(212): n is a, c, g, or t
  misc_feature (217)..(217): n is a, c, g, or t
  misc_feature (220)..(220): n is a, c, g, or t
  misc_feature (222)..(222): n is a, c, g, or t
  misc_feature (226)..(226): n is a, c, g, or t
  misc_feature (230)..(230): n is a, c, g, or t
  misc_feature (233)..(233): n is a, c, g, or t
  misc_feature (237)..(237): n is a, c, g, or t
  misc_feature (242)..(242): n is a, c, g, or t
  misc_feature (244)..(244): n is a, c, g, or t
  misc_feature (247)..(247): n is a, c, g, or t
  misc_feature (249)..(249): n is a, c, g, or t
  misc_feature (255)..(255): n is a, c, g, or t
  misc_feature (272)..(272): n is a, c, g, or t
  misc_feature (274)..(274): n is a, c, g, or t
  misc_feature (277)..(277): n is a, c, g, or t
  misc_feature (286)..(286): n is a, c, g, or t
  misc_feature (289)..(289): n is a, c, g, or t
  misc_feature (303)..(303): n is a, c, g, or t
  misc_feature (308)..(308): n is a, c, g, or t
  misc_feature (312)..(312): n is a, c, g, or t
  misc_feature (314)..(314): n is a, c, g, or t
  misc_feature (319)..(319): n is a, c, g, or t
  misc_feature (325)..(325): n is a, c, g, or t
  misc_feature (331)..(331): n is a, c, g, or t
  misc_feature (335)..(335): n is a, c, g, or t
  misc_feature (343)..(343): n is a, c, g, or t
  misc_feature (357)..(357): n is a, c, g, or t
  misc_feature (363)..(365): n is a, c, g, or t
  misc_feature (370)..(370): n is a, c, g, or t
  misc_feature (372)..(372): n is a, c, g, or t
  misc_feature (374)..(374): n is a, c, g, or t
  misc_feature (376)..(376): n is a, c, g, or t
  misc_feature (379)..(379): n is a, c, g, or t
  misc_feature (383)..(384): n is a, c, g, or t
  misc_feature (389)..(389): n is a, c, g, or t
  misc_feature (401)..(401): n is a, c, g, or t
  misc_feature (404)..(404): n is a, c, g, or t
  misc_feature (406)..(407): n is a, c, g, or t
  misc_feature (409)..(410): n is a, c, g, or t
  misc_feature (414)..(414): n is a, c, g, or t
  misc_feature (420)..(420): n is a, c, g, or t
  misc_feature (422)..(422): n is a, c, g, or t
  misc_feature (424)..(424): n is a, c, g, or t
  misc_feature (426)..(426): n is a, c, g, or t
  misc_feature (431)..(431): n is a, c, g, or t
  misc_feature (435)..(435): n is a, c, g, or t
  misc_feature (440)..(441): n is a, c, g, or t
  misc_feature (445)..(445): n is a, c, g, or t
  misc_feature (450)..(450): n is a, c, g, or t
  misc_feature (453)..(453): n is a, c, g, or t
  misc_feature (455)..(455): n is a, c, g, or t
  misc_feature (457)..(457): n is a, c, g, or t
  misc_feature (459)..(459): n is a, c, g, or t
  misc_feature (463)..(463): n is a, c, g, or t
  misc_feature (466)..(467): n is a, c, g, or t
  misc_feature (470)..(471): n is a, c, g, or t
  misc_feature (474)..(474): n is a, c, g, or t
  misc_feature (477)..(477): n is a, c, g, or t
  misc_feature (479)..(481): n is a, c, g, or t
  misc_feature (484)..(485): n is a, c, g, or t
  misc_feature (489)..(490): n is a, c, g, or t
  misc_feature (494)..(494): n is a, c, g, or t
  misc_feature (496)..(496): n is a, c, g, or t
  misc_feature (503)..(503): n is a, c, g, or t
  misc_feature (505)..(505): n is a, c, g, or t
  misc_feature (508)..(508): n is a, c, g, or t
  misc_feature (513)..(513): n is a, c, g, or t
  misc_feature (530)..(532): n is a, c, g, or t
  misc_feature (534)..(534): n is a, c, g, or t
  misc_feature (538)..(538): n is a, c, g, or t
  misc_feature (542)..(542): n is a, c, g, or t
  misc_feature (544)..(546): n is a, c, g, or t
  misc_feature (550)..(553): n is a, c, g, or t
  misc_feature (555)..(555): n is a, c, g, or t
  misc_feature (557)..(558): n is a, c, g, or t
  misc_feature (561)..(561): n is a, c, g, or t
  misc_feature (564)..(564): n is a, c, g, or t
  misc_feature (566)..(566): n is a, c, g, or t
  misc_feature (571)..(571): n is a, c, g, or t
  misc_feature (574)..(574): n is a, c, g, or t
  misc_feature (577)..(577): n is a, c, g, or t
  misc_feature (579)..(579): n is a, c, g, or t
  misc_feature (587)..(587): n is a, c, g, or t
  misc_feature (590)..(590): n is a, c, g, or t
  misc_feature (597)..(598): n is a, c, g, or t
  misc_feature (604)..(604): n is a, c, g, or t
  misc_feature (609)..(609): n is a, c, g, or t
  misc_feature (612)..(612): n is a, c, g, or t
  misc_feature (622)..(622): n is a, c, g, or t
  misc_feature (625)..(625): n is a, c, g, or t
  misc_feature (631)..(631): n is a, c, g, or t
  misc_feature (644)..(646): n is a, c, g, or t
  misc_feature (648)..(649): n is a, c, g, or t
  misc_feature (653)..(653): n is a, c, g, or t
  misc_feature (655)..(657): n is a, c, g, or t
  misc_feature (668)..(668): n is a, c, g, or t
  misc_feature (670)..(670): n is a, c, g, or t
  misc_feature (672)..(672): n is a, c, g, or t
  misc_feature (676)..(679): n is a, c, g, or t
  misc_feature (682)..(682): n is a, c, g, or t
  misc_feature (685)..(685): n is a, c, g, or t
  misc_feature (689)..(689): n is a, c, g, or t
  misc_feature (697)..(697): n is a, c, g, or t
  misc_feature (699)..(699): n is a, c, g, or t
  misc_feature (701)..(701): n is a, c, g, or t
  misc_feature (704)..(704): n is a, c, g, or t
  misc_feature (708)..(708): n is a, c, g, or t
  misc_feature (710)..(710): n is a, c, g, or t
  misc_feature (718)..(719): n is a, c, g, or t
  misc_feature (721)..(721): n is a, c, g, or t
  misc_feature (739)..(740): n is a, c, g, or t
  misc_feature (743)..(743): n is a, c, g, or t
  misc_feature (747)..(747): n is a, c, g, or t
  misc_feature (754)..(754): n is a, c, g, or t
  misc_feature (763)..(763): n is a, c, g, or t
  Probeset Number=SeqID_11233
ggaagaatatcatcaccatcatagtatttccttacaatgggaatttggcagattcattagaagaagatggggggtggtggaaaggtttcnctcaaanccacactcacctccgatccaaagttacccttccaagtgtttaccgttccanaggcggcaccttntacatgccgctcttaaattcgcccgccgaataattcnangtccctgccccngaccncgngntatnatcnccntccnatggngntgncntaaatncccatcagagcgcatgnantgncttgcttangcnttggttcacactgntcctnactncngtttncaccgnccctgncccncctcttangatgcggtttctcncctctnnnttttncncntntcncggnngacangttaactcgttntancnntnntttnttcctntntntnctctncttngtccnncccngcggntgntnancnctgntgnntanntcnacntnnntannttcnngtcncngttttcncntancccgnttttcccttttttccgnnngntctnggcntnnncgtnnnntntnnccnatngngttcnccnttntncccctttnctntgggctnnatgacnggctntcnctcttcctcngtngctccnccgctccctttannncnncgcnannntcatcacgcgntntnttcnnnnggnagncgtnatcgcctngnanctnttcngntattctanncngtcctttctaatgggtcnnccntatngttcgcnccgtcaccn

SEQ ID NO: 1455 - DNA, 3127 bp, Glycine max
  Peptide Sequence Number=SeqID_7429
  Probeset Number=SeqID_11234
ggctcgagctctctctctctcttgctgtctgtctgatctatctctcttcttcccttctttgacccaccctcctccttctccttcaatgtcttttgcactcctcaatccattcccacactctttcccctgagattctcccccaattcccaccactccaaacaaaccctctccctctttttcccttcctagggtgcagaaaagatgaagtcctcgctcagcaagttgaagaaaattgcacttcacaagaccgtctccaaggacaaaaaggactttccccccaccgttaaattcgacgaactcgccctcgctgccaaggacatgcaagacatgagagattgctacgatagcctgcttgctgcagcggctgctacgcaaaacagtgctcacgaatttgctgagtcactgcaggacatgggtacttgcctactggagaaaactgccttaaatgatgatgaagaaagtcagctacgtaggccccccccccaagttacttagcctctttgctagttgatttaaattatgcatactatatagtcttgttgctacagttgttgtggttatgaactgtatgcaggtaaagttttggggatgcttggaagtgtgcagcttgaacttcagaagcttgttgatagctatcgttctcacatagtactgacaataaccaatccatcagagtctcttcttaatgagctaagaactgttgaggacatgaagaggcaatgtgatgaaaaaagaaagagaaaggaaagtcaaaaagtggtaaaggtgaaagtttcaccctacagcagttgcaagcagctcatgctgaatatgaagaggaagcaacactctgtgcctttcggttgaaatcgctgaagcaaggccagtctcgcagtctcctaacacaagcagcacgccaccatgctgcccagttgaatttcttccggaaaggacttaaatcactagaggctgttgagccacatgttaggatgattgctgtgcgacaacatattgattaccaattcagcggcctagaggatgatggtggtgaaagtgataataatgatgatggaaatgattttgacatcattgaaggtggtgagttgagttttgactacagagcaaataagcaagggccatatattgtttccacatcaccgaacacagcagaggtggaagaatcaggctgttcatatgttcgagcttcaaccccagaaactgcagagacaagtttagacaagaaccaaggagattttaaagtttcaaatagagtcagcagttattcagctccaatacttgcagaaaagaaatttgacccagctgaaaaagtaagacaacttttagcatcatctgcagcaaagtctaatgcatatgttctccctacaccagtcaacatcaaagaaaccaaaactagctcagccccccacattagtgcaagtggatctttgcataatttgtggcattcttcccctttggatgaaaaaaagaatgagaaagatgttgatagtaaattgtcagagccgactatccctagagctcactctgttctcaaagaaagtaacagtgatactacatacacccagttaccacgcccttcagctgatggactctcacctccacaagttgatcttttcagtgctactgatactaagaaaataaaaagacaagctttttcaggtccattgactaataaaccattatcagtaaaacctgtttctgggggttttccacgtttaccagtgccccagccttcatctccaaaagcatctcctaatgcttcacctcccctggtttcttcacccaggataagtgagcttcatgaacttcctagacctcctggtaatcaatctagcaagccacgagtgggtcactctgctccattagtattaaaaaatccagaggctgccatgactaataaatttccttcagttgtatttagtgcagcatctccacttccaactccacctgtctctcggagtttctctataccttctagtggtcagagagttgtggcattaaatgtctctaatactaagtatttggatactccccaagtttcaaaggttgataaagccgtgtcacctccactaacacccatgtcccagagagcatctaatatatctgacctggcttctcactctagcgaaatccaagtggatgcaggtgggagctaaatctcttgcgcacatactgaggttgagttctgctgaatcttagtttaagtgtctttattctatgtgggagctaaatcacttgcattgtggagttatagggttttcccaacaaaaaggttcaggctaatatatgtaaatatgctgtttatgtattgtttagcttctcatctcaatttgtatctattatttttactttaactagtgatgatgggaactaaactctacatgattgtcattataatgtgttgtgtacatattcggatgaaaaattttgttcacttcccaagtccaacatgacgacaatgaaagaactttagcaacggaaaaagcaatttatcaaattaatttaatttctcgcaattactattgtattaatttattgtgaatttctgatggctttgaaattacaattcaatattctgccatgagcatttactatccttaatttgggttttgggctgagtatcttgattcaagctaatcggcagcgcgtagtttctctaaacgtttcaatggtcaaagagttgtggcctcccctggttccaatgctcggtattgcggtgtcccccgcatttccaccctcgatcaagaggtctcctcttatctatcacctggcttcccgagagagtctaatctatctgaccatgctatttgctctagtgaaatccaagtgaatgcaggtgggagctaaatctcttgcgcacatactgaggttgagttctgctgaatgattcttagtttaagtgtctttattctatgtcggagctaaatcacttgcattgtggagttatagggttttcccaacaaaaaggttcaggcaaatatatgtaaatatgctgtttatgtattgtttagcttctcatctcaatttgtatctattatttttactttaactagtgatgatgggaactaaactctacatgattgtgtcattataatgtgttctgtatatattcggatgaaaaattttgttc

SEQ ID NO: 1456 - DNA, 1498 bp, Glycine max
  misc_feature (3)..(3): n is a, c, g, or t
  misc_feature (63)..(63): n is a, c, g, or t
  misc_feature (189)..(189): n is a, c, g, or t
  misc_feature (199)..(199): n is a, c, g, or t
  misc_feature (307)..(307): n is a, c, g, or t
  misc_feature (314)..(314): n is a, c, g, or t
  misc_feature (376)..(376): n is a, c, g, or t
  misc_feature (442)..(442): n is a, c, g, or t
  misc_feature (547)..(547): n is a, c, g, or t
  misc_feature (601)..(601): n is a, c, g, or t
  misc_feature (626)..(626): n is a, c, g, or t
  misc_feature (788)..(788): n is a, c, g, or t
  misc_feature (1288)..(1288): n is a, c, g, or t
  Peptide Sequence Number=SeqID_7430
  Probeset Number=SeqID_11235
ctngtgagagacatgtgtgtgcatgcgtaggacagcataacgtgtatactacggtgtgtgagngtgtctgtgacgacgtcgtatgtatcgagtatagtatctagccactgctcatctataagtgttgttcgtatctgtctagtaggtatctattaataggacatagcgatagtgcagagagttgagcgntgttgagagnagtcgatgatctccatccgtgatgtgcagtcgtatgatgatgaaatagagcatatcgattatcacttcgatgcgtacatgatgatacatatatatataaacggtatgncgtgatnctcctgtcgcgcagagattcgagatagggtacagagcgatatgaagagtgagtagagggcgnatgcgatgatgtacgtcaagataatgagatgtgcggaggagatgaagcgtgtatgatatgagtagnatctagtgcggctgtgcgcgtgagcgggtgtgtgcatacgaggcgacgtagttagtgtgtgtcggttgagagcgcagagctgacacatagtgcgcgacgtagcanatgcgtaggacacatacgagcacaggagtagatatatgagtgctactctgtcgngccgaatatgtgagtgagtgtgtgnctacaattgtagacgagcggtatgcagaattgcacgacgcgaaagtggcggagaggtgtgcaagttatgttcgacacttagacacactaggttcgcggactcacgctgtatagtgtagaagccatgtgcgagtgtagcggcgtgattgacgaaaagtcgtancggtataataagtcaggaaggagcaaaggctgtgaggtagcggtgtggagccctgtgttgtgttatatgattaaggtatgcgaggtgtaggtgtggagggtaggtggtgataggatttgtattcagcgtagtcgtggaatccaaggttcctgttttgcggtttggaggtagagaggacggcagacgtgacgctatctcccggcgagaagatccagtgagtgagtggcgctatgttaaacgtcttgtctaacgtaagtggccgtttatatggttatgtgctcgaagtcgagttgaatcaatattgatgcgagaggccaatgattgtgtggatgcgtgcatgtaatgatgagaggtcaggtgatgtggttcacgtagtgcaacgacagtatcgcgctaacttgtgaagttatggtgcacatgagtactgtaaatgagccacgaccatggcacatactagtatgtatgtgactatgtgtagatagtggttgctatgcggtacntactattgatgtttgcgtgtggcactagatacaggccagacgaagtaatgcgaaacacagcaaagacaagaaggaaggaggctgtgtgcgaatatcacgtacggaacctacgagggaggggagccagcggtattcacaatgtgtggtaattagagtggtggtagaataagtctgtagaaattaataataaaagaggggagaggagggggg

SEQ ID NO: 1457 - DNA, 369 bp, Glycine max
  Probeset Number=SeqID_11236
tgtataacttgtatgtacgtctgttgtttgttttaagcaaaatcgatcactggaggaagctgatatagacctgtggtacgtatttggagtgacacacatacctagattgcacgactggcctgttatgcccgaggaactcattggtttcatgcttataccgcatgggtatttcaattgctcgtctgctgttgatggttcaccaaaccaaaatgatatgtatgactaagagaatggcctgaccgccaagcctatttagaatgggctaattgccaagctttaagaggataaaaaatgaagatgatctgactgcttacacggttatgtttaaattatgaaataaaagattcaattcaactgtttgtgctcgtt

SEQ ID NO: 1458 - DNA, 463 bp, Glycine max
  misc_feature (353)..(353): n is a, c, g, or t
  Peptide Sequence Number=SeqID_7431
  Probeset Number=SeqID_11237
gacgctgttttcgtattggaggagctcttgttcccaccgagtccgaatcgctctcaacctcaaagggcttaaatacgaatacaagcccgtcaatctgctcaagggagaacaatctcaccctgagtttctccacctcaatcctgttggttgtgtccccattctagtgaatgaccacattggtctctataactctttcaccattattatgtatttggaagataagtatcctcacaatcctttactccctcataatatttacgagagagcaatcaattgccaggctactagtgttatttcctcaacagtacagcctctgtataacgtaagtttactaaactacatggggaggaaanttaaccctaatgaagaacttccttgggcccaaactgtaattagaatatactgtgaggcgctgaaaaagctgtgtaagtgacccgcagggatatatacaactaagaatgag

SEQ ID NO: 1459 - DNA, 475 bp, Glycine max
  misc_feature (76)..(76): n is a, c, g, or t
  misc_feature (82)..(82): n is a, c, g, or t
  misc_feature (85)..(85): n is a, c, g, or t
  misc_feature (91)..(91): n is a, c, g, or t
  misc_feature (114)..(114): n is a, c, g, or t
  misc_feature (116)..(117): n is a, c, g, or t
  misc_feature (130)..(130): n is a, c, g, or t
  misc_feature (235)..(235): n is a, c, g, or t
  misc_feature (335)..(335): n is a, c, g, or t
  misc_feature (337)..(337): n is a, c, g, or t
  misc_feature (352)..(352): n is a, c, g, or t
  misc_feature (369)..(369): n is a, c, g, or t
  Peptide Sequence Number=SeqID_7512
  Probeset Number=SeqID_11238
aaggttctggtgtgtagacacgcagagagttcaacagagtcaaaggtggaaaagagcaagatagtgaaagctgcanggtggnagntttggncaatggaatacttttattgatgnanngacagaatcaagnatggttggcccattccccattttgtggaatccccctttccagccttattggttggaaaagaaaaccaggaagaaaaagattctattcctaatctccagaactacnccggtaaagccctgaaatccaagaaatattttggaagcaaaggacaagtttctttgggaaggttccatccctgggcaccccacgggtgggtaaaccaaancnatttttttcttttcntaaaaggggcccccccnagatggcgttttttttgtaaaccacccccaaaaaatattttctgggaaaaccccccccccatttttttcccaacgaggtttttctccggaggggggagacaattaa

SEQ ID NO: 1460 - DNA, 628 bp, Glycine max
  misc_feature (628)..(628): n is a, c, g, or t
  Probeset Number=SeqID_11239
actttctctctcttctcttttatcgggtagtgtagtgaccctctctctcattctatcgttcctgcttcttcgccgcctcgacttcttttctcgcggtgctgaaggagctcacgcatggcgactcaacttcttcatcgcgtcagtctctttgtctttttcttctcacactcacacctcactctcttttacgatctgcttgcgatgtcggagtgtccttcgttatcggacatgatcttgatgccacaaccaccgtccgagctaaaggagatcgaagatttgccggcgtcaacgatactatcgcggcttcagctcgttcgtctaatgtcgtcgcaactagttccaaattctctaccgcttcctcctctggcggtgacgctgaacatgaaagttcgaaggtcgcaagatcgcatccctatcgaaatggagaaagtcgaaaccgttctaaatctgaaatggaagatttatgagcacggagacatgcgaggtgttccagcgaagaggatcgtgctacagtcaccatcgatgcgcatgtaatctgatgctagtccttttatactatctctatatatcttgatgtgtacatgcatgaaataaattgaaaaaaaaaaaaaagaacttgtttgacctn

SEQ ID NO: 1461 - DNA, 1444 bp, Glycine max
  misc_feature (1)..(1): n is a, c, g, or t
  misc_feature (40)..(40): n is a, c, g, or t
  misc_feature (51)..(51): n is a, c, g, or t
  misc_feature (98)..(98): n is a, c, g, or t
  misc_feature (100)..(100): n is a, c, g, or t
  misc_feature (142)..(142): n is a, c, g, or t
  misc_feature (485)..(485): n is a, c, g, or t
  misc_feature (606)..(606): n is a, c, g, or t
  misc_feature (649)..(649): n is a, c, g, or t
  misc_feature (721)..(721): n is a, c, g, or t
  misc_feature (748)..(748): n is a, c, g, or t
  misc_feature (751)..(751): n is a, c, g, or t
  misc_feature (753)..(753): n is a, c, g, or t
  misc_feature (765)..(766): n is a, c, g, or t
  misc_feature (778)..(778): n is a, c, g, or t
  misc_feature (953)..(953): n is a, c, g, or t
  misc_feature (1121)..(1121): n is a, c, g, or t
  misc_feature (1171)..(1171): n is a, c, g, or t
  misc_feature (1230)..(1230): n is a, c, g, or t
  misc_feature (1288)..(1288): n is a, c, g, or t
  misc_feature (1294)..(1294): n is a, c, g, or t
  misc_feature (1299)..(1299): n is a, c, g, or t
  misc_feature (1335)..(1335): n is a, c, g, or t
  misc_feature (1357)..(1358): n is a, c, g, or t
  misc_feature (1366)..(1367): n is a, c, g, or t
  misc_feature (1395)..(1395): n is a, c, g, or t
  misc_feature (1397)..(1399): n is a, c, g, or t
  misc_feature (1411)..(1412): n is a, c, g, or t
  misc_feature (1433)..(1433): n is a, c, g, or t
  Peptide Sequence Number=SeqID_7513
  Probeset Number=SeqID_11240
ncggcatcgctgatgcacgcatacatatacacacacacanacagaggcagnatgtctcgagaaagtgtggagtacggtcagcggagcatcgagagagngnagaggtcatatgatgctaacacacaccacgaccgccataagncactaatagagaatgcatgtacatacttatatcattatctggtgtatgagtcgggtggaggcgtgcgaggattgtgttcagagcaccagataaacaatagtcataacatatatatagtatcgacacgacagaccagtaggataacagtaagatgatgtaagtgatgtaagccgggtgagagaggtgtatggtcttagagacagcacacagctgacgtagagaggtgtgcagtgatgtagtatcaacataagagagagaaaggagatggatagatataggctctgatagtagacacggcgagcgtgtgagtgagtatcgaagcagaacagtatgaggatgaagntagagggaaacatatatagttttgtgcatgtgtgtgtatataatataccgggaagacagagtgagagggtgtgttaacaaagtagaatgtgggtgggtagtgaatgatatgagatattatnaatgacacacacagcatgtaggtaatggtgagatgcgtggtcngcacagtcgcaacacgaattcaattaattataagggacgacaatacagaatatgtatttcggatatgtcgtnttgtgtttttttctccgctctgctgtngtntntctccccctgcnnttctccgcgccnccgcaattacttacacagctaatgttatttatgtatatgcgctgacagcaaccagcgactaaacgtagtgcacaggagtgctgtatttgtgggtagataatgtaggagagagaagcgacgaccgaggagaggagagagaagaaatggtatgtgtggaggaaggagaacacacgcntgttgtagatacagtcaacaatcaaaacaatactagacagataatcttgttgcgcgcgctatgtgtctccgcgcacccgatgatgtttgtgtccaagccacccaacgcgtgtttgtgtatttatcgcgcagctgccaggtccgagcagacatttattgtatggtttcnacgactttctcaaaatatacacaaataatttccttcctcgccccccacancaacaagatatcagcacgacgccattatatatttgtgccgcccgccacgcaaagagatngtggtgatgagccgtacgacatatatgtagatcgcacgatcagacgcaacccggtgtntgttgnacaanggagcggacgcgaagaggacgacaaaccacacaacncgcgcgagcgagaagtgttttnntttttttnnaaaatatcttaatttcctattatcgttngnnncctcgcctcttnnacacaccaataactactcccngggtttttccc

SEQ ID NO: 1462 - DNA, 406 bp, Glycine max
  misc_feature (308)..(308): n is a, c, g, or t
  Probeset Number=SeqID_11241
agatctcttcgtgttttacatttccaatggcgtcctcctgtgttgctaatctttctctgtcaggtgtgtctcaatctcattatgtcaaggcaaatggaatgtctaccgcaaagctcaactcgatttgtaaaacctctgcattgagtatccagaagagatcaaaccggagtcgcaagttttcagtttctgcagagtatgggagtaggagaggaagtggtggtggtgatttcgtagctggttttcttcttggtggtgctttgtttggtgctgcagcctatatctttgctccacagatacgaagatcgatnatgagtgaagaagatgagtatggtttcaagaagccagatcaaccaagttactacgatgaaggtttagagaaaacaagggagaccttgaacgagaaaat

SEQ ID NO: 1463 - DNA, 1415 bp, Glycine max
  misc_feature (94)..(94): n is a, c, g, or t
  misc_feature (274)..(274): n is a, c, g, or t
  misc_feature (602)..(602): n is a, c, g, or t
  misc_feature (647)..(647): n is a, c, g, or t
  misc_feature (726)..(726): n is a, c, g, or t
  misc_feature (809)..(809): n is a, c, g, or t
  misc_feature (902)..(902): n is a, c, g, or t
  misc_feature (906)..(906): n is a, c, g, or t
  misc_feature (1168)..(1168): n is a, c, g, or t
  misc_feature (1190)..(1190): n is a, c, g, or t
  Peptide Sequence Number=SeqID_7514
  Probeset Number=SeqID_11242
aacacaaaaaaataaattaaatctcatatatacaacaattataatataatataaataacacaaaaaacaagattaccctagaacaaaccctacnaacctattataaaccctaacaccataccactctccgtacaacagcaatcccactcccacactcccctttgggaggactccacataattaaaaaacaaacactataggacgaagacaatacataacaaataaatatagtcgacgcgcaccaacaatagataacaacaaacaaaataaaaanaaggcggaatggtgaacgtgtcagaataataaaatagatgaggcgggcatcactcacacacacacatacactctcccataccgtgctacacacaaacagagaccacaccacacatcccacaaagcgtacgcaacaacaagacagagacaaaggacgcactaaaacagagaaccaaatacaaaattgtaatcactaatattaatcaatacttagtaactctcttgttatataagtcagatatacagattatattctatttgccactcgttattatatcgtatgtcggtgttctttctactaatatttactgtgttttgtctgtgtgtcntgttgttgttcatgggtctgtatgtatggttgggtggctgcgtangcgtagccggtgtgatggttcatcgctgttggtggttgtagacctacttgtcacgcctcgtgcctggcgtgctcccgtnggtctcggctcggccgcctcccgtcggcgcccgcgccggctcggccctcggtcggtcgctacggctcaggccggcgcgcgacncctgctccgctccctgctcggcgtgtcgcccccttgcctgttcgtggtggtgctcggctcgtcatgcgacagccatgttatctgttgtttgtngccngtcgcacccgcgctgtgcgcggctagctcatgtacccgtgccttggtggcgtgttcttatctgttgtgccaaccgcatttcactaatctccataccgtcctctcactgcgtgcggcggctgcgtggtgccgtggcgctgttcgcgcctgcccacgtgcttcttgtgtcaacgcgatcttgcccatattgtcctgcgcggtggcgtggggtaacacgaacaacacaaccactcacctcacgaataagccagaagaagcacaanaccacaggcgcggtatacccantacactcacacaccacactcatatcacccactaggtcagacacacaccacatctatataatacctacccgcactgaagagtgtggaagataaatcaacccaataacaacgcacgacatctcccttatacataaatacaaagtgttgtgctgtgaataaataaatgatccgaaaataaacacataacaccacagactaccaccatctacacactaccgcccgaccg

SEQ ID NO: 1464 - DNA, 1896 bp, Glycine max
  misc_feature (1)..(7): n is a, c, g, or t
  misc_feature (12)..(21): n is a, c, g, or t
  misc_feature (26)..(26): n is a, c, g, or t
  misc_feature (34)..(34): n is a, c, g, or t
  misc_feature (48)..(48): n is a, c, g, or t
  misc_feature (50)..(50): n is a, c, g, or t
  misc_feature (60)..(60): n is a, c, g, or t
  misc_feature (221)..(221): n is a, c, g, or t
  misc_feature (231)..(231): n is a, c, g, or t
  misc_feature (253)..(253): n is a, c, g, or t
  misc_feature (310)..(310): n is a, c, g, or t
  misc_feature (409)..(409): n is a, c, g, or t
  misc_feature (826)..(826): n is a, c, g, or t
  misc_feature (951)..(951): n is a, c, g, or t
  misc_feature (961)..(961): n is a, c, g, or t
  misc_feature (963)..(963): n is a, c, g, or t
  misc_feature (1075)..(1075): n is a, c, g, or t
  misc_feature (1093)..(1093): n is a, c, g, or t
  misc_feature (1215)..(1215): n is a, c, g, or t
  misc_feature (1231)..(1231): n is a, c, g, or t
  misc_feature (1233)..(1233): n is a, c, g, or t
  misc_feature (1310)..(1310): n is a, c, g, or t
  misc_feature (1319)..(1319): n is a, c, g, or t
  misc_feature (1328)..(1328): n is a, c, g, or t
  misc_feature (1394)..(1394): n is a, c, g, or t
  misc_feature (1399)..(1400): n is a, c, g, or t
  misc_feature (1436)..(1436): n is a, c, g, or t
  misc_feature (1506)..(1506): n is a, c, g, or t
  misc_feature (1517)..(1517): n is a, c, g, or t
  misc_feature (1547)..(1548): n is a, c, g, or t
  misc_feature (1555)..(1555): n is a, c, g, or t
  misc_feature (1589)..(1589): n is a, c, g, or t
  misc_feature (1608)..(1608): n is a, c, g, or t
  misc_feature (1622)..(1622): n is a, c, g, or t
  misc_feature (1626)..(1626): n is a, c, g, or t
  misc_feature (1646)..(1646): n is a, c, g, or t
  misc_feature (1686)..(1686): n is a, c, g, or t
  misc_feature (1785)..(1785): n is a, c, g, or t
  misc_feature (1788)..(1788): n is a, c, g, or t
  misc_feature (1794)..(1794): n is a, c, g, or t
  misc_feature (1806)..(1806): n is a, c, g, or t
  misc_feature (1814)..(1814): n is a, c, g, or t
  misc_feature (1896)..(1896): n is a, c, g, or t
  Probeset Number=SeqID_11243
nnnnnnnggggnnnnnnnnnnggggngggggggnaaagaaaagcgaanancaaaagtagngagaccagagcagaagatacaccatcagcgtcctgatacctctccccccgccctgcgccgcgcgaggcgcgcgccgtccttacgctcactcacactcgagcatgactcccaccgagagaataggcgcctggaaaccatcatgccacggacggacgcagtcntccgctccanctgacgcgtacgcaccaccgtntctagcacagccaatatttataattatgagtatgatcatgtctataatatacagcangacattatgatgtcttagcgtgcagtatgtgtcaccccaccaactataaaacataacatacttcaacagtagacagaataagaattgggagcaatgcgncttctaactagaacgtgtatattttttagtatgattaaatactactaatcgcatggtgtatcatggtctcctcgcctccgacaagtcaatcccccgcatcctccacaaacaccacaccccactatcccctctctgcacgactcgctcgtgcatatgtaggaccccgcacaatgatacatacccacagaacgcgcgtcgtcgctctgctccctcctgatcttgtccgcgctctcctcctccgtcgcacctttcctacttctgtcggtctgtatcatcgctgctcccctcgccgcgccgcggtctctctctcagagtattcgtcctcgagtcggcactcataaaggctgtgtgtaccactgtaagtaagactaataactgagggatgagagtgcgtgtcgagtatgtcgagacaacgancgcagcgtgacggtgcgggcgcggcactgaggctgagcatacctgtactacgacatatatagtctaattaatattactctcacgccgcgctctgccagtggagtataatcatcgcctcatggganctgctgtacnancgacgcggccgtctcgtcttacgcgagcacatacctccagtgcagacatcgcgctcgcgccgacgccggactctgtcgcgcgttcaacctcttctcttgagccacacccccnagctgcgcactgtaacgngagttgacagccacgtgcgacgctaccgagatgccgccgatgtggtccgccgcactacacattcatgtctctggcagacgtcacgtcgaacatgtgcaactcactaacacatgctatccgtncgctcactcatgtgtncntctgagcttgacggccgcggtacgacgaccagatcgaatgacggagctgagccgcgcggtacgacgcggcgttgtgnacgatattnttagtactnactcttgagtctctgctctcgactatacgccctgactcgctacaccacactgcgcgccgacaccantctannagccaccactaccatcacgaacccatctgtgtcgangcgctgtgtgtacgaacacacactggcacgatgcatgcaacgcgcacgtctctccgtctctctgtcgcgnacgcatagtanatgtgctggatcgtgtatgatatatagtcnntgatgtntgatcttgacctcacgtccggcgcggcgatacanggctgacatcgcgcgtgcntgcgtgacatcgcncganacaagtctaatgcacatgantgtactaaatcatcacccacatatcaatgcatcgcaacancgactgctgaatgacatagtgattacacacactccaccatgcgacacctgatcacgatgacacaacaatgatcactcgacgcgcctagtcatcaacatnatncacctnctcatcacactnctcgcacngccgacgctctcgtgtaccgttcgtgcgtcatctcgacccatcacctactatatatgacccctacgcgatacggatgagcgn

SEQ ID NO: 1465 - DNA, 176 bp, Glycine max
  Peptide Sequence Number=SeqID_7515
  Probeset Number=SeqID_11244
catacaaaagaaaaggaaaactgtgtcgtctgtattcctgtacagccattgtttcagacgactttgtaaagggggcatgtaattattatgctctgttctcttctctgggctccgtgcaggtgcagctagtggtcagctcccactgtgataccccccgcaaaaaaaaaaaaaaaaaa

SEQ ID NO: 1466 - DNA, 1942 bp, Glycine max
  misc_feature (15)..(17): n is a, c, g, or t
  misc_feature (22)..(22): n is a, c, g, or t
  misc_feature (35)..(35): n is a, c, g, or t
  misc_feature (45)..(45): n is a, c, g, or t
  misc_feature (47)..(47): n is a, c, g, or t
  misc_feature (61)..(61): n is a, c, g, or t
  misc_feature (71)..(71): n is a, c, g, or t
  misc_feature (88)..(88): n is a, c, g, or t
  misc_feature (113)..(113): n is a, c, g, or t
  misc_feature (115)..(115): n is a, c, g, or t
  misc_feature (118)..(118): n is a, c, g, or t
  misc_feature (131)..(131): n is a, c, g, or t
  misc_feature (154)..(154): n is a, c, g, or t
  misc_feature (198)..(198): n is a, c, g, or t
  misc_feature (200)..(200): n is a, c, g, or t
  misc_feature (203)..(203): n is a, c, g, or t
  misc_feature (218)..(218): n is a, c, g, or t
  misc_feature (222)..(222): n is a, c, g, or t
  misc_feature (225)..(225): n is a, c, g, or t
  misc_feature (228)..(228): n is a, c, g, or t
  misc_feature (261)..(261): n is a, c, g, or t
  misc_feature (306)..(306): n is a, c, g, or t
  misc_feature (534)..(534): n is a, c, g, or t
  misc_feature (544)..(544): n is a, c, g, or t
  misc_feature (552)..(552): n is a, c, g, or t
  misc_feature (819)..(819): n is a, c, g, or t
  misc_feature (858)..(858): n is a, c, g, or t
  misc_feature (934)..(934): n is a, c, g, or t
  misc_feature (1020)..(1020): n is a, c, g, or t
  misc_feature (1029)..(1029): n is a, c, g, or t
  misc_feature (1099)..(1099): n is a, c, g, or t
  misc_feature (1296)..(1296): n is a, c, g, or t
  misc_feature (1306)..(1306): n is a, c, g, or t
  misc_feature (1329)..(1329): n is a, c, g, or t
  misc_feature (1347)..(1347): n is a, c, g, or t
  misc_feature (1400)..(1400): n is a, c, g, or t
  misc_feature (1424)..(1424): n is a, c, g, or t
  misc_feature (1449)..(1449): n is a, c, g, or t
  misc_feature (1456)..(1456): n is a, c, g, or t
  misc_feature (1468)..(1468): n is a, c, g, or t
  misc_feature (1493)..(1493): n is a, c, g, or t
  misc_feature (1504)..(1504): n is a, c, g, or t
  misc_feature (1516)..(1516): n is a, c, g, or t
  misc_feature (1531)..(1531): n is a, c, g, or t
  misc_feature (1560)..(1560): n is a, c, g, or t
  misc_feature (1565)..(1565): n is a, c, g, or t
  misc_feature (1567)..(1567): n is a, c, g, or t
  misc_feature (1574)..(1574): n is a, c, g, or t
  misc_feature (1588)..(1588): n is a, c, g, or t
  misc_feature (1597)..(1597): n is a, c, g, or t
  misc_feature (1611)..(1611): n is a, c, g, or t
  misc_feature (1616)..(1616): n is a, c, g, or t
  misc_feature (1635)..(1635): n is a, c, g, or t
  misc_feature (1653)..(1653): n is a, c, g, or t
  misc_feature (1673)..(1673): n is a, c, g, or t
  misc_feature (1692)..(1692): n is a, c, g, or t
  misc_feature (1694)..(1694): n is a, c, g, or t
  misc_feature (1697)..(1697): n is a, c, g, or t
  misc_feature (1723)..(1723): n is a, c, g, or t
  misc_feature (1728)..(1729): n is a, c, g, or t
  misc_feature (1772)..(1772): n is a, c, g, or t
  misc_feature (1859)..(1859): n is a, c, g, or t
  misc_feature (1942)..(1942): n is a, c, g, or t
  Probeset Number=SeqID_11245
aaaaaaagcgaaaannngagtnagagtaatacagntttgtatatntntattcatatatccntatacatacnctacatcatacacacancagaacacagcatttatataactananacngtatatacacttnaactatacttctcgttgtaatanagtgcttatgttgttcctcatattttcatctccacacacccgcncncgnctctaccaccctccnctancanccncccgtgcctctccatgatacacgatacgacgtnctaccctatatcatcacgtctcctctctctatacttttcgctctntctctcacacgtctacttctccacccgatccatactaatactacacatactatcataacatacatcctctatcatacaatagatgacataactctactaatacatatcagtatctctactaatcaactcgcaacttatcccgcaacaatcactcacacatcactatgcatacatcaacactaccactgctcaccaacatttgtctccgtccttcctctctatcacacnctaaccaccntgatagcngttgagccctgcacaatcaccctcgcttctataaccatcacacaaatactactactatcactatactatatatatataatattatattctacaacatatctatatacatccaactatcatctccacactaaccatacacatcttaagccagccagacaatatctcatcaacgaaagatataagcatcaatctaactgctctaacactactacttactacattaactacacacactctactatacaatccacatgtatctcatcacantacatacctctctataatacccacattattctcatactntatatattatactactctcatcgagatatactactctacatacaaacatatcaacataatatattaacaaactaantaactcacattcaacacacactaacactcaaactactatcatatactacatcaatacgacaagacagacacaagagaataacacgngacactctntatatctactgacaatcacttgtctatctatataatatacatttattatatgtatactgtctagaaatanctcaacaataagcagagattcagatgtaattacattatcatatatataatcatccgcaaccacttcatatatgtgctactctacacatatcatgaatactgtactctatatcactactagttccatcttcgtgactcaagacctcactcaaacaccacggacgttataataaataaaagaagtattatactactatnatgacatcgnctgcgcacataccatcttacatnctcaactcatatcatgtntgacactcatacatcagacacacacaagtcttaactatctctctactgcctcntcatatcagcactatatatctctnctctcacaatcgctatgtatcgcanactccantatcatactcantcgatagtactgaattgtgttatantatagactctnagtctacttgtntaattcgtcactcantcaagctcgtccgtagcctatcatatctntcgananacgtctnacactgcccgatantaacccaantatcccacctcttnataancaaattacatactattganaccacgtcacaccgtgtnatactcgtcaccattataantcacacatatcatctacanantanttacaccatacatacacgctcgcacntctcnntcataactatatactcctctcatcaccacctccatctcatctnctccatcagactcgactactgacaatcacgtatcatgcgatctgtgatactctatttcatctctctttatcatcatcatatcactanacgcaactatgcaactacaatatatacacacatatcatctgactacgcatatattactatactcatactacactgcgtacacn

SEQ ID NO: 1467 - DNA, 594 bp, Glycine max
  misc_feature (104)..(104): n is a, c, g, or t
  misc_feature (128)..(128): n is a, c, g, or t
  Peptide Sequence Number=SeqID_7516
  Probeset Number=SeqID_11246
gagagaatggctcaagcaatggcatcaatgactagcttacgtggttcctctcaggctgtgttggaaggtagccttggctccacgcgctggaatggggggggtgnaaggggggtggggtcggtgacacntacagggttgacaggtggagcacatcagcaacaagtgaatggtggtgaggtacaaactagccgtagggcattgctttcacttgttgctgctggtggagccggtggctcttttgttcaaaccttgctctctgatgccaagcctatcaaagttggaccgcctccaccaccttctggctgattacctggaacgttgaactcagatgagccgagacaccttcagctgtcgttgatagatactttcttccttcggccattgtctgccactgattctccccaatgcgcaaggggagtgagccaggagcttgttggcgtatagaagttgattgagccggaggcttggccatgtggtgcggatggtctgcgtctcaaggacaaatatctgcgctgggatctcgacagctggctatcttgcggggggtgggatgcagatagagtaacgcgcggagcggcgtcgcggctcttccct

SEQ ID NO: 1468 - DNA, 221 bp, Glycine max
  Peptide Sequence Number=SeqID_7517
  Probeset Number=SeqID_11247
aaaaaagggaaatgccgcgccatattggttaggtcacctgtagcgataccgatatggttttcgcccattaatttcccttatctttgggcaccgtaagcaagtcatgcacggcctacttggtcaggttcgctgtccgcattatccctggttcagctcacaggctcacatacagatctgcctcaccaagaaacgaatgtccaaaaagtgttccttaatttgat

SEQ ID NO: 1469 - DNA, 2008 bp, Glycine max
  misc_feature (30)..(30): n is a, c, g, or t
  misc_feature (59)..(60): n is a, c, g, or t
  misc_feature (67)..(67): n is a, c, g, or t
  misc_feature (70)..(70): n is a, c, g, or t
  misc_feature (76)..(76): n is a, c, g, or t
  misc_feature (84)..(85): n is a, c, g, or t
  misc_feature (88)..(88): n is a, c, g, or t
  misc_feature (91)..(91): n is a, c, g, or t
  misc_feature (93)..(94): n is a, c, g, or t
  misc_feature (96)..(99): n is a, c, g, or t
  misc_feature (101)..(102): n is a, c, g, or t
  misc_feature (107)..(107): n is a, c, g, or t
  misc_feature (115)..(115): n is a, c, g, or t
  misc_feature (117)..(118): n is a, c, g, or t
  misc_feature (126)..(126): n is a, c, g, or t
  misc_feature (140)..(140): n is a, c, g, or t
  misc_feature (156)..(156): n is a, c, g, or t
  misc_feature (202)..(202): n is a, c, g, or t
  misc_feature (256)..(256): n is a, c, g, or t
  misc_feature (275)..(275): n is a, c, g, or t
  misc_feature (302)..(302): n is a, c, g, or t
  misc_feature (311)..(312): n is a, c, g, or t
  misc_feature (317)..(317): n is a, c, g, or t
  misc_feature (322)..(322): n is a, c, g, or t
  misc_feature (329)..(332): n is a, c, g, or t
  misc_feature (335)..(335): n is a, c, g, or t
  misc_feature (342)..(342): n is a, c, g, or t
  misc_feature (376)..(377): n is a, c, g, or t
  misc_feature (385)..(385): n is a, c, g, or t
  misc_feature (437)..(437): n is a, c, g, or t
  misc_feature (483)..(483): n is a, c, g, or t
  misc_feature (525)..(525): n is a, c, g, or t
  misc_feature (560)..(560): n is a, c, g, or t
  misc_feature (617)..(617): n is a, c, g, or t
  misc_feature (619)..(619): n is a, c, g, or t
  misc_feature (623)..(623): n is a, c, g, or t
  misc_feature (645)..(645): n is a, c, g, or t
  misc_feature (651)..(651): n is a, c, g, or t
  misc_feature (659)..(659): n is a, c, g, or t
  misc_feature (664)..(664): n is a, c, g, or t
  misc_feature (686)..(686): n is a, c, g, or t
  misc_feature (703)..(703): n is a, c, g, or t
  misc_feature (705)..(705): n is a, c, g, or t
  misc_feature (711)..(711): n is a, c, g, or t
  misc_feature (748)..(748): n is a, c, g, or t
  misc_feature (789)..(789): n is a, c, g, or t
  misc_feature (798)..(798): n is a, c, g, or t
  misc_feature (815)..(815): n is a, c, g, or t
  misc_feature (876)..(876): n is a, c, g, or t
  misc_feature (883)..(883): n is a, c, g, or t
  misc_feature (888)..(888): n is a, c, g, or t
  misc_feature (955)..(955): n is a, c, g, or t
  misc_feature (957)..(957): n is a, c, g, or t
  misc_feature (977)..(977): n is a, c, g, or t
  misc_feature (1047)..(1047): n is a, c, g, or t
  misc_feature (1052)..(1052): n is a, c, g, or t
  misc_feature (1058)..(1058): n is a, c, g, or t
  misc_feature (1073)..(1073): n is a, c, g, or t
  misc_feature (1080)..(1080): n is a, c, g, or t
  misc_feature (1090)..(1090): n is a, c, g, or t
  misc_feature (1097)..(1097): n is a, c, g, or t
  misc_feature (1100)..(1100): n is a, c, g, or t
  misc_feature (1107)..(1107): n is a, c, g, or t
  misc_feature (1116)..(1116): n is a, c, g, or t
  misc_feature (1122)..(1122): n is a, c, g, or t
  misc_feature (1130)..(1130): n is a, c, g, or t
  misc_feature (1140)..(1140): n is a, c, g, or t
  misc_feature (1142)..(1142): n is a, c, g, or t
  misc_feature (1150)..(1150): n is a, c, g, or t
  misc_feature (1152)..(1153): n is a, c, g, or t
  misc_feature (1210)..(1210): n is a, c, g, or t
  misc_feature (1239)..(1239): n is a, c, g, or t
  misc_feature (1249)..(1249): n is a, c, g, or t
  misc_feature (1257)..(1257): n is a, c, g, or t
  misc_feature (1290)..(1290): n is a, c, g, or t
  misc_feature (1352)..(1352): n is a, c, g, or t
  misc_feature (1365)..(1365): n is a, c, g, or t
  misc_feature (1380)..(1380): n is a, c, g, or t
  misc_feature (1382)..(1382): n is a, c, g, or t
  misc_feature (1410)..(1410): n is a, c, g, or t
  misc_feature (1431)..(1431): n is a, c, g, or t
  misc_feature (1446)..(1446): n is a, c, g, or t
  misc_feature (1467)..(1467): n is a, c, g, or t
  misc_feature (1473)..(1473): n is a, c, g, or t
  misc_feature (1485)..(1485): n is a, c, g, or t
  misc_feature (1502)..(1502): n is a, c, g, or t
  misc_feature (1510)..(1510): n is a, c, g, or t
  misc_feature (1512)..(1512): n is a, c, g, or t
  misc_feature (1514)..(1514): n is a, c, g, or t
  misc_feature (1520)..(1520): n is a, c, g, or t
  misc_feature (1525)..(1526): n is a, c, g, or t
  misc_feature (1539)..(1539): n is a, c, g, or t
  misc_feature (1564)..(1564): n is a, c, g, or t
  misc_feature (1585)..(1585): n is a, c, g, or t
  misc_feature (1587)..(1587): n is a, c, g, or t
  misc_feature (1590)..(1590): n is a, c, g, or t
  misc_feature (1592)..(1592): n is a, c, g, or t
  misc_feature (1603)..(1603): n is a, c, g, or t
  misc_feature (1657)..(1657): n is a, c, g, or t
  misc_feature (1674)..(1674): n is a, c, g, or t
  misc_feature (1697)..(1697): n is a, c, g, or t
  misc_feature (1718)..(1718): n is a, c, g, or t
  misc_feature (1746)..(1746): n is a, c, g, or t
  misc_feature (1749)..(1749): n is a, c, g, or t
  misc_feature (1755)..(1755): n is a, c, g, or t
  misc_feature (1792)..(1792): n is a, c, g, or t
  misc_feature (1807)..(1807): n is a, c, g, or t
  misc_feature (1809)..(1810): n is a, c, g, or t
  misc_feature (1834)..(1835): n is a, c, g, or t
  misc_feature (1843)..(1843): n is a, c, g, or t
  misc_feature (1861)..(1861): n is a, c, g, or t
  misc_feature (1864)..(1864): n is a, c, g, or t
  misc_feature (1870)..(1870): n is a, c, g, or t
  misc_feature (1872)..(1872): n is a, c, g, or t
  misc_feature (1885)..(1885): n is a, c, g, or t
  misc_feature (1888)..(1889): n is a, c, g, or t
  misc_feature (1893)..(1893): n is a, c, g, or t
  misc_feature (1903)..(1903): n is a, c, g, or t
  misc_feature (1912)..(1912): n is a, c, g, or t
  misc_feature (1922)..(1922): n is a, c, g, or t
  misc_feature (1928)..(1928): n is a, c, g, or t
  misc_feature (1937)..(1937): n is a, c, g, or t
  misc_feature (1941)..(1941): n is a, c, g, or t
  misc_feature (1959)..(1959): n is a, c, g, or t
  misc_feature (1966)..(1966): n is a, c, g, or t
  misc_feature (1968)..(1968): n is a, c, g, or t
  misc_feature (1985)..(1985): n is a, c, g, or t
  misc_feature (1987)..(1987): n is a, c, g, or t
  misc_feature (1998)..(1998): n is a, c, g, or t
  misc_feature (2003)..(2003): n is a, c, g, or t
  misc_feature (2005)..(2005): n is a, c, g, or t
  misc_feature (2008)..(2008): n is a, c, g, or t
  Peptide Sequence Number=SeqID_7518
  Probeset Number=SeqID_11248
caatattgtagtaattgttaaagcacaganggggcgagacacaacacgcagaaggatannaggaggnaanacaaanaaaattanntanaanannannnngnngaaanaataaaananngaatattnaatatatattattngatgctgattggaatnaggtgctcatcaagatagattgtacgataagcattatactatctanactacgccacgcaatgttctaacacataacatggctgctctaccttatacagcnaccttgaatgagtgggtancattacttctctcgctctgggtgtgtntctatgggnncaggnggggncagaaannnncanatctttnatatatgtgtgttgagagcgcgagtgtgtgtaannttctcctncgtcttgtcgttattgttatattttgtgtgagtcgctcgccgtgcgctcttnattgtgtcttcgtctttctggatcgccgtggtgcgtcgtgtttggntgctactacatccatcactcaacacactcactccaccacctntcgttctatacgtctcatcccaccaactcacctanttgagaggagaacacacagatctatcatgatatatatttcatacccactctaccgancnatcntcactgcgtctcacgacaacgncgccgncacacgancgggncacgcacaggcgcgatgggggnagacggcgcgatgagananacagangaccacgaattgtagtgtgctctatcacactacatantatattgcttgatctctcactatctatttatcatactgatntatcatctntactataacatctatcnaacgcgaactcgctacaacatcacatatctacacgatcagcttcattatcgcaattactcnctacatncaaanatcatctatcacactcatatcatatatagatcgtatgacgtgtgttgcacgtggggtatgtcgttgngntcgctatagtgatcactatnaccagcatacgacgctcgagaacatatcgattcgtcgtctgctgatagtacacacacacacattgtcgtngcgtnctcgcnctacgtcgcatgagncgagcanagtgacatantatgaanaantcaacanacacagtgntcgtgntacgtagntgtgggttgngntgagtggnannagacacgtatcatatcatctatagtccatgcgtggtcgctcgtgtgcgttgcgactnatgtaacatactattcatactatatattnactatctatncgatgttnttctgctgctgacgtaatgtactactattcatnctattatctcaatgctatcagtaatacacgacgtcgatacacgatacttaaagtcactcaangcaatcatcactnacgtatgactattcntnctagctatccgtcatgctcgtgatatgntaatagtatatgatactgacnaccacacgtagtgcncatcgatctgcaggtagtttncatgcngatgacgtagcnacgatgagtagcgtatngatgatantnancgggancgctnnagagaagtaaaantcacacactgacacgtcgtacaacnattcagatcaatctgaccacnancancnacattctcatntctcgtctcttccacgtctactctcaacataccatgatgaatcatctatttacntatgatatattaaatantgaatatatgatctagaagtcgnttgattgcattagcttcgttnctgaccgtcatgtctatcttcctttatntcntgactncctatcactactcgtcgactatcgttcctgactggtnctgtcactatcaacngnncgccatgcgcagcgcacctcgatnntaacgatnatggtcgtagctcatcgntcncgtcgngnatgcgtctacgtnggnngtancatcagtcanatgatgagnacgtgacgancgtacngatgtgttnatangatcgactgatgtcgagntagtcgnangcaacacgtcgatgctnantaccatcaccngacancntcn

SEQ ID NO: 1470 - DNA, 1696 bp, Glycine max
  misc_feature (11)..(11): n is a, c, g, or t
  misc_feature (13)..(13): n is a, c, g, or t
  misc_feature (19)..(20): n is a, c, g, or t
  misc_feature (24)..(24): n is a, c, g, or t
  misc_feature (75)..(76): n is a, c, g, or t
  misc_feature (143)..(143): n is a, c, g, or t
  misc_feature (263)..(263): n is a, c, g, or t
  misc_feature (1156)..(1156): n is a, c, g, or t
  misc_feature (1356)..(1356): n is a, c, g, or t
  misc_feature (1377)..(1377): n is a, c, g, or t
  misc_feature (1433)..(1433): n is a, c, g, or t
  misc_feature (1522)..(1523): n is a, c, g, or t
  misc_feature (1554)..(1554): n is a, c, g, or t
  misc_feature (1609)..(1609): n is a, c, g, or t
  misc_feature (1682)..(1682): n is a, c, g, or t
  misc_feature (1696)..(1696): n is a, c, g, or t
  Probeset Number=SeqID_11249
acatttaaccnancgcaanncatnagcttacattagagcaaacaacaaaaggcagagacacgcggcccgcgcganncccgaccagaaaattgggtgtaacacggggacccccccccccgtcgggagggctcggaacggagtcnccgaaataaattgctcgttattctataatttctatttgttccaactgcgatgaacggcgagacgtagagggttaagaacagggacggagcgtgacatatttgaattgctctttaacaacnatgaaacatctgtgagtgagcaataatacggcagagcagcgtgaccgcgacagcgacgcaccgcggtggctcacgcactcccgaagcacgacgcaactcagaaaggaggcacagccggaagagagaaacgatagacagacacctggcgccaatatggtatttcactcttaactcgtaatgatgatcccacatcgatttagctcgccgaggattcctacttcatgtctcgaccggaaacccgcagccctcataccgccacgtgtggtgttgtccgcacgtcataacggcggccggagaccacagttaggcgccgcagaacatcctttctcgcgcacagcgactagccaacgttacactaataatcaacagaacgagtgcacacgatgttgcgagcgagaacggacacccgacattaccgatgcacgcttccactactagaccgcatgagatgaataatatatcacatactcaatacgcaaccgggcacatgtcaaattgatgtacacgccgagatcaagctgaagatgtccctatctactacgagtttaaacaaagagtgaggatgaggacagacgagtgtgtacacgtggacgacgcaataggatgattataagtcagaacatcgcgtaaacttatagaacaacacactgaacatgagtcacctacatacgtacaacaatacataatcgtgacagacacagccggcgcccgcgagaggaatagtcgaaaccaacgtcacacctatatagatgtacatcagacatgaatgtatacgcacccgcgcgcactcatacctagttattagttctcacagcggtgaagagatgagagacagaaatcatggatagataattacagcgacgccgtatatgacttagatgaatgatatcagncacgactcacatgcacactgtgctagcagacgatacgcaatacaacaagagagcacggtatatcgagagttagttatcgctagcgtgtctggctaggacaaatagaagtagatcgacaggttcgtacaatccgacatatatgaggcaagcgcatgcacgcggatatgaaaaggagcgacatgccacaacacacctagacnatctatgatacatgactcgcnctcactcgagatgtacgatacgagtatacgtgtgcatggcgagctgcactgctagngtgagatgagttggatgctgagacgcgatcagttgggccgatactagaatgaggaggatatcgtgcagatactatcactgatgtacagnntcagataaaagcaagctggtctagtagtatnacgccttaaaaatcaccgacgctccgtggcgaatgcactgaaaaactgactctangatatactatcaatacatcctgactgccatgacgttgcatgagagcatagacgtgatgctcgaccaaccgagnacaatcatgggcan

SEQ ID NO: 1471 - DNA, 498 bp, Glycine max
  Peptide Sequence Number=SeqID_7519
  Probeset Number=SeqID_11250
gatcgatacttggacagataactggcagtactagctcagtgagtgactgcacactcagtcatgtactgcaagaagatgctcacttcactgctcatggcggccctcctcttgtgctcctgcgccacgtccgtcggcaaatcgcgctacaccgttggcacgagcggcgtagccaaggtgtgaagcgcggtgccattggcggcggagggagcccatggtggccgcagaactgcagcgaggggagcgaggtctctggggcagagggtgccggtgaaggcgccccctccgccgaaggccaagcctccgcggccgcggccgccggcgtcacctccgccgtgtactccggtggcagatggtagattcggttgatatgctgctttagcttttacagtggccttttctgtttgcgttgctgctgcggacgtcgttacggccacacgcgcatcgccttgtatgtgtttctttgtcatctctgaataaagacagtaaactgacaacccg

SEQ ID NO: 1472 - DNA, 650 bp, Glycine max
  Probeset Number=SeqID_11251
accctcctctctttgcctttctccgcctcccccgtctcactcctacctctctctccctctctccttaggattcatggcttccatggctgctgcctctacttccctgcaggctcgtcctcgccaaatggtaactgcggttaaatgttttagccagggaagcagaagcaatctttcttttacgcttcgccctcttcctacccgcctgagcgtctcttgcgcggcaaaacctgagacagtggacaaagtgtgtgaagtggtcaaaaagcaactctcacttaaagagggcgaccaagttacggctgccaccaaatttgctgaacttggtgctgattctcttgatacggtggagattgtgatgggcctcgaggaagcgttcgatatagaaatggaggaggacaaagcacaggcgattgagacagtcgaggaagcagctgagctcattgaggagattttgaaagcaaaggcttaattaagtccacatcatttattacaaaaccaaacgatggaaaccccactaaacccaaacccactgtcttgttattgtttggttagctagagaccactttatgtttgttgagatttatgttcgtttgggcaaaaatattacaaggcttgtatttgactttttcattttaaaacttttttagctc

SEQ ID NO: 1473 - DNA, 1573 bp, Glycine max
  misc_feature (12)..(12): n is a, c, g, or t
  misc_feature (50)..(50): n is a, c, g, or t
  misc_feature (96)..(96): n is a, c, g, or t
  misc_feature (175)..(175): n is a, c, g, or t
  misc_feature (300)..(300): n is a, c, g, or t
  misc_feature (410)..(410): n is a, c, g, or t
  misc_feature (532)..(532): n is a, c, g, or t
  misc_feature (736)..(736): n is a, c, g, or t
  misc_feature (745)..(745): n is a, c, g, or t
  misc_feature (935)..(935): n is a, c, g, or t
  misc_feature (981)..(981): n is a, c, g, or t
  misc_feature (1010)..(1010): n is a, c, g, or t
  misc_feature (1022)..(1022): n is a, c, g, or t
  misc_feature (1038)..(1038): n is a, c, g, or t
  misc_feature (1221)..(1221): n is a, c, g, or t
  misc_feature (1300)..(1300): n is a, c, g, or t
  misc_feature (1302)..(1302): n is a, c, g, or t
  misc_feature (1311)..(1311): n is a, c, g, or t
  misc_feature (1313)..(1313): n is a, c, g, or t
  misc_feature (1330)..(1330): n is a, c, g, or t
  misc_feature (1427)..(1427): n is a, c, g, or t
  misc_feature (1458)..(1458): n is a, c, g, or t
  misc_feature (1475)..(1476): n is a, c, g, or t
  misc_feature (1488)..(1488): n is a, c, g, or t
  misc_feature (1534)..(1537): n is a, c, g, or t
  misc_feature (1542)..(1545): n is a, c, g, or t
  misc_feature (1550)..(1552): n is a, c, g, or t
  Peptide Sequence Number=SeqID_7600
  Probeset Number=SeqID_11252
cagaatggtgtntgcgcgtgactgagagtggttatgtgtggagataggtnggtgagatgtttttacatcgacgatcgcgatcgtagtggttcatanccaatatgtaacggtcgtcctaggcagagcatacaacacaccgagatgacgacatcagagtcacgtgatttggtgcttntttattatattctattattgaacatatgtgtgttatcggcagaggtgagtcttcgcgaggagagccacctcgctcggttgttcggacgtcgcaggtgagggttgtagtgtaggggatgagttgangtgggtagccagggaggtcgtgatagagcaccgcgtagcgcaggtgtgataagcgtggtgtgggaacgagagctacgacagtgacgacaacacgcacgactggaccgtgntagatgataatgagcagagcagggtgctctgtgatagcttatcacctcatctgtgagatagatgttagatagctgtactatgaagagggcgcgtgtgcgctgggctgctcctcctcgttacngtaatataagttatatcacgcaatagactaggtaagagccttctcgctttgataccgatcagttaagtgagtggggatgcagtaatcgtggttggctcttgttgttgtgtagttcatgagtcctatctaggctcttatatgttgatgcttcgtcttggtcttattatccatattatggttgttattagtctagtgtatgtgagntcctctagntcacaatacatcaacgagacatagcgccaccagccctgacgcgagcagctagataagacgattgagctgcggatgatgctggttggttgcggcagcgtgagctgacgtatactgtggtggtgtgtggtagagccgaatgtgttcgtatgaggtggtggtactctatagagtggacttgtccgtgagatcncgcactacgctgactcttatgtcgcacgagtcgatataggcgtctnttccataaacacacacacctgaggcgcgncggcgtgcggtntggcgagcgcaagcgngcacggtatacctatattctctatgtaactatcaacggcagggctcatcatagttcaatgaatgtctagtattggcgcacagctcactacatcacaatacctcacgcggcacgctagagagtatatcttgatatcgtcgctgtatgtccctctcgattcacgacagccaggtaaaagaatganccgcaacggttctacacgaactatcatcgtgacagcgagaatagatggcctacgggtcggtgtgttggggctgtgaatnanagtgattananattataagagaaatgangtacattgtgttcctttgctcgtcgccgcggcgcgccgcgtgtagtgcgcatacatctatgtctaaggtagtgatagaggatcgccgcgctctcatncctacccgcgcgagagagggtggcgtcatcncctattgttctacttgnnaggtcatagagnggtaatgagtgcgatacaggcagtcgatacgggctaggtctgaggnnnnggccnnnnacccnnnacccactccacaccctttaac

SEQ ID NO: 1474 - DNA, 2193 bp, Glycine max
  misc_feature (1)..(1): n is a, c, g, or t
  misc_feature (15)..(17): n is a, c, g, or t
  misc_feature (22)..(23): n is a, c, g, or t
  misc_feature (30)..(31): n is a, c, g, or t
  misc_feature (33)..(33): n is a, c, g, or t
  misc_feature (39)..(39): n is a, c, g, or t
  misc_feature (46)..(47): n is a, c, g, or t
  misc_feature (56)..(57): n is a, c, g, or t
  misc_feature (59)..(59): n is a, c, g, or t
  misc_feature (71)..(71): n is a, c, g, or t
  misc_feature (76)..(76): n is a, c, g, or t
  misc_feature (98)..(98): n is a, c, g, or t
  misc_feature (117)..(117): n is a, c, g, or t
  misc_feature (132)..(132): n is a, c, g, or t
  misc_feature (134)..(134): n is a, c, g, or t
  misc_feature (164)..(165): n is a, c, g, or t
  misc_feature (188)..(188): n is a, c, g, or t
  misc_feature (192)..(192): n is a, c, g, or t
  misc_feature (228)..(228): n is a, c, g, or t
  misc_feature (231)..(231): n is a, c, g, or t
  misc_feature (239)..(239): n is a, c, g, or t
  misc_feature (241)..(241): n is a, c, g, or t
  misc_feature (255)..(255): n is a, c, g, or t
  misc_feature (275)..(276): n is a, c, g, or t
  misc_feature (280)..(280): n is a, c, g, or t
  misc_feature (296)..(296): n is a, c, g, or t
  misc_feature (306)..(306): n is a, c, g, or t
  misc_feature (344)..(344): n is a, c, g, or t
  misc_feature (377)..(377): n is a, c, g, or t
  misc_feature (389)..(389): n is a, c, g, or t
  misc_feature (420)..(420): n is a, c, g, or t
  misc_feature (440)..(440): n is a, c, g, or t
  misc_feature (442)..(442): n is a, c, g, or t
  misc_feature (448)..(448): n is a, c, g, or t
  misc_feature (468)..(468): n is a, c, g, or t
  misc_feature (474)..(474): n is a, c, g, or t
  misc_feature (517)..(517): n is a, c, g, or t
  misc_feature (557)..(557): n is a, c, g, or t
  misc_feature (637)..(637): n is a, c, g, or t
  misc_feature (679)..(679): n is a, c, g, or t
  misc_feature (681)..(682): n is a, c, g, or t
  misc_feature (685)..(685): n is a, c, g, or t
  misc_feature (693)..(693): n is a, c, g, or t
  misc_feature (708)..(708): n is a, c, g, or t
  misc_feature (711)..(711): n is a, c, g, or t
  misc_feature (726)..(726): n is a, c, g, or t
  misc_feature (795)..(795): n is a, c, g, or t
  misc_feature (800)..(800): n is a, c, g, or t
  misc_feature (834)..(834): n is a, c, g, or t
  misc_feature (839)..(839): n is a, c, g, or t
  misc_feature (881)..(881): n is a, c, g, or t
  misc_feature (899)..(899): n is a, c, g, or t
  misc_feature (937)..(937): n is a, c, g, or t
  misc_feature (1005)..(1005): n is a, c, g, or t
  misc_feature (1007)..(1007): n is a, c, g, or t
  misc_feature (1012)..(1012): n is a, c, g, or t
  misc_feature (1018)..(1018): n is a, c, g, or t
  misc_feature (1024)..(1025): n is a, c, g, or t
  misc_feature (1028)..(1028): n is a, c, g, or t
  misc_feature (1033)..(1033): n is a, c, g, or t
  misc_feature (1050)..(1050): n is a, c, g, or t
  misc_feature (1052)..(1052): n is a, c, g, or t
  misc_feature (1054)..(1054): n is a, c, g, or t
  misc_feature (1135)..(1135): n is a, c, g, or t
  misc_feature (1156)..(1156): n is a, c, g, or t
  misc_feature (1193)..(1193): n is a, c, g, or t
  misc_feature (1211)..(1213): n is a, c, g, or t
  misc_feature (1215)..(1216): n is a, c, g, or t
  misc_feature (1221)..(1229): n is a, c, g, or t
  misc_feature (1231)..(1232): n is a, c, g, or t
  misc_feature (1263)..(1263): n is a, c, g, or t
  misc_feature (1280)..(1280): n is a, c, g, or t
  misc_feature (1285)..(1285): n is a, c, g, or t
  misc_feature (1292)..(1292): n is a, c, g, or t
  misc_feature (1325)..(1325): n is a, c, g, or t
  misc_feature (1346)..(1346): n is a, c, g, or t
  misc_feature (1349)..(1349): n is a, c, g, or t
  misc_feature (1371)..(1371): n is a, c, g, or t
  misc_feature (1391)..(1391): n is a, c, g, or t
  misc_feature (1405)..(1405): n is a, c, g, or t
  misc_feature (1419)..(1419): n is a, c, g, or t
  misc_feature (1423)..(1423): n is a, c, g, or t
  misc_feature (1436)..(1436): n is a, c, g, or t
  misc_feature (1453)..(1453): n is a, c, g, or t
  misc_feature (1476)..(1476): n is a, c, g, or t
  misc_feature (1478)..(1478): n is a, c, g, or t
  misc_feature (1498)..(1498): n is a, c, g, or t
  misc_feature (1501)..(1501): n is a, c, g, or t
  misc_feature (1534)..(1534): n is a, c, g, or t
  misc_feature (1610)..(1610): n is a, c, g, or t
  misc_feature (1633)..(1633): n is a, c, g, or t
  misc_feature (1641)..(1641): n is a, c, g, or t
  misc_feature (1650)..(1650): n is a, c, g, or t
  misc_feature (1652)..(1652): n is a, c, g, or t
  misc_feature (1672)..(1672): n is a, c, g, or t
  misc_feature (1677)..(1677): n is a, c, g, or t
  misc_feature (1698)..(1698): n is a, c, g, or t
  misc_feature (1707)..(1707): n is a, c, g, or t
  misc_feature (1711)..(1711): n is a, c, g, or t
  misc_feature (1713)..(1713): n is a, c, g, or t
  misc_feature (1715)..(1715): n is a, c, g, or t
  misc_feature (1727)..(1727): n is a, c, g, or t
  misc_feature (1742)..(1742): n is a, c, g, or t
  misc_feature (1765)..(1765): n is a, c, g, or t
  misc_feature (1768)..(1768): n is a, c, g, or t
  misc_feature (1794)..(1794): n is a, c, g, or t
  misc_feature (1799)..(1799): n is a, c, g, or t
  misc_feature (1805)..(1805): n is a, c, g, or t
  misc_feature (1810)..(1810): n is a, c, g, or t
  misc_feature (1818)..(1818): n is a, c, g, or t
  misc_feature (1851)..(1851): n is a, c, g, or t
  misc_feature (1853)..(1853): n is a, c, g, or t
  misc_feature (1858)..(1858): n is a, c, g, or t
  misc_feature (1878)..(1878): n is a, c, g, or t
  misc_feature (1881)..(1881): n is a, c, g, or t
  misc_feature (1904)..(1904): n is a, c, g, or t
  misc_feature (1916)..(1916): n is a, c, g, or t
  misc_feature (1925)..(1925): n is a, c, g, or t
  misc_feature (1933)..(1933): n is a, c, g, or t
  misc_feature (1951)..(1951): n is a, c, g, or t
  misc_feature (1954)..(1954): n is a, c, g, or t
  misc_feature (1957)..(1957): n is a, c, g, or t
  misc_feature (1959)..(1959): n is a, c, g, or t
  misc_feature (1985)..(1985): n is a, c, g, or t
  misc_feature (2002)..(2002): n is a, c, g, or t
  misc_feature (2007)..(2007): n is a, c, g, or t
  misc_feature (2018)..(2018): n is a, c, g, or t
  misc_feature (2030)..(2030): n is a, c, g, or t
  misc_feature (2033)..(2033): n is a, c, g, or t
  misc_feature (2036)..(2036): n is a, c, g, or t
  misc_feature (2056)..(2056): n is a, c, g, or t
  misc_feature (2059)..(2059): n is a, c, g, or t
  misc_feature (2096)..(2096): n is a, c, g, or t
  misc_feature (2105)..(2105): n is a, c, g, or t
  misc_feature (2122)..(2122): n is a, c, g, or t
  misc_feature (2135)..(2135): n is a, c, g, or t
  misc_feature (2142)..(2142): n is a, c, g, or t
  misc_feature (2145)..(2145): n is a, c, g, or t
  misc_feature (2150)..(2150): n is a, c, g, or t
  misc_feature (2156)..(2156): n is a, c, g, or t
  misc_feature (2165)..(2165): n is a, c, g, or t
  misc_feature (2172)..(2172): n is a, c, g, or t
  misc_feature (2180)..(2180): n is a, c, g, or t
  misc_feature (2182)..(2182): n is a, c, g, or t
  misc_feature (2193)..(2193): n is a, c, g, or t
  Probeset Number=SeqID_11253
ntttttggggtttgnnncggtnnctttttnntncttctngcgccgnncgtacgtannanatctacacaccntactncccttcgtctgtcggcaacccnagagagcaccacaacaatncaacatatatattcntncaatagacatcgatgcgcgtcgccccctcnnatactatgatacgtgaggcaaangatncagctctccccccatcataactatcagcaaagcacncangagcatcncnctcacttactagtncacatagagagacgagagannacanacatactacagccatntctagtctcntactctattactagtcatcagtcctaccttctcctctngtaaagtctcgtatgggtgtatgatgcttctgntgctcacagcangctaagaccgactctcgcacggtcatagggncctcgtgctacagcccacgnangctccnacttagacatgactctacgngagagnggtagtagcagttagtcgtattctcgacgtcacggcgcgtatngatcgcctcgatacttgtatgatcgcgggcgccatgtgtnctatagtatcaatgaaggacgactaagagagggacgatctcagacgatctgtgcgcatcatctgcagcacgccgacagcngagacgcctcgtgtccttctgctcgtctaatagacacaagancnncgncgctccanaggctagtgacgcanacnactcaacgatccatngtttatgcgattctcgagtacgtcatgtctctcagacgacgaactgacttgagtcgcacagcgtagagnatctncacaccagcgctgatgctcagaatatgctgtgantgaanatgagtataatagatttattagtagtgctcgtgatataatcnatcagaggctgtacatancgtactatactcgacagaatgtcacactcagagcgcangctgtcgatgtgcacgtcagtcgtaacgatgtgatagtatatatatacatatcaatgagagtatatanantatantatatnaaaaannaanaatanatatatataaaaccaanananaggaagacaaacaaaccccacacaccactccacacaccccctcacgcacacactacacacaagatacgacgtctcgcatgnatgatgcgtatcagctgtgtnatatcgtctgtgatatgatactgttatcagtgatgtnatgatcggcgtaactacnnncnnctaannnnnnnnncnncaccacgcccacccctcttcagtcagcggcnaccgacggcgcaagcanatganctgtggntagtgaatatgtgatacagactcggccttgacngcacgtctgcatacatagtcnctnctgtacgatgtggtagacgcanacgtctacctactatggcanatactcgtgatctngcatgttgtgtttngtanctgcgcgatcatnctactccatcatcatcncgcgatcatagctgtctgatagncnagcaggctactctgcgactnatnctgacgcgtcagtatgatagagctatgtcgtanagtacacatgcgtcagatagtagagatgactacgtcacgatcagtacggacgcgcacgtgcgacatagtaggagantgcgcgcattcagactatcgatncgtagtgncgtcgacgntngatctgtctcgtagctagancgtgntgtatgctcacggcctcacgnctagtgaangtcncnantcgatgtaaagntggatggtgagcacntactgcgatacgaagacatacgntanaagttgacgtatcgagtcacgactcnaaggntcgtgncggcncgtctcgntggtgatcagaaggggatgagatgagtagtgantnatcanctacactcatgttcgatctncantatgagacatcatcaagctagantactttgatganagctcactnctgtctgntgactatgatcagtgcantancgnantagtacatatgcaacgactagtgtancgtgacagctactaatncaacntcgcaggtgancgacgcatcaantantancatgtatgaactatattganagnctactacagcatgaccctcggatcacatcgtcggtgnggctgatantggtgtgcacgtcatgnagtcgcctgatcnactgaantancatgnatgctnactgcaacntggtgangtagtttngncagctcgaccn

SEQ ID NO: 1475 - DNA, 890 bp, Glycine max
  Peptide Sequence Number=SeqID_7601
  Probeset Number=SeqID_11254
aataagcttatctacgttgttcgtctcttaattaatccaattttttaatcccgaaaactctttcaagaactggatactctggcggattctgagaccaagaaccgagacgtggttctgaagctgtatgacgccctgagatctcgcgacgtcgactccgttcaccggaccctaaccccggacctcgactactggttccacggccctccgccgcaccagtttttgatgcgcacgctcaccggcgtctctccgccgtttgaattctcgcctctctccgtcgtctccttcggatccaccgtcattgccgagggctgcgacgccgccagctccgtctcctggatccacgcctggaccgtgtcgcatggggtaatcactcaggtgagggagtactcgaacacctcgctcacggttacgcggatcggtagcgtcgtctccgggcgctctgcggagatcagggcgtcgcattgcccctccgtgtgggaaagcaaattctcgggtcgggctggaaaatccgtcccgggtctggttcttgcgatttgaggatttggtaaaggttattgctgcagccacgtcagattaataactaaataaaggctgttgcttacgtgtcggtgtgtggttggtttgttgttttatgggttgaaaggatttgtgcggttgagacgcggtgtgggctaacgcttaaaggtcgcgttttggtcgtcgcttttcttctcttgttttttttttttttttttattattagctttaagttcgtgcctttgtttggggttttagtgcgtacaagcatggggaaacccatattgacttgcgccgttgtgtctgatgtaacgtttggctatgttataataaagtgcttttgggatcttattatattaaaacgttgtttatat

SEQ ID NO: 1476 - DNA, 559 bp, Glycine max
  Peptide Sequence Number=SeqID_7602
  Probeset Number=SeqID_11255
atttttacctgaagttaaaaaccctagctaatagcgaattaaaaataaataaattttggtttgaaattaaacttgaacctttttaaccttatctaattatggtcatttgggctaaacaagaaaaaaaaacatttaaaaaaaggggaactttcatcagacttattcttattttagaaacccaaataaaattttcccgttttatttaccgggaccactatatatatagctcgcgacatacaagaatcatgatacaccagaccacttgtgttgtcacctgtgcctatcttatcttatttatataaaaaaaatcttaattttctatctctcatgtataatttgttataaagatgtgatgtgtaaataataacaaattaattaaaatagtgacagtgaaattcactaaaaacagtgaccgccgattctacgtatgatcgataaaattaaaaagtaactaattaacgagagcgtcgtaccaaacagaatgatataataaacaaaaaaaagagagacacagagagcgactaggttggacggcagagaagagaatatgctttattgg

SEQ ID NO: 1477 - DNA, 1395 bp, Glycine max
  misc_feature (22)..(24): n is a, c, g, or t
  misc_feature (189)..(189): n is a, c, g, or t
  misc_feature (368)..(368): n is a, c, g, or t
  misc_feature (919)..(919): n is a, c, g, or t
  misc_feature (981)..(981): n is a, c, g, or t
  misc_feature (1124)..(1124): n is a, c, g, or t
  misc_feature (1215)..(1215): n is a, c, g, or t
  misc_feature (1267)..(1268): n is a, c, g, or t
  misc_feature (1391)..(1391): n is a, c, g, or t
  misc_feature (1395)..(1395): n is a, c, g, or t
  Peptide Sequence Number=SeqID_7603
  Probeset Number=SeqID_11256
tcttctactactcctcgcgccnnncactcccagctggtcctacaaatataatatcgcgcgtgggtaagagggcagaaagggagagacggcccgcagggagccggccgcgcgagaccaacctactatgagaattagactcaggatgcccgccgagagacatgccaagaagatatcactccactattgtgnctcatatgctatctcagctcagcgacgctcacatctgctactcataatctcataacatcactcacaatgtggcgtctattatagcaccatagacgcgaatagtcctctccctacgaataggtgtatattttattgacgatttgccacgacgtgtccgcgatagccgatatactcttccncattaaactcaccgtgtgctcccgcgcgttatagtgacgcccgcccgggtatcttgtatagtccagtatcgaccttcgttaaagacctttagcacagccgcctcactcgaagtactacagataccttattcactttgtcctcttaccatttccctcattaccccttcatttccagtctttatctcacgcacagctccacgctatgagttttattctacaagagatcaacggcactatccttagagagacaagcgcgcaggtagccgtctgcttagaattgtatcgattgtgtcccaccatgcctctctcacactctcgtagagagaactcagaagttatcctagattgcagacacctcctctcgtcttcgcagctacctcatcatgtaggtgtgtgaggatcccactggtgagtgcacagccagacgtcttagtatcaagacgcatgttatgcgaagctgctggaagtctccgccccgcgcatgtacctacaatagtgtaagctaatcacttctatatgcacgcctgtcactcacgcgcacacaaacaggncactctacatagtacgactcttctgctattgtaagagtcgcatgtcgcagcggagggagacnctagagtgtgatgcgcgcagcaactagaatacagtaggcgctctgccgcatcatccacacacggtaccacctagcgagcgtgcttgtggaacatatcaccatctgattgtgaccgagctatgaattgatataataataataantacagatctgtacagatacttcacgctctctctcgcggctacaccacgtttttctactgtcctatgtcgacgagtgtgtgtgtcgtacgtnatatagagagatgtgagagagcatggagaatatggagacgcctacgccggcnntgtgactactctcgcgcactttgatgactactctctctcatgatacgaacatgcaccgtgacacgctacatctcattcacaatctgaccgagacgtaactctacgacgctgacgcacgatatnattn

SEQ ID NO: 1478 - DNA, 2494 bp, Glycine max
  misc_feature (2467)..(2494): n is a, c, g, or t
  Probeset Number=SeqID_11257
cccatctgtagtttgtggggctagaagtttctattactgggcattcagaagattgcaagaaaagttatcatctttatttccatattgaacagagaggttgatctaggtagagttgggtagcaatcctcgatctgtctttgggccaaattcggagggtgaatgctggataatatattatatttttgtgtttaaaaggttgatattcgaatatggaaatgttaggggggtggactcacactacagggcgatgctatgattacatgtttacactgtttaatgataaaactggcacactctggatgctatctgtgtcatgtctttccctctcgcaataaagtcactggtgttacgcgttaacatccactctattaagcaaatgtgctcctagtagtacaataaaaatataaaataaaataaaaataacaaatatttatataagttcttgcaagttccaagttccaagttcatgcacaaccgatcttttcctctgagaagacgtgggggttgctgaagcattttataagcctccactttcctgaactagttttaacatacaatctttcaagtacaccttcccagcttccatttaagaccagtcagctacgtaggcccccccccccgctgatgagctaatgataaccacaccaccccttcttccttttcatcaggtttattccttttcttttggttcaattttgctgaatggagagtgcaagaatcagcaaatggttaaatcttctagtttgtgtactgctattgcttaaggcagaaggatctcttgttccattgactttggtgaacgaatgcagaatcataaaggtaggctgtttgtttggattggaagccccccagcataccaactttgtacgaacggatttgaagaagggattaagaactggattgttcacattgagggtaggaggattgtgcaaacaatgtagagagttgctgttaccataaggatagtctgaatatgttcatctaagaaaatggatgatctttacttttctgcaattttaagcaacgaacaagagtataatccagatttctacaagtggtatagagtcaagatgaggtactgttatggattagagtttactagtgttgtggaagaagatgggcaaacaaccattgctcaattcagaggagctaggaattattgcagcagtattggaagaattcattaagcattgcgtttttggtaaaggctctaaaaatgctatactcaataaaatggtcaacttactatccttgactagaattattagtaagtagtataaagttcaatcatgttttctatgattggaacagaatcaaggattggtattgtgatgggtcagcatttactggtgatgttgaagctgttgatccgaaaaacaatttgcacttcagaggagcaaggggtttttgctgtgttcgttgagtatttattagcaaaagtaatgaaaaatgctcaaaatgcaattatttcccggctgtactactggaggattggcttctattctaacttgcgatcgcttcaaatcactactacctgcaacaactaaagtgaaatgccttgcagatgctaggtctttttatcaatgtactggacgtatctggatcacagcgcatttaacggcgatctacagtcaagtcgtccaaacacatggctcagcaaaagaatatgcctacatcctgcaattcaaaactcaaaccagcggctattctttttacgctcaaaatgttctaaaccaaatctgttcgcctaattctttgctcactatgcaaactgaaacacagggcagatcaggtatatgagtgactcagcagatcttgcctatacggctattgctaaggcaatgggagactgggttttataaatacgaagttctttccgtcacgtggattgctattataccttgcaacccttcttgtccagagagccgtttttttgatctaaaaggccacccttgaaatatagtttagatttgtctactatgcaccatgccaaacaacaatactaaaggcttgactgggtaatgaatatgaaaagaaggtttataaatcaatagcatagccaaagggtgaaaggcattcttatcacaggcgcttctgtgaggtgaattgtcaatcaccttggaaccttacttgctatattcgaatttttgataagaatgagtcgtccagacgtatagattcatttaaaagagtatgcttatttatttattactacaaactatactttattagttatctagtttttattgaacgagatgtgtcacttgcactcatggctttgtggtttgagatctcaaaccatcaaagtatgggttcgattgttgcatcaacaaaaaacaagctgtgattgatgatttaaaaggttccaaagtgtaagggtaggcaacctgataaaggatgataattgtctaccatgtaaacataacatttttattatcaataaagggtatatctgtaattctaatannnnnnnnnnnnnnnnnnnnnnnnnnnn

SEQ ID NO: 1479 - DNA, 655 bp, Glycine max
  Peptide Sequence Number=SeqID_7604
  Probeset Number=SeqID_11258
gagtttttaaaccgggggcgtttcccttcagttctccaaacttttttaacccagatcacccaagaagcttggccctgttcccagcacccttttggtaaatacatcccaaatcaaactccttccacctatatattatttttaacatgtaagccacagcccctccaaaacccttagaaaagattctccgggaacatactataccctcatctttctacaacataaaatgctatcctagggcaaccgttgatctgttacacatctacgcttcagtctgcgagttcttgcttcttgccccgaccactatagccaaagcggcatcggtgtcgccgtgcgtggcgcccaggggctggaggacgacgaatacggggccgaagagcaagagagaacgaaagggcctcatcggaatcgcaagaaagcaaaagtcaaagtccgaagggaaaggaagagtgggagaaggttccggcgagaattgacgacgagttttgcattgaaggaaaagggtggcggggttgcggtgccggcggagagcggtggtggtggcggttgatctcggaagggaaaggattgagtcaactcggagcgagttggggagcggtggtggtgtgtgggtggcctaaagagaaccagaatctcgtgggaagatgaacatgaatat

SEQ ID NO: 1480 - DNA, 1363 bp, Glycine max
  misc_feature (1)..(1): n is a, c, g, or t
  misc_feature (8)..(8): n is a, c, g, or t
  misc_feature (15)..(15): n is a, c, g, or t
  misc_feature (18)..(24): n is a, c, g, or t
  misc_feature (33)..(34): n is a, c, g, or t
  misc_feature (41)..(44): n is a, c, g, or t
  misc_feature (47)..(47): n is a, c, g, or t
  misc_feature (54)..(54): n is a, c, g, or t
  misc_feature (60)..(61): n is a, c, g, or t
  misc_feature (68)..(68): n is a, c, g, or t
  misc_feature (74)..(74): n is a, c, g, or t
  misc_feature (288)..(288): n is a, c, g, or t
  misc_feature (367)..(367): n is a, c, g, or t
  misc_feature (421)..(421): n is a, c, g, or t
  misc_feature (788)..(788): n is a, c, g, or t
  misc_feature (1017)..(1017): n is a, c, g, or t
  misc_feature (1111)..(1111): n is a, c, g, or t
  misc_feature (1235)..(1235): n is a, c, g, or t
  Probeset Number=SeqID_11259
nggttttngggggtnttnnnnnnntttgtgtgnngtgaatnnnnttngggtttngtggtnncatttanttttgntgttttgcgagagacctgacatgactccggcgcgacagaccgggccgggcgcagactcataagaaatctacgatgtgctcccctctcgcgcgcttgacacggcacattactgtgcacagcagaacgagcatgagcagactacacataagataccaccgctccgcccctcacctacaccttagttatttatgataataaattttcgctatgtggnattcttatttaatccttactgtgtttttgttctagacgaagtccataaaaatattgtgttatgctaagcgagcgggcanaggaagcgcgcgcgaatcttcgcccgccgcccccccaagcgccactgtaatcgnccgcttgtatttcatcacaaataatgggtgaaagtatttactatcattacacaaagatgaaccaccaacagtttattgcaccacaacaaacgcaccaccccactagcacacaccacacgaacacaaccgccgaactgaatttactccgttccgtatccacgcatttctctctcgcaatctcatagataacagaacgatacacacaacaatacatatatcaacctccgctacgtccgcctccctctccccggcgcggcacttcgaaaatacaactatataatacccaaccgcgaccctcgccccactgctcactaacacaacctcacagcaatcgactttattatttctttacacccaacacccactnccacgcctgtctttcagtcataattatacatcgcttatccttctcgccttgctactctttgacctcgcaactaaaatcgagtgtgtgaccttccccgtcgccagtaaacgcaaaacaaacatcacacttgcgattaccttgatcaataatatattctggcatctttaatatactatcgctccgtgtctctctctgttcgtctatcttctctcatgctctcatcttctcntctcctcgacatgccgcccacaccgcgctccacactcccttcatctacacactgccatccgcactctcaccgtctccacttcatctcatctcantcccacctccaactccgcgctcaacaatcaaccatcacatcgctcccacaccttctcctcacctgcctctctcactctcaatctctccatcctctccaccacctcgctcattctctccaacctncgctccacgcagcatctacattctatacacttacccatagtacgcgctcgtcctctcacacaagactattactcatatacaatatagtcctcccgacacacacatcactcaactcatacgccgtcaag

SEQ ID NO: 1481 - DNA, 488 bp, Glycine max
  Peptide Sequence Number=SeqID_7605
  Probeset Number=SeqID_11260
ctgaatgtgccatcaaacgacagccacccctctcttccatctcccctgttgcttcccgacggcggcggcgctttagatccggtggcaagcgcctcccttccccttcccagctactcttactcaaggccacctgactcctcctggccgccgtcacggcggtgaaccccggggccctgctcctgtaggcgcctaggaggcgtggcattccctgtgcccgcctccggcgcatctacagcgagaatgagctcgtgctgtctgcgcccaagctgcaaggctgatgctaatctgaagccatctttgatgctaatttggagccattttctttgccgctatgcacagtccagagctggagccatgccctttagtttgtagttcgttaatctgtcagtattgagattacattgattttgaagcgtgttaaggatgcattgttagtactattttgaataatggatttacagaatttgtgacattccactcctcagttt

SEQ ID NO: 1482 - DNA, 1814 bp, Glycine max
  misc_feature (579)..(579): n is a, c, g, or t
  misc_feature (687)..(687): n is a, c, g, or t
  misc_feature (1134)..(1134): n is a, c, g, or t
  misc_feature (1164)..(1164): n is a, c, g, or t
  misc_feature (1275)..(1275): n is a, c, g, or t
  misc_feature (1302)..(1302): n is a, c, g, or t
  misc_feature (1572)..(1572): n is a, c, g, or t
  misc_feature (1629)..(1629): n is a, c, g, or t
  misc_feature (1726)..(1726): n is a, c, g, or t
  misc_feature (1772)..(1772): n is a, c, g, or t
  Probeset Number=SeqID_11261
aagactccagcgaccaaccggcggtcgctacgttctaaccgtctgatcaccattaaggtgccgacccgcgaaccccgatcgccgtctctttcttgcgcttgctctgttgtcgtacgccccttcgctatcgtatcgcgataacacgaatatatagtataattttagtccggccgcgcgccgtgcgagatgtgatgtgttgcatacattactggtttttatgcgtcgctctcgcgcacaccacacagataacaacactcgtgtgcaacaccccaagagcgttgtcgtcacaccggattgcccgcgccaccgacatcttgttaacgcggcatcctctccatttatgtgatgtagttgccacccgaccgcagtccgcgttcatgtactaccttcatcaatatacttaaaataatattggcgagctataagcgccgccttataatttctctatattaatcgccgcaccccctcaatgcccctgcaccgcgttattgtctcgaacggcggcgacggaataacaaagacccacgctgctgttctgcgcgcatcctccacctcctacccacgaccaacgacacgcgnaaaggtgtttatatataccaacgtctcgcgtgggtggttatatatgatctcatcgcgcgaactcatctcctgaccgtgtgtggatagataaaaatagtaacatatatnattatctaatacacgaaatagcttgctggctgccgaataaccgcctatctatacttatgttggtgatcacccacgcttgttgtatgtatactgcgcgcacgcatgattgtatgataatgggtgaccgacgcgcgcgattacaatacgcatccctccgcgcgcgcgtgcaatgtagataatacgatggggcggtgaatatgtgactatcacaacatgtgtgtctacactgagacaatgaatcggtgtcgcacaatataaatcgacacgaatacagtgctgtgtcgttgtggcgacgttagcactataccgtgtcaatatatgatggctgcgttcagctcctcccgacgtgctatttagtcagtggcaacaagaagcgtcgtatgttgattgtatgagacatacatctgtttatgtctaaccaaacacggcctgatctcatcgaatacngactgctcgcgcttatgatgatcatagatnagaacaaatagatatgacatcgtgctaaacagacgcacaatgatattaggatagaggtacgacaatacatgtgtcacgtcgcggctccgacgtacaaaatacgtgcgctgnctcgtgcgtgcgtcgtcgtccgacgtnactctcgagataaaaatacatacgcgacggcggcgcacataaatatcgctcgcgggcgcgtcgtgagcacacaatggcgagtgaatacgacgctgctcaccgtcgcgcggccggacgctagtaattgatatacaaatatagtataggtgggctcaaaaaaattaggctcggtcggcgcgtcgctctgctatctgcgcctagaacaataatatacgctgcgctggctgtgcgcgcggaggatatgtgataaatcacacgctcacgtacacnggcggacgtggtagctagctacagtcccatcgatatatatcgatcactagaggttgnatactacgatgcggcggcgccagcgctgcgcgcatctaattacagtgaagtaatgaagcgcggcgcgcgacacgtcgcgatccatagatacgcgaantgtgcgtagcgactccacatcagccgtctcgcgtcgacgacataantactacccacgacgtcattttgtggtccacatgaatgctacg

SEQ ID NO: 1483 - DNA, 380 bp, Glycine max
  misc_feature (341)..(345): n is a, c, g, or t
  Peptide Sequence Number=SeqID_7606
  Probeset Number=SeqID_11262
cattggtcaatactttaaaatgaactattcagtgtcaaaattatatgtgtctttggactgtacatatggtgtgcagcagcagatccagcagatccaggggtttttaagtccaaaaagtatcttaaaatcccagacagtaaaaagcttgctgaactaaagaattctaaactaggaggggaatcaacttcgtcgatgcatgatggaaatgcttcaactgttgttcaagtaacgaatcttctgaacaacaagcaagtgaagatggcatgttctattgcagtttgtgtgaagttgaggtgagcagaagttctattttacaagtgctcatcttgaaatgcatatannnnnagcattacaacaatgcttggagttttcattctgtc

SEQ ID NO: 1484 - DNA, 1950 bp, Glycine max
  misc_feature (1)..(1): n is a, c, g, or t
  misc_feature (34)..(34): n is a, c, g, or t
  misc_feature (364)..(364): n is a, c, g, or t
  misc_feature (510)..(510): n is a, c, g, or t
  misc_feature (1061)..(1061): n is a, c, g, or t
  misc_feature (1136)..(1136): n is a, c, g, or t
  misc_feature (1151)..(1151): n is a, c, g, or t
  misc_feature (1380)..(1380): n is a, c, g, or t
  misc_feature (1431)..(1431): n is a, c, g, or t
  misc_feature (1603)..(1603): n is a, c, g, or t
  misc_feature (1614)..(1614): n is a, c, g, or t
  misc_feature (1786)..(1786): n is a, c, g, or t
  misc_feature (1819)..(1820): n is a, c, g, or t
  misc_feature (1823)..(1823): n is a, c, g, or t
  misc_feature (1829)..(1829): n is a, c, g, or t
  misc_feature (1844)..(1844): n is a, c, g, or t
  misc_feature (1870)..(1870): n is a, c, g, or t
  misc_feature (1950)..(1950): n is a, c, g, or t
  Peptide Sequence Number=SeqID_7607
  Probeset Number=SeqID_11263
ncccctctgcgcgctgtgtgggctcgttctcctnacatccgacccgctggcttctgtctacgttaaacagtatgtgcgggagttgtaggagggcgcggtggcggccccccccctgccgcgtcgaaggtacaggggtataggggccggcccctccccctcctcttcgaggaaggtgataagtagagtatggagagtgatgtgatatccggctctacacttgcttggtacgagttctccagtgagaggcccgcagtacgcgctccctacatcgccccactccacatcaacatctagaaacctctcctatagctatgttagtatgctgctcggcagtgccccactgttccatatctcccgtcacatngcggcgcgccgcgcacgccctacaagccacctgggacaaactcggccgcaggaccgtatctacttggaatgacattggcggctctatgtagttgttgatcctcacgtgggcacgtacacccacgcgaaagatgagagaagcgctcncagttcttgctatactctggagtgaattcgatatatagtgaacaatgcgtcacgcggcaggacggccacgtaacataggtcgccgtcttcgcgcgattcctagcaatcagagcaccctccccctgtctcccatgtgttagtcacagcggtatactgtacatactacggtaacaaagattaacaacaaaacactcataacgtaaactatcaacgcggtcgcccgctctacgcacagtacgctatgtggcgtagcacgaactattctctctcttgatcaatgttgcgcgcgttatgacatactgcgagacagattatgaggtgcagtgttgagtgaggtctgagaatatctccactcggatcgcgatcggtctactcctctgacgggtaatgtgccccggctggatacctctcgccataagcatgacgctagtttagagagatcgcaaggcaccggcgcactcgcacttgttgaactcgctatcactagtcttgtataccagagaaatcattggcgtcctcggtacggtgcgtctgtagacgctaagtagaantgggcctctctgccgcctcgtgattattaatctatacgagcaaagtgcgtagtacgtactcagtctcgcgatcangacgtacgcgatgcntgcacccaagctgcgtgcgcataatggatacgtgtcgcgaaatcatatgaccgtgccatgacaataacgccatggcaatgaggaagaaactcactacacgggctctaggtgtatatatgcggatcatccggtcaagagctctgtctcagcgacttcgctgtgtaccagggagtcatcatgtgacagatactctcacgatcgagacgctgattctacgagcgcaaccgtnattcagaactcacacaacgtacataccgaagcgtcccgtgtgccagacgcngaacgcagagatattaacatacactccagacctgtgtcacaatagtctcggctgcgcatcgccgctctactctacttctgaccgacgcgtgtaagcgcgcgcgtgtgtcatgtgtcgactgcgacggctcgctgtcgtcgttggatggctatagtctggtgcgtcgctctantgcagagtagntatatgcgtgactactctgagtctgcatgtctttaaccggttgcgcacgagtgtgcgacgcgacgacacgcgcgagagagcgtctgtttatgatacgctgctgccactactcgctcctatacatatactctttgccatatgacgcatgtcctacgtgacctgcgaattacgncataaccgaccgccacgcatgaggaggtctccnngtntgtgtncggcgcgctatgatnacgagatttcgacgcgtagaggaatnacaggcgtatgattctcagttgcacgatactgccggaagagcccgttgatccttatgagtcttacgcctgacgctatatn

SEQ ID NO: 1485 - DNA, 927 bp, Glycine max
  misc_feature (202)..(202): n is a, c, g, or t
  misc_feature (385)..(385): n is a, c, g, or t
  misc_feature (458)..(458): n is a, c, g, or t
  misc_feature (523)..(523): n is a, c, g, or t
  misc_feature (645)..(645): n is a, c, g, or t
  misc_feature (707)..(709): n is a, c, g, or t
  misc_feature (711)..(711): n is a, c, g, or t
  misc_feature (819)..(820): n is a, c, g, or t
  misc_feature (826)..(826): n is a, c, g, or t
  misc_feature (833)..(833): n is a, c, g, or t
  misc_feature (839)..(839): n is a, c, g, or t
  misc_feature (846)..(847): n is a, c, g, or t
  misc_feature (849)..(858): n is a, c, g, or t
  misc_feature (890)..(890): n is a, c, g, or t
  misc_feature (892)..(902): n is a, c, g, or t
  misc_feature (904)..(905): n is a, c, g, or t
  misc_feature (909)..(909): n is a, c, g, or t
  misc_feature (921)..(921): n is a, c, g, or t
  Probeset Number=SeqID_11264
tctgaagagcatgtacaatgctgagaaaaggggaaagcgccaagtcatgattaggccatcctccaaagtcattatcaaattccttttggtgatgcaaaagcacggatacatcggagagtttgagtatgttgatgaccacagggctggtaaaatcgtggttgaattgaacggtagactgaacaagtgtggggttattagtccncgttttgatgtgggcgtcaaagagattgaaggttggactgctaggcttctcccctcaagacagtttgggtatattgtattgactacctctgctggcatcatggatcatgaagaggctaggaggaaaaatgttggtgggaggtattgggccttctctactagtttaattttatcaggatgtcangatttcattttgagattatcgggtgtatggaagaatatgctagcccctagtagtatcaatatagcagacctgntttggagttcttatttggttgcaaacccagttgtaactatactttctttttctttaaaaaaaaanaaaaaaaaactgagggggccggacccatttcgcctatgtagcgattcgcccctaatggcgcgttacacgctgactgaaaccctgctaccactatcgctgagacatcccttcgcactgctaanacaagccgacgacgcttcccacgtgcaacttaaatgatgacccttgacgcatataagcgggnnngngggggtcaacaactagctacccctcttcttttctttttcccggccgttccagcttaaggggctctagtcaagtcgcctacaaacaatagggagtaggcccccgagtgnncttgcngcatttngatcanacaacannannnnnnnnnntcttttgtagtctcctgaaggcaacatctaanannnnnnnnnnngnngcgnccctttttttancgtcga

SEQ ID NO: 1486 - DNA, 524 bp, Glycine max
  Peptide Sequence Number=SeqID_7680
  Probeset Number=SeqID_11265
aactcattctcgaaaagtttccataaaaagaaagtttcccacaatgtcatcacttctctatatctccctcctcttagccgtctttatcagccacaccacggaagccgctctcgaaccagtaaccgacatcgacggtggacgtctcacatcaggcaccaaatactacatcttgcctgtgctccgcggtcgcggcggcggactaaccatgtccaaacccgaaaacaaaacatgtcctaaaagcgttatccaagaccaatacgaagtctccaaaggcctaccgttggagttctcaccatcagacaattcaagaatcatccgcgtctcaaccgatctcaacttcaagttctgtgcggcttcggtctggaacttagacaactacgatgagatgacgaatcagtggttcgttacagcttgtggcgttgcagggaatcctggtcaggcaacggttgataactggttcaagatcgagaagtaccaagatgattacaagatcgtgttttgtccaactgtctgcaacttctgtg

SEQ ID NO: 1487 - DNA, 968 bp, Glycine max
  misc_feature (1)..(265): n is a, c, g, or t
  misc_feature (269)..(269): n is a, c, g, or t
  misc_feature (272)..(273): n is a, c, g, or t
  misc_feature (275)..(275): n is a, c, g, or t
  misc_feature (277)..(277): n is a, c, g, or t
  misc_feature (279)..(279): n is a, c, g, or t
  misc_feature (288)..(288): n is a, c, g, or t
  misc_feature (292)..(292): n is a, c, g, or t
  misc_feature (299)..(299): n is a, c, g, or t
  misc_feature (301)..(301): n is a, c, g, or t
  misc_feature (303)..(303): n is a, c, g, or t
  misc_feature (305)..(305): n is a, c, g, or t
  misc_feature (311)..(311): n is a, c, g, or t
  misc_feature (314)..(314): n is a, c, g, or t
  misc_feature (316)..(316): n is a, c, g, or t
  misc_feature (318)..(319): n is a, c, g, or t
  misc_feature (323)..(323): n is a, c, g, or t
  misc_feature (326)..(326): n is a, c, g, or t
  misc_feature (330)..(330): n is a, c, g, or t
  misc_feature (332)..(333): n is a, c, g, or t
  misc_feature (336)..(337): n is a, c, g, or t
  misc_feature (340)..(340): n is a, c, g, or t
  misc_feature (342)..(342): n is a, c, g, or t
  misc_feature (346)..(346): n is a, c, g, or t
  misc_feature (350)..(350): n is a, c, g, or t
  misc_feature (352)..(353): n is a, c, g, or t
  misc_feature (356)..(356): n is a, c, g, or t
  misc_feature (361)..(363): n is a, c, g, or t
  misc_feature (365)..(365): n is a, c, g, or t
  misc_feature (368)..(369): n is a, c, g, or t
  misc_feature (372)..(372): n is a, c, g, or t
  misc_feature (374)..(375): n is a, c, g, or t
  misc_feature (377)..(378): n is a, c, g, or t
  misc_feature (384)..(384): n is a, c, g, or t
  misc_feature (386)..(386): n is a, c, g, or t
  misc_feature (388)..(389): n is a, c, g, or t
  misc_feature (391)..(394): n is a, c, g, or t
  misc_feature (396)..(396): n is a, c, g, or t
  misc_feature (401)..(401): n is a, c, g, or t
  misc_feature (403)..(403): n is a, c, g, or t
  misc_feature (406)..(406): n is a, c, g, or t
  misc_feature (410)..(410): n is a, c, g, or t
  misc_feature (424)..(425): n is a, c, g, or t
  misc_feature (427)..(427): n is a, c, g, or t
  misc_feature (430)..(430): n is a, c, g, or t
  misc_feature (433)..(433): n is a, c, g, or t
  misc_feature (435)..(435): n is a, c, g, or t
  misc_feature (445)..(445): n is a, c, g, or t
  misc_feature (451)..(451): n is a, c, g, or t
  misc_feature (453)..(455): n is a, c, g, or t
  misc_feature (457)..(458): n is a, c, g, or t
  misc_feature (460)..(461): n is a, c, g, or t
  misc_feature (468)..(468): n is a, c, g, or t
  misc_feature (472)..(472): n is a, c, g, or t
  misc_feature (485)..(485): n is a, c, g, or t
  misc_feature (498)..(498): n is a, c, g, or t
  misc_feature (502)..(502): n is a, c, g, or t
  misc_feature (514)..(514): n is a, c, g, or t
  misc_feature (520)..(520): n is a, c, g, or t
  misc_feature (530)..(530): n is a, c, g, or t
  misc_feature (537)..(537): n is a, c, g, or t
  misc_feature (564)..(565): n is a, c, g, or t
  misc_feature (589)..(589): n is a, c, g, or t
  misc_feature (622)..(622): n is a, c, g, or t
  misc_feature (626)..(626): n is a, c, g, or t
  misc_feature (654)..(654): n is a, c, g, or t
  misc_feature (668)..(668): n is a, c, g, or t
  misc_feature (695)..(695): n is a, c, g, or t
  misc_feature (743)..(743): n is a, c, g, or t
  misc_feature (857)..(857): n is a, c, g, or t
  misc_feature (866)..(968): n is a, c, g, or t
  Peptide Sequence Number=SeqID_7681
  Probeset Number=SeqID_11266
nnnnnnnnnnnnnnnnnnnnnnnnnnnnnnnnnnnnnnnnnnnnnnnnnnnnnnnnnnnnnnnnnnnnnnnnnnnnnnnnnnnnnnnnnnnnnnnnnnnnnnnnnnnnnnnnnnnnnnnnnnnnnnnnnnnnnnnnnnnnnnnnnnnnnnnnnnnnnnnnnnnnnnnnnnnnnnnnnnnnnnnnnnnnnnnnnnnnnnnnnnnnnnnnnnnnnnnnnnnnnnnnnnnnnnnnnnnnnnnnnnnnnnnnnnnnnnnnnnnnnnnnnaccnatnntnanancaacccaangaangagcgtngnangncagcgncanangnnccantgnatancnncanngananaggnggcnannggngcccnnncnaanngangnnanntcttcngncnnannnntncactncnganatanttcaaaccacgaannantcnatncnattaaacacngcaccngnnntnngnngacaaantccnatcttttccatcntcaagaattctcnttgnttgggctaaacntcacanttatcctttncttgaanttttccaattctttcttgaactttccnnaactttcattctttcaatttgtcntgagcttcatctttcgatctcgacttgaacttnaacntgatcttgttgatgttgttcctgaactnaacatcaatgattntggattcttcttgtcttgaagtttttntgaggcaactttcgttcttcatatctttgtagagcaaaaacttgtttntgacttcatatggttcttctagatctttagcttggggtatctgatattaaatatttcatcagcatcttgacatttaagatttgatttttgataggggggggcctacgtagctancgagggggnnnnnnnnnnnnnnnnnnnnnnnnnnnnnnnnnnnnnnnnnnnnnnnnnnnnnnnnnnnnnnnnnnnnnnnnnnnnnnnnnnnnnnnnnnnnnnnnnnnnnnn

SEQ ID NO: 1488 - DNA, 1512 bp, Glycine max
  misc_feature (91)..(91): n is a, c, g, or t
  misc_feature (189)..(189): n is a, c, g, or t
  misc_feature (342)..(342): n is a, c, g, or t
  misc_feature (366)..(366): n is a, c, g, or t
  misc_feature (438)..(438): n is a, c, g, or t
  misc_feature (445)..(445): n is a, c, g, or t
  misc_feature (447)..(447): n is a, c, g, or t
  misc_feature (878)..(879): n is a, c, g, or t
  misc_feature (1129)..(1129): n is a, c, g, or t
  misc_feature (1474)..(1474): n is a, c, g, or t
  Probeset Number=SeqID_11267
ttgcgtctgctgctgtgtcgcgttgtgtaacacacaccaacaacacacaacaacggcattacacctctcgtgttgaattactaattattcnccgccgcccgcggtctcgtcggaattaggagagaataagagagacaaagtaagaataggatgagcaatatgatttgtaaatatatctatcatctcctnaatgagtataattatttgtaattgtatatgttagtgagatgtatgtagagagagttagtgatactatagaatatcatctaacactcgtactcggtcggttgtctataatactctgttacccatcccaccgatgtaattccaccacaaaccgancaggcggacagacgacccaagaangagtgatggaaagtagtgatagataaaatggacgttacacaacaattaacgtcgtctgctttttcaccaacnaaacagngnacccgattgaatgatgacgatacgacaacgctgtgtggttgtgatgaggatggatatgtaataatatatatatatcacaaacaatacaacctctatctgtcatcaatctgtttgtgtatgaaaattagagaagaagaaggatacacggatgaggcaggtgtgtgtgaaggtgagaggggtgggatgtgtggtacttatgtctcgatatacatgtcagtattttatacaataaccaataaagactgaacgtcgcctggactggtctgactgagaaggtatagatgtagagagaacgtcgaccccacgccacgcgggtgcttggtcgccggtacgcgtcctatgtacttaattattaaggatattgtcatgtgctggcgagagtcgtagcgcagcacggtgatctactctacgtactgtgttacgcgatactnntcgacgtcgctgctgtgtggagtgctgagccatcgctgcgcgtgctgcctgcgttgttagtggctgttctgtttgttgcggcggcgcttagtcttgagttgcgataatctcacacatagataaaagaatgattgatattactataagtgattaagtgatgactcttgtattagtgattggcggtgcgcgcactgcgcacgacgggtggtcgcggcgcgggcggcgcccgcggtcgtcttggagtggatgntcgtgcgatggtggatcaaccaacgcgtgaccatgccccacacataccgtgctcatcgtacacatcatgcggattgatgtataataatatattatgatatgtagatagaatataatattatgttgtgttggtgcgttgccgctcttacttggcgtggtgttgtgatttagtattatgagtgtggtgactacgagtgtgagttgtggtccacgtcgtatactcagacgagcaggtacatacacgcttctatggtgcatagcgagagtctatctatgtaacaattttgatatctaatctaatacacactgcaagaggcaatgagagacgcgatatatacgtaggtgnagacgaaatgtaccgatagcccatgacgatgcgaacaa

SEQ ID NO: 1489 - DNA, 2016 bp, Glycine max
  misc_feature (564)..(564): n is a, c, g, or t
  misc_feature (593)..(593): n is a, c, g, or t
  misc_feature (760)..(760): n is a, c, g, or t
  misc_feature (1170)..(1170): n is a, c, g, or t
  misc_feature (1220)..(1220): n is a, c, g, or t
  misc_feature (1245)..(1245): n is a, c, g, or t
  misc_feature (1338)..(1338): n is a, c, g, or t
  misc_feature (1344)..(1344): n is a, c, g, or t
  misc_feature (1383)..(1383): n is a, c, g, or t
  misc_feature (1433)..(1433): n is a, c, g, or t
  misc_feature (1470)..(1470): n is a, c, g, or t
  misc_feature (1530)..(1530): n is a, c, g, or t
  misc_feature (1584)..(1584): n is a, c, g, or t
  misc_feature (1695)..(1695): n is a, c, g, or t
  misc_feature (1703)..(1703): n is a, c, g, or t
  misc_feature (1721)..(1721): n is a, c, g, or t
  misc_feature (1814)..(1814): n is a, c, g, or t
  misc_feature (1834)..(1834): n is a, c, g, or t
  misc_feature (1837)..(1837): n is a, c, g, or t
  misc_feature (2016)..(2016): n is a, c, g, or t
  Peptide Sequence Number=SeqID_7682
  Probeset Number=SeqID_11268
gtgttttttgttctttcctttttttttggttactcatgtattctgctgagggtgaggggaaaaaaccaaaattggcggataattggatggaccccccccatagcaggggaagcagcggggaagtcagaagaatgagcgcaatacatatgatcatactctatctatagatactccgctgtgtgctggagggcggtgtccgcccggctcgctgctcgcgggctcgcacgcgcttgatgcttcaattgagaagcgtaacatattcgcatctcgtcaccgcggttcaccggaatagttaggacctgcaggcagagcctcatacacccgtgttttcccgttttattctctgataatatatcctatctccactgtgaccccctccgtatggtatgcttcttgagcgcgcgctatgtgtcggtatatgtctgtcgtacacatcttattcagcgcgcggcgcgtcttttattacgttgttactatacgagacatgccgatgttacttcttattcgctgcttcgctgcgctatgcttttcgtcttgtgtgacacggtgccgccggaccctcgnaccgcatgaccatagttctcaatatgatnacaatactcagacataaaacagcgtgcgagacgtacgtatacgatcaaagaggaaaaagcaattgacggtataggcaccagcacagactagtaggcacatgaagagacgacatctacgtgaagaagttagaatagcacgtgtcagtgcgatatgagtcactacgctntcgccttggctgaccgacaagtggatctgatatcgggagactacacacagtgcgatatactgactcatattatattatgactcaccgtatacgcacacatgcaatcgacgtgctgagtccaactatgctgtcctagatactcgcgctttctcacttatcttttatgcgttcgtctcgatgatagtactgactgatgattgtcacggacgcctctagtagtgactgtaatgacgcgcgatagtgtgatcgagcttgccggggtagatgttgtcttagtcgaacatgatggtgtacactcaagtatatatgatactatataatacgtcgcatagattcactcacacgtagtttcgtcatcaggagatatgtacatctatggtagtatccgacgcgccgagattacatagatnttagtattacggctacgtgcgtcgcgcggaatacatgtgctgcacggatngtgtatatcgcccgcgcacccgccntagacacatgtattgacgtagatcgtgcgtctgatactggatggtgcgtgatgcatgtctaatgatacatctacgtgtgagatagatatgcanacatanagtatccgatgattctgaagtatcgatctatatacactntaatatacacacgccatatctttatacattacgtccgcgcgaatgatgcntcgtctgtactctcgttatgtgcatcgctcgtctcgntgacatccatagacggatgatgtcgcgtatgtcgtcgatacatacggactatgctatcantttgtcgagcacttgtaggtaactatgtcccgacgctcgttgcgtcgatactanctgatatgcgcagacaagtcactgacgaccctacgaaacgcatgtggtagtcgtgagactgtgctatgatcaccacgatatactacatcatcatgactgtacactcatacngctgtgangtgatactgaaccgcgtnatgagcgagttggactgctagacatcatgcgctgtatgatgctacgtcatgagtacgaatcaatcagacctcacatgacaagtagcatcagtnaataccctactacactacanttntcaacatgaatgacgcgacataaatgggttggacggcgactgactataagaccggatgataaaatcacccggcagctagggggcaaatgacggcatgatggtctgcgtgccacccgcggttgtcgtacggtcggtggcgacctgcactgtctagagcctcaccatcatcatgccttccn

SEQ ID NO: 1490 - DNA, 448 bp, Glycine max
  Probeset Number=SeqID_11269
ctcatttggagatcacgacaacggatcgaccaactggggagctgggagaaccatcaaacaccctgtctaaatggccaacttcgcatatgactggctagtcattgcagggaagcttctggagcgaacttacgtgcagtatgttattgcgagctactacgatggctacaaggatgctggcgttgatgccgctgaggctacagatggacctgaatgaccatatcactctgatagagaggactagcctgagccatcaccagagggtcgtttgcccgatgccactaatggttatgaccataagagagatggtgtttgcaaagctatggggcttacatgccaagatatcggtgctctatctgggggcacactattggagctgccacaaaggagcgtctggatttgaggtccctggacctctatcctcttatttcgacactcatacttaacggag

SEQ ID NO: 1491 - DNA, 222 bp, Glycine max
  misc_feature (90)..(112): n is a, c, g, or t
  Peptide Sequence Number=SeqID_7683
  Probeset Number=SeqID_11270
tagcatacgtgtggttcattaataatagagccctttagcccagctcctttgagtaagtattctgaggttctaagtaccaaccaagaatcnnnnnnnnnnnnnnnnnnnnnnnaagtatgtcagggacggatatcagtggagaaaatacggtcagaaagtcactagagataacccttctcatagggcttacttctagtgttcatatgcccctatctgtccagt

SEQ ID NO: 1492 - DNA, 672 bp, Glycine max
  misc_feature (302)..(302): n is a, c, g, or t
  misc_feature (326)..(326): n is a, c, g, or t
  Peptide Sequence Number=SeqID_7684
  Probeset Number=SeqID_11271
gagagagagaactagtctcgagtttttgttatctatcgggcttatgggggcgagaatgcaaggtcaacttggttttggtggcagtggcggcagtaagggtgcacgtggaatattcaacataggaaaagcccatactaaagtagacaaaaatgccaaaaacaaggtctattttaaagatgttgctggttgtgatgaggcgaagcaagaaattatggagtttgtccacttcctcaagaacccaaagaaatatgaagaactcggtgcaaagattcccaaaggtgctctcttggccggtcctccangcacaggaaaaacccttttagcanaagctacagcaggggagtctggtgtaccctttctttgtttatctggttctgatttcatggaaatgtttgttggtgttggaccatctagggtgagaaacttgtttcaggaagcaagacagtgttcacctagtatcatatttattgatgagattgatgcatttggtcgatcaaagtggccgtgtggtttttcttgatgcaaatgatgtacgtagacagcctttctaatacctgtttgtggtgatggaggtcttgagtaatacctttgagtttaatatatggattcagctgtgcgtcagattgatgtctctgtgttagtatgtttgcattattgtacttgatttatctt

SEQ ID NO: 1493 - DNA, 1064 bp, Glycine max
  misc_feature (1064)..(1064): n is a, c, g, or t
  Peptide Sequence Number=SeqID_7685
  Probeset Number=SeqID_11272
tcctcacgcgtccgcccacgcgtgcccacgcgtccggttattcttcgtgtcttgttgtgtttttcatctgagatgtgtggaggagctatcatctctgatttcattccggcggcggcgatcgccgggtctcgccgcctgaccgccgattacctgtggccggatttgaagaagcggaagtctgacttggacgttgacttcgaggctgatttcagggattttaaagacgattctgatatcgacgacgacgacgacgatcaccaagtcaagccctttgctttcgccgcctcttctcgtcgtaacttttctctctcatttctttcttatgcaaaattatcactctttactctctttttgattttggaacattaaaaaaaaaaattcatgctatggaagtcaattttatttatcaccatgtgctttgattttcgtttacggagttgatcactgggatttcccccctcttagatctgcaataaactcttttactcggtatcagttcagatcaagggcgtaattcatttgattatgctcctatgaaaactgccatgctttttgtttttttggattgtgaatctcattttgtgcaaaatgccaaccagcagcagcctaactttcagaatgtggtatctattgaagatgattctgcaaagacactctttgaggagcttgtggatattgaatttgagttgaagttctttcagatgccttatcttgaagggagctggggcgatacttcattggaatccttgctatctggtgacacaactcaggatggtggaaacctcatgaacctttggtgctttgatgacattccttccatggctggtggagttttttgaaccgctttttctttggtctccctgtgggtaaataaagctacaagttgtttttctctgtttttgctttttgttgcatttgttgttctcttgttggacacatccccccatgtgtttgaaaaaaaaaatgtaatttccatttttgttgctttctggaatggttgtcatccgtgttgaagatggagttaaaacaattaactcgctcaaaaaaaaaaaaaaaaaaacacn

SEQ ID NO: 1494 - DNA, 1348 bp, Glycine max
  misc_feature (1)..(1): n is a, c, g, or t
  misc_feature (153)..(153): n is a, c, g, or t
  misc_feature (274)..(274): n is a, c, g, or t
  misc_feature (396)..(396): n is a, c, g, or t
  misc_feature (681)..(681): n is a, c, g, or t
  misc_feature (1332)..(1332): n is a, c, g, or t
  Peptide Sequence Number=SeqID_7686
  Probeset Number=SeqID_11273
ncgtgcatcggtgtctgcagctccgcagatactcgtgtcgtgatagataccgccatctgtcacctgactgccgagcgagtcgatctcgtctcgcggtgcctgcgaagacacgacagcacccacgcgacgacgtaggtacacagtccccacacnctactacggccacaaaacaagcaagtcacaaacatacaatgtcgagcgaccagaaatagacgtggcctcgggccttcatccctctcccgacatagtctcatcgtcatgcgtcagacaagancccaccatcgtgtgtggctcgtatccagcactcgcacgtaccgaggacagcaaggcacatgctcctgctgtgaagtgcctcggaaactactatcacctcaccaggctcgttaatgcccaagnccgatatgacacacatcactctcccccgcgccagctagtggggggtgggcgcgggcgggcacatttattatcagcaaaattaaaatcatataaaaacaacaagcacggccgggggtgggggggattgtcgtacactcacaccaccccaacacactacagccaggtggtgcggcggaggttgagattctcttcacgtcataccattttcatagcaccctactgctctcctgattgtaccccaactctcaactcactcccaccatacatgcacacacggctggttgngagtcgtgaagaagcacaaacagcccacaccgcagtacttccgttttggcggactggcccagtgataaaccgcagcaacacactacctggccgcgtgctgtccaccacatcacacacgcaccacctcggcaccaaaccagcaaactatccccactaaacaacacaccacctgctcccactccatctcctctctctgtctatttgcgcatcattcccttcacattcatccatccgcacgtgcacccaactattattgtttatatccaacacaaaccacaacatccgctgctacatcagatctatatacataactctccaaaactctatctttacacatcacacaccacccgagcagcctatcacctaataatctttaagaccgcagctacctcagcgtgggcgtgaagatggtgagaatccggattaattgtttgatactgttgtgctacggcgatgtgaattagcgagccgcttctttctcggcgctctatgggggggaacaagcaacataataacacacaatacccacaaacttacgcataacgcatcctcgagttcgtctttctctttggaggggggcccttcgtttgttttgggtggggggcacaccacaacccaccaccccaccacacacgcagagggggggggggncaaaataaaaaaaaaa

SEQ ID NO: 1495 - DNA, 814 bp, Glycine max
  misc_feature (242)..(242): n is a, c, g, or t
  misc_feature (717)..(814): n is a, c, g, or t
  Probeset Number=SeqID_11274
aattatctcctgcttagagattgacatttgacaatatgaaataaaacaaacggaatttgtatacaaaagaaagagagtagcatggaagataaggcaagcaagtagtttgatcagttttgaattttgataggctcagattacaatatggaggatgagagtgggcttgagctcagcttgggtttatcttttggaggctcatcagccaaacccaagggtaagaatggtagctcctcagatactanggctgaagaagttggtaggggtggcaaaatggtggatgactttaagagcatgtttgataacgttcctcagaagcccgaatctattactgggacccgaacaactgattccccaaagccgaggagaacttctttagtgacctttcaaaggccaaagaagcaatgcttctttgaatttaaatgagagaggatttctggttgctaacattaataagccggttgaaattgagggaagataaaaggtccgaggcagcaaataagcgaaaaatgcccttttgatgagaaaacctagagcctcttcatatttctaataaccaaagggattggttcaacccgcagaaaatgaaaatgtggctgactcttgagacttgagaacccccaccctccaagcccattctcaacaaccaacaagtgatggttccaaaggaatcattagaagttagtgcttctttcccatgcttgcaaagaaggttcgtgnnnnnnnnnnnnnnnnnnnnnnnnnnnnnnnnnnnnnnnnnnnnnnnnnnnnnnnnnnnnnnnnnnnnnnnnnnnnnnnnnnnnnnnnnnnnnnnnnn

SEQ ID NO: 1496 - DNA, 1626 bp, Glycine max
  misc_feature (4)..(4): n is a, c, g, or t
  misc_feature (19)..(19): n is a, c, g, or t
  misc_feature (219)..(219): n is a, c, g, or t
  misc_feature (234)..(234): n is a, c, g, or t
  misc_feature (274)..(274): n is a, c, g, or t
  misc_feature (291)..(291): n is a, c, g, or t
  misc_feature (361)..(361): n is a, c, g, or t
  misc_feature (391)..(391): n is a, c, g, or t
  misc_feature (447)..(447): n is a, c, g, or t
  misc_feature (470)..(470): n is a, c, g, or t
  misc_feature (480)..(480): n is a, c, g, or t
  misc_feature (482)..(482): n is a, c, g, or t
  misc_feature (599)..(599): n is a, c, g, or t
  misc_feature (637)..(637): n is a, c, g, or t
  misc_feature (662)..(662): n is a, c, g, or t
  misc_feature (725)..(725): n is a, c, g, or t
  misc_feature (743)..(743): n is a, c, g, or t
  misc_feature (788)..(788): n is a, c, g, or t
  misc_feature (905)..(905): n is a, c, g, or t
  misc_feature (1025)..(1025): n is a, c, g, or t
  misc_feature (1142)..(1142): n is a, c, g, or t
  misc_feature (1156)..(1156): n is a, c, g, or t
  misc_feature (1167)..(1167): n is a, c, g, or t
  misc_feature (1180)..(1180): n is a, c, g, or t
  misc_feature (1191)..(1191): n is a, c, g, or t
  misc_feature (1254)..(1254): n is a, c, g, or t
  misc_feature (1263)..(1263): n is a, c, g, or t
  misc_feature (1386)..(1386): n is a, c, g, or t
  misc_feature (1398)..(1398): n is a, c, g, or t
  misc_feature (1565)..(1565): n is a, c, g, or t
  misc_feature (1602)..(1602): n is a, c, g, or t
  Peptide Sequence Number=SeqID_7687
  Probeset Number=SeqID_11275
ctgngcgatctacggcagnaatgataatcaagtatttagcgatacgtgcgcagtgctagacgcatgtatgaactgatagtacacgtctggcacttacgacttttctgccagccatactgttgccatacgtactcagcagtcacagatcagatagtagtcgcgtgcagtactaagctcattatatattagtattagaagagcgcatgaatcgagcgttgnatacagactacaacntctgatgctcatcgcacatccgtacgcaccagcatagtcntacacatacgatcacgncagcagagatccgaagctacaatgcgaacgagtcacgaccgtggtagtatagtattatatcagttctaangtggtgtgtgatgaatgaggagcaatcatngagcaattcatgcttcctcattgcactacgtctgcgtcgcggagctacgcgtgatngacgtcgcaagcatacatctcgnacgcaatcgncntcacatgcaacaccatgagacatcgcagctgcattgtgatgagcagatgcggttgtgatagttcataagatgatctgttcagtacgctacgctcatcagtgtatgagtactagtaanttcttgtatctgtcgacatacatcatacataagagcgntgtacagtgcgacactacatagacnatcggctagttcagtagactatgaatgtgtgatcactacgcgtcgtgacgagcgacgcatcgntcagtaccgcagctccancgaggcacggataccatgtacaactagagagtgagatagtagtantagacacacgtactagtttattagctcgtcacacgtcgcaccgcgcacgacagaatatacacatcagtatcctgagagcggacggtgaagtagagtagtgctaatagaaagtcgacngcagaatgctacagatagaagagaccaatcgactcaatggcagcagcactcgcgttcgcactgtagcacactgtgcattcgactgtggcgtcatctgcgctcgtaagaggatgtcgaganaggattcactattattcgctagtgtgccatgtatgttatactcatccattcagcatcatgcgatgagcatcgatcaagagaagagctaggcgagatcgtacgagttgtatggtttgnatcacgtcgaatgngcggtacgcangtctgtcatcgtncagttcatgcnactaatatacagtaattggatccgatctgacagtgtggatacatgtacagtcgcgcacactancactgcacnatcacagtctatgatcacgcatactaagactcatagagatcatctatatacagcagtacgaacgtccgattagcacagatcgagagactatacgcataatgcatagcacggactacatgaatngatgatacagantactacatcgacgagctctcatgaagcgaagtgatgatgcacgacgagagcattcagacgacgcatgatatgatatgagagtatatgcacacacatgagatgtaagagagtacataatgatagtatacaagtagatagtagttaagaggattaaataatattatatntgtgcagtaagttcgagtgtatgtaagtatagttgtntgcatcgctgagctagctcacatc

SEQ ID NO: 1497 - DNA, 1572 bp, Glycine max
  misc_feature (18)..(18): n is a, c, g, or t
  misc_feature (26)..(27): n is a, c, g, or t
  misc_feature (1352)..(1352): n is a, c, g, or t
  misc_feature (1390)..(1390): n is a, c, g, or t
  misc_feature (1542)..(1542): n is a, c, g, or t
  misc_feature (1549)..(1549): n is a, c, g, or t
  misc_feature (1572)..(1572): n is a, c, g, or t
  Probeset Number=SeqID_11276
ccacttacaaccaaactnatctactnncagcaatagaactgagtctgcagatgcgaatgtgtgtgtgttcgcggaatatgaggagaaccgggctccacaacgcgtcggaggagcagatagttaaaaaagcatacacgccctcattcgctcttcttaatgtgttagccgccgacgaagcagagcggggcgcgcacggacaccgtagtcacacatcccgcacacacctacacggtaagacacagccgccttgtttttataccacgctgttaaagagagagaggagaaggggcactatagcatagcaggctgcactccggcaacggacccacataagcagcgcgaaggcacataatagacggagcacggaaaagtcaaataacaatcaaacatggattacgacagcagctcaagaggcaatattacaacggcagcgcaacaagaataaaaagtaataaactagttcacccgcagaagataccatatgcagcgctatatcgaataagtactgccgatagctaagcagcgatgcgcaagtgatataaacatgacgaggccgtactcacactcggtaacgacctgttcgctcagactcctcggtgtttcatcgtatgaccaacgcgacggcccaaaccaaaacatacacacaagaccgtttctctagatcgaccgctgcccgagcgacgagacgcatagaatgataagctctcagtcaagctatacagagaagtgtgtgctctgatgccaactgctcgataattagccagactaccgactcgaacaaacagatagaccaatcctgtatgacgcaagagaagacattgacgaccctctgagaacacgtggcatataacatcgaaagatatactctcatcagtacaagcatatactagagtagaagaaaatgagagaatctagggccaagaaaccagaacggtacaataatatactgtttcatctagcagaagacgcaagctctgttggacagtccagtcccggcgtgtctagaaacaagataagtcgcgtaagcatggcgtaacgagcacgcgcacctcaaataatatgttgtgatggcgaaatatatctctcttaacatatagcactctatgcgagtcgacatactcgatcttctagcttcacgaagcaaagacactcaaatgttatactgaccgcggtgtgataacgcgcgtatagcgtatgtgtgttatagttcccccgctaggtgagaaggagatatctccacgactcacatgacgatcgcgcagccgacgaagcatagtacgagagtagtgacacacaactcatgtcgtgtcgtactcgtgacgagaagcgtatatctctcacgatggagcganaaccctgatacaaatagctgcgcactgcgagtctgcgncgtgtataacacgagacacccgaacacacaggagagacacatcatgcacctatgtgacgatatgttgcatagtataccctcatcaccagtcatcatgaagctccacagcgcgtgtataacaacagaccgtcgtgcttctacctcgagatcgntgcctancgatgttactccgctacgtaatn

SEQ ID NO: 1498 - DNA, 1608 bp, Glycine max
  misc_feature (21)..(21): n is a, c, g, or t
  misc_feature (49)..(49): n is a, c, g, or t
  misc_feature (104)..(104): n is a, c, g, or t
  misc_feature (128)..(128): n is a, c, g, or t
  misc_feature (130)..(130): n is a, c, g, or t
  misc_feature (132)..(132): n is a, c, g, or t
  misc_feature (195)..(195): n is a, c, g, or t
  misc_feature (226)..(226): n is a, c, g, or t
  misc_feature (230)..(230): n is a, c, g, or t
  misc_feature (289)..(291): n is a, c, g, or t
  misc_feature (362)..(362): n is a, c, g, or t
  misc_feature (435)..(435): n is a, c, g, or t
  misc_feature (519)..(519): n is a, c, g, or t
  misc_feature (574)..(575): n is a, c, g, or t
  misc_feature (594)..(594): n is a, c, g, or t
  misc_feature (647)..(647): n is a, c, g, or t
  misc_feature (663)..(663): n is a, c, g, or t
  misc_feature (714)..(714): n is a, c, g, or t
  misc_feature (1414)..(1414): n is a, c, g, or t
  misc_feature (1589)..(1589): n is a, c, g, or t
  Peptide Sequence Number=SeqID_7766
  Probeset Number=SeqID_11277
ctactgtagagtctatcacgntgtcatagtatgcaaacgatcgctacgngcgcgcattcgatgatcattatgtatactcgcgtacgcgctaatctcatgctgcngtctgccagcgagtcagccgtatntnancgatcattattgtcgtgctggatcgcgctgcagagtaggttgagtgtcggcgcagaactaggntgcgagtgcttgatggtgtactctgacgatngcgngccgtgtggtgatactaatatatacgatatgtctgtaccttcatgtgtagatcgcgacnnnctactaactgcgttaccggtcagagaccgtgtacctaggcgtccgcacgtacgtcgcgccgcgtgtatatnaatatatagtacacggatacgttagccatcgtgcgatctcgcgctgtcagcgcgcgtgtgggagcgtaacacnacacatacactaatgccagtgctcaccgcacagtatacagcggcgtgggagagtgatataagactgatagtgatatatttgtantaaagagcgagcagtatcgctagtgtacaataatcgcgtgcatatactcaagtcnncttcataatatatcacgangtaacgctgagtaatacgagaatacagtacgatattaggttatgtggagcgantgactggcggttcgtnctcgtgtcaccggcgtaacgcaggagagtagtagtactaatagctagatanaacgttatgtatgatcgcgctacatgcactaacgacgcactgagcacatatagatgtgcataatgtggatatacattagccagacaatcacgacgcacgcgatacaggcgagcgtcgatcgcgactcatttcgctctacgtgtatctacgcgcgagacacgtataccccgcacaccgtatcgcgccatatactcgcgcggtcgtggtgtgatagatagacgagtacatactcacacctgcgccggcgaaacacgtagatttggagaacccgctccctacggcggccttcttcgctttttctcgttgtcgtgttcgggctgattagtcgcggtatacctttcatctcaaaatatatatagctctgtgttcggctcaggaccacggacacgtcagtgcgcgccagcctcttactagtcccacatacaggagccgataacgaacgcgatagcacaatcgatattatacgcatacgacgcatgtgagcaaatgaggtacgaagtatctcgcgcgttggtatgtagggagtgagtagatagtgtgtggcacttcggacagtacacaagagagccaagattcagtgtccaggtacgtcgtcttaaataacataccacaaatacaagataggggacggcgcgtgtgtgtatggcggaggccggaagaggattataaccaaccatataacagccctcacacctgcggnccgcttttctgcgttatgcgatctacgtatattgtaaatcgccttcttatcggattacttaagattcttgttattatctacgaggtcgcgtatggtagagatcatggtcgcgtgagggcgcgagagttattagagtgataaacaatcaattgtgtagtgagagtaaaatatttantgatgaggtggcgcacata

SEQ ID NO: 1499 - DNA, 1443 bp, Glycine max
  misc_feature (2)..(2): n is a, c, g, or t
  misc_feature (30)..(30): n is a, c, g, or t
  misc_feature (36)..(36): n is a, c, g, or t
  misc_feature (38)..(38): n is a, c, g, or t
  misc_feature (114)..(114): n is a, c, g, or t
  misc_feature (170)..(170): n is a, c, g, or t
  misc_feature (272)..(272): n is a, c, g, or t
  misc_feature (280)..(280): n is a, c, g, or t
  misc_feature (382)..(382): n is a, c, g, or t
  misc_feature (407)..(407): n is a, c, g, or t
  misc_feature (422)..(422): n is a, c, g, or t
  misc_feature (450)..(450): n is a, c, g, or t
  misc_feature (520)..(520): n is a, c, g, or t
  misc_feature (529)..(529): n is a, c, g, or t
  misc_feature (533)..(533): n is a, c, g, or t
  misc_feature (535)..(535): n is a, c, g, or t
  misc_feature (563)..(563): n is a, c, g, or t
  misc_feature (635)..(635): n is a, c, g, or t
  misc_feature (643)..(643): n is a, c, g, or t
  misc_feature (795)..(795): n is a, c, g, or t
  misc_feature (877)..(877): n is a, c, g, or t
  misc_feature (884)..(884): n is a, c, g, or t
  misc_feature (886)..(886): n is a, c, g, or t
  misc_feature (895)..(895): n is a, c, g, or t
  misc_feature (954)..(954): n is a, c, g, or t
  misc_feature (988)..(988): n is a, c, g, or t
  misc_feature (1013)..(1013): n is a, c, g, or t
  misc_feature (1038)..(1038): n is a, c, g, or t
  misc_feature (1055)..(1055): n is a, c, g, or t
  misc_feature (1095)..(1095): n is a, c, g, or t
  misc_feature (1141)..(1141): n is a, c, g, or t
  misc_feature (1144)..(1144): n is a, c, g, or t
  misc_feature (1146)..(1146): n is a, c, g, or t
  misc_feature (1179)..(1179): n is a, c, g, or t
  misc_feature (1202)..(1202): n is a, c, g, or t
  misc_feature (1204)..(1204): n is a, c, g, or t
  misc_feature (1262)..(1262): n is a, c, g, or t
  misc_feature (1321)..(1321): n is a, c, g, or t
  misc_feature (1342)..(1343): n is a, c, g, or t
  misc_feature (1381)..(1381): n is a, c, g, or t
  misc_feature (1386)..(1386): n is a, c, g, or t
  misc_feature (1402)..(1405): n is a, c, g, or t
  misc_feature (1409)..(1409): n is a, c, g, or t
  misc_feature (1421)..(1422): n is a, c, g, or t
  Probeset Number=SeqID_11278
cnggaggtacacgcgtatcacaatgtgtcntcaatngntgtagtagtatttacacatcatatgtcatgtggtcttttctggctataccgattgaccgcctaattcagatcagtngcgtcgtcgcgagtagacgtatgtagtgtcggtagccagcggtgttggtgagaatnaaacgggtgtgtatacatcgtgatagcgacaagctcacggtttcgctgcaccatgtatcatctgcagtgcgtatgtcacgattgtgagtgagctggtagatngagatctngtctagcgctgtggcgtactcgactatgcgtcaactctatgatacactattactcatgagtgcgtgagacattacagatgcgtgtatgttggtgtcgtactngcttaagttctaatctgcgagcgcngtgaggggtgggggnggtgcgtcccacactctcgtctgatagnggaagtgcgtggtagatggtgtcgtcactagcaaccggtccgtcgtgcgtgatctccgtgctctatcatntattactantatnanaaatgagacacgagacaatacacattcncgacgtatatagaatagagtgcttggaagcgcacgatgtcctattgccacagcacaggagagaagtgcgccnacgcatgntgctcgcggattgggcgagcgaagatgatcgtcgtgcagctttatgcgcgtggaacgtatcagtcataattgttgtgatgatcgagcggtcatgtgtgtgcacagatacaagaagcaatatgttcctcagtgtacgatacagctctagttgntgtaggttaaaatgaaagtctttttttatgagcgatccgcgaactacgacgattcagtaccgagagctgtatgctcagaganagagacntnagattgtangcgtgagcgctgagcagtggcttactagacaaacgagtgtagctgacgtgggtgtgcanctatacttagaataatcgcacttggaggtgtcancgagaggactgacgactttagctgnattcacgagctataggtaggactcnaccgtgtagtaacatcngcgtagtaatactctctgtatatctcctaataccgactgngtatgtagtgatcgtgaatagagcagacatagcgattcggcttatntangncgtgttgcctgagcgatcgactgatacagcatntgcgatgagcgactgaggctgangntgagatagtcgtcggagtagacgacaagatatatcgagcgagttcgctgcggtgaccngacatgctatatatctactggcgatattagcgttttgatcatctcgtatggtgctggtngtatcttgctcgcttctcgcnngtctgatttatgttatattcactgacagtagagtcgcngtgcngtcgcgtgaggcagannnnatanaaagaaacaatnnaacacagcgatcacactcaca

SEQ ID NO: 1500 - DNA, 519 bp, Glycine max
  Peptide Sequence Number=SeqID_7767
  Probeset Number=SeqID_11279
cgcatgctgcccccctacagctgctagtaattcggctcgcggcccactgaggagctttttttgtgaatgcatcgcctccaaccaaaagaggacacccctttctggatcaatctacggaagacggtacaaaatctggcaggcaaaacaaatctaagcctgctggtgaaggcgcttcagaagccaaagatgcttcaaaatcagagtccactagccactcatgtgctaaccgtcatcaggcagctgttgagacgcaacggcagacgcttaaaaagacgatggacgagcttaatgaggagggagatggccgcgcacccattgtcaagcttggggaggcctcaatggcatgtccattcactgctaagcatgcatctgtggctcccaccactgatataattcgacatggtaggagtaccctagtgacaaccctccagatgttgaaaattctgggactcaattgccttgctactgcatatgtgctgagagttatgtatctagacggtgtcaagctaggtgacatac

SEQ ID NO: 1501 - DNA, 472 bp, Glycine max
  misc_feature (106)..(106): n is a, c, g, or t
  misc_feature (111)..(111): n is a, c, g, or t
  misc_feature (164)..(164): n is a, c, g, or t
  misc_feature (166)..(167): n is a, c, g, or t
  misc_feature (174)..(175): n is a, c, g, or t
  misc_feature (183)..(184): n is a, c, g, or t
  misc_feature (187)..(187): n is a, c, g, or t
  Peptide Sequence Number=SeqID_7768
  Probeset Number=SeqID_11280
atctttactctctctttcccctaattccgaccatggaagccacggcctccgcaatgagcttcgcccttccctcaacaaaagcccaagcccaagcccaactcctganccggnccacaatccattcaccttcccctcccgcagcccaggcccacgccccccggcgngnnctcccanncatcgggnncgnatttcccggacaaagaaagaaagcacgtggagactgtgcggagcagctcgagaactggtacctcctcgccggaataactacaaagggttcacgggaaccagttcccggaggtcgaaagagcctcccaaaaacacggaactgatctgggcgaagaaaacgctcgtttacacggccgggaaagaacccctgggagaacctgaaaacctgaataaaggcatgaactgtggctcttcttccccacccagagataccttttcccctaaagccctaagggaatttccaaag

SEQ ID NO: 1502 - DNA, 769 bp, Glycine max
  misc_feature (769)..(769): n is a, c, g, or t
  Probeset Number=SeqID_11281
attccattcaaaatccatttgagcttcacaacagctagtgtgtccgtgagcttctctcttccatgtgcgtgtgtgtgtaagcagcactagtgagtgtgtgtgctttgctagtgtgctgagcgcaggcagtagtagcacttggctcttccgccggtcgtgtattagtgtattcgagtgctagcgagtagttctgggctaacactcaccacttcggctacctcagcgtcatgctctgggtagcgctctacgaccgcgccatcgtcctgcttgcgcgccgcctcacagggcaccaccgcaggttcacccaactggcgcgcatgggcatcggcttcgtcatactcatggtcgccatgcttgccgccggcatgctcggcgccgcgtcgtcgcgcgccatggcatacacgtcatcagcgccgacggggcggagtacgtgccgatgtcgatcttctggtaggtgccacagtacgtggtgttgggggcggcggaggtgttcacgttcatcgggcagatggagttcttctatgaccaggcgccagacgccatgcgcagcgtctgctcagggctctgcaccgcgttcgcgatgggcaactacgcgagctcggcgctcatcagcgtggtggtgcgtgccaccatgaggggcggacggcccgggtggattcccgacgacatcaacgagggccacctagaatacttctgttaagttgggaagcgttcctactcctcgatgaggagccgcatttggtttatattgatgtgtggcaaatagccn

SEQ ID NO: 1503 - DNA, 460 bp, Glycine max
  misc_feature (380)..(380): n is a, c, g, or t
  Peptide Sequence Number=SeqID_7769
  Probeset Number=SeqID_11282
agtctagcgatctgctattatctcgatctgatctgttcgccatggaagagaagaaggcagaatcgacgaacaagaatgttaagaaggcaaatctgttggagcacaactcgatcaagcacatcctcgacgaatccgtctctgacatcgttaagagccgtggatacaaggaggacgtgaggctgagcaacctgaagctgatcttagggacggttatcatcgtggttgctctcgttgctcagttctacaacaagaagtttccggagaacagagactttttgattggatgcatcgcatcgtatgtagtgctgaatggggtgttgcagctgattctgtatactaaggagaagaatgctatattgttcaccaatcctcctgagggntcattcaccagcactggcttggttatgtcttcaaaggctgccgagattctctgatgagtacactctcaccatcgacagtg

SEQ ID NO: 1504 - DNA, 1902 bp, Glycine max
  misc_feature (35)..(35): n is a, c, g, or t
  misc_feature (107)..(107): n is a, c, g, or t
  misc_feature (140)..(140): n is a, c, g, or t
  misc_feature (161)..(161): n is a, c, g, or t
  misc_feature (235)..(235): n is a, c, g, or t
  misc_feature (268)..(268): n is a, c, g, or t
  misc_feature (301)..(301): n is a, c, g, or t
  misc_feature (524)..(524): n is a, c, g, or t
  misc_feature (562)..(562): n is a, c, g, or t
  misc_feature (576)..(576): n is a, c, g, or t
  misc_feature (619)..(619): n is a, c, g, or t
  misc_feature (627)..(627): n is a, c, g, or t
  misc_feature (712)..(712): n is a, c, g, or t
  misc_feature (747)..(747): n is a, c, g, or t
  misc_feature (774)..(774): n is a, c, g, or t
  misc_feature (970)..(970): n is a, c, g, or t
  misc_feature (1071)..(1071): n is a, c, g, or t
  misc_feature (1115)..(1115): n is a, c, g, or t
  misc_feature (1441)..(1441): n is a, c, g, or t
  misc_feature (1659)..(1659): n is a, c, g, or t
  misc_feature (1679)..(1679): n is a, c, g, or t
  Peptide Sequence Number=SeqID_7770
  Probeset Number=SeqID_11283
cgtggtgtaggcgtagtccaacacaatatgtgtgntgttatataatcacgcctgagagatgcgatcagcgagtatatacacatatcgtactaatcgcgacgcccgcnctgaccaccgtctcatggctcgacgcatatatnacctatacatatagtcgctcnccgcgccgcgcgtcgccactcgctaatggatcactcaacgactcagtctacatatctcacgtcgcgtctgatcnagccccacgcacgcgcatgtgaatgactcagtnactctctatgtctcactatcatccgcacgcgcncgatcagtcgtccgctatatatattatacacgcacgtgcacaacggaatgcgcgcgccgcagcgcatgcgtgcttgtctatacagacgattacttatatatatttataagtatatacgcgcgcaccgcgagtccgacatatcgcgacgcatatatcgccatacgtcagccatctgtctacgcacacacgccgccgccgcgtcatatataatctgccggcgcgnctcgcgtatcatattattatatttatactatatcacantcgacgtagaccgncactacgtgctgtcgcgtgtacagttatatatacgccgagacnatagcacncaccatcaacgtaatagacgagcatctatgaatcatcaatgatgataggattaatattacccaacgacatccattctctcgtatngcgatgagcaatagatagacgcacgaacgcagagnaagcccctagcatacagttgctcgtcngagaaaataaacagattgtgtgcgtcacaaacgcgccatcgacgcgcggtggtgatcgacatcaacacaaacactgctagcgcgtcgtgcgtgacacacataatgtacgttctctctgaagtacgcggatattatatatacccagtcgcgcagctacgttgtcagtcgatttctatcgagtcacacacaacacgcntctacaatcgtaacacaagattgtgtcgccgcgtgaatataatcaacgccgcgcgtgtgctctctgagttcgcactctcgcacacatctcaatatatatantaacgcgcgcgcgcggtgccgcgtatctatatcaaatctagcgntgcgcacatattatataagtagtcggcgcgcgaagagaaatcataggaatcggtatagtgtacgtgcgcgcgatattaccgagaatatctattatcaggagagtatataatatactacacttatagatctcgctctgcggcgcggtatcgcgatcgcagccgtgataaatataccacaacactaacgcgaatgtgcggtaaatcagactactgtcaccgcgtgttcgtctatggtgcgcggccgcgcggcgcggacgcacgcgcgcgccgcggatcgtatatatacgccgacgcgaggaacactagaagccgatatccacgaatangggagaaccgcgaatattatataatacgtatagcggggcgacgcatagatgcgatatagatcaatacataaagaccggcggtattagtagatcgagcgtagagcatcgagttcgtctaacatatttatatatatatacacgcagcaacatacaagcatggagcgcgcgaggagtacaattatgctatatatataatatgcagcgcgctgcatacacancaccagcgcctcgtcagatngcgcgcgccactcgccacacgatcctccttcttacacactcactcgtcgttgagatacgcagcatcagaatacatattaaatgcgggtaattgtcacgccgggacacgtggtatggcaacaccgacaacggaaacagatggagaggcacgtttatctgcgcggtacatatatccgcgccgtcccataaacagaagcgcgccgccgggtagcgcacaccaccta

SEQ ID NO: 1505 - DNA, 1464 bp, Glycine max
  misc_feature (21)..(31): n is a, c, g, or t
  misc_feature (33)..(33): n is a, c, g, or t
  misc_feature (37)..(39): n is a, c, g, or t
  misc_feature (42)..(42): n is a, c, g, or t
  misc_feature (44)..(44): n is a, c, g, or t
  misc_feature (54)..(56): n is a, c, g, or t
  misc_feature (58)..(58): n is a, c, g, or t
  misc_feature (61)..(62): n is a, c, g, or t
  misc_feature (65)..(65): n is a, c, g, or t
  misc_feature (72)..(72): n is a, c, g, or t
  misc_feature (83)..(84): n is a, c, g, or t
  misc_feature (87)..(87): n is a, c, g, or t
  misc_feature (98)..(102): n is a, c, g, or t
  misc_feature (115)..(116): n is a, c, g, or t
  misc_feature (123)..(123): n is a, c, g, or t
  misc_feature (153)..(153): n is a, c, g, or t
  misc_feature (178)..(178): n is a, c, g, or t
  misc_feature (214)..(214): n is a, c, g, or t
  misc_feature (256)..(256): n is a, c, g, or t
  misc_feature (275)..(275): n is a, c, g, or t
  misc_feature (280)..(280): n is a, c, g, or t
  misc_feature (287)..(287): n is a, c, g, or t
  misc_feature (294)..(294): n is a, c, g, or t
  misc_feature (300)..(300): n is a, c, g, or t
  misc_feature (317)..(317): n is a, c, g, or t
  misc_feature (366)..(366): n is a, c, g, or t
  misc_feature (397)..(397): n is a, c, g, or t
  misc_feature (404)..(404): n is a, c, g, or t
  misc_feature (554)..(554): n is a, c, g, or t
  misc_feature (567)..(567): n is a, c, g, or t
  misc_feature (642)..(642): n is a, c, g, or t
  misc_feature (702)..(702): n is a, c, g, or t
  misc_feature (784)..(784): n is a, c, g, or t
  misc_feature (805)..(805): n is a, c, g, or t
  misc_feature (824)..(824): n is a, c, g, or t
  misc_feature (901)..(901): n is a, c, g, or t
  misc_feature (905)..(905): n is a, c, g, or t
  misc_feature (918)..(918): n is a, c, g, or t
  misc_feature (1017)..(1017): n is a, c, g, or t
  misc_feature (1174)..(1174): n is a, c, g, or t
  misc_feature (1179)..(1179): n is a, c, g, or t
  misc_feature (1210)..(1210): n is a, c, g, or t
  misc_feature (1332)..(1332): n is a, c, g, or t
  misc_feature (1372)..(1372): n is a, c, g, or t
  misc_feature (1391)..(1391): n is a, c, g, or t
  Probeset Number=SeqID_11284
gattgtgagtggtggttgccnnnnnnnnnnngnaccnnncancncacaccaccnnnanaannaantatacgnaaagcagaaannacncccccaccctnnnnnttaatagtgtagnnaccaccnccccacgagagagcacacatatatagaatntgtcgtgaaacgccgcggctgaccntactacaatgcagaggcgtaatggtgtgcgttgcgnagcacacaacacgaaaaaaatacattataataaaaaaaaatngagatgatgtgtagcattntaacnatcaccnctatctnaaaatntatatatacataaatantataaaaagatctataaccctatcttgtatctatatatgtatattcatncttctctctctgcatctctcactatctcgtnatcgctnctaatccggctacgcctatgacgtctgaattcattgtatatatagtattgagtgacaatgttgtgttagtacgctaatctgttgtatatactgatagtatgtatatgtctgtatccccttcctcttccaatttgttgtgtgagataaatntcacataaataanatatagctgaagaatagatatcgaatgaatactatagaatctagtacaacatctcgaatcgtctgataatgtttntggaagatagtgtagtggatggatatgtgggctggagacgagactagacgttgagagaanggtagtcacatacgcagataggctgcgcaagtgagattagctgatcgctgctcctctgcaatcatgagatcgcacgtgaagnagtggatgagttgctctgagntgagatgtgtgtagtatgnagtgtgatttggtgtaacaaccatccctccccacaccacacgtgtgtagtatggtagtagtagatgtgagtgatagnaaangagggtgtgggcncacaccctccacatcatactcacctcaacctacatacacacaacaagacatatgagtgacatgcatcggacgagggtatgccactgcacttccttacanatagtcagccacgcctataccatacgcgagagatgacacttactatcccgagacaatgagtatggtagctgctaactcacagactgatgactagtgagatgctgtggtcgatcctattgatgcgtgtattatatgttgtgaacagattgctgtgcantatanatttaatactgcacatataatatcatgttgncggtgatatgatcacagtcatcgtgcgtgtaactgtacgatagcgtggtgtatgtgcgtgatgctgctcattcgacatgagactcctacatgttatcacgactcccatcgctgttgattganctatgagattgtccctgagctgcatgcagcgtgcacgctncgtgtgagccgtgacacanagatagatactcacattgtatgactctgctccacagtcgctctggtcgtcgacgctcctctctactgctctcg

SEQ ID NO: 1506 - DNA, 3703 bp, Glycine max
  misc_feature (3703)..(3703): n is a, c, g, or t
  Peptide Sequence Number=SeqID_7771
  Probeset Number=SeqID_11285
gtaaaatctcgccgccttcacataaaaataatctttaatgaaagaatttcatatcaggtgaaattaatttatgatctttgaggtagacccgtattatctgacctatgaaaaaatccctgcttatccacgcacgatttggaacttctgaaaacacgctgaaatagatttttttttttggggtataatattgattgtagtagtatttattttatcttctgatattatatttccaattttgctgtcaaaacattattagcgatcaatttgaaattgatacagagctgagagcatcaaggaatcgaagaatagaagattcatttttttttctttttgatatggaagctgatgtttctattatttttgttgcttttcaaaatcccccccccccccaaatcccaatttctccttctgtctttctgctttggatgtttttcaaccaaaaaattgtgcttttcaaatcttttgctctgatgggtacttcaaatcttctcttgtttttctctctgatgagcctgtgtgctatggcggcttccaaggtggtgcttattgggaataatatcactctctcctttgatgatattgaagctaattttgccccagcagtcaaaggttctggaaaatatggggtcttatatttggcagaaccactggatgcgtgtgcagaattgacaaataaagttgaacaacttcccaatgcgagttcaccttttgctttggtggttagagggggatgtagctttgaggaaaaagtcagaatagcacaaaaggctggcttcaaagctgtaattgtctatgacaatgaagagggtggcatcttggttgcgatggcaggaaattctgctggtataagaatacacgctgtatttgtatctaaagcttcgggtgaaatactaaagaaatatgctgggttgactaatgtggaaatatggctcattccaacttttgaaaactcagcatggtctatcatggcaatttcatttatttccctgctagctatgtctgctgtcctggccacttgtttcttcgtccgcaagcatcgcataagaagagaaaggcctcgagcttctcttgttcgtgaatttcatggtatgagtagtcgcctagtgaaagcaatgccgagtttggtatttacttctgttttggaagataactgtacatcaagaacctgtacatcaagaacatgtgctatatgccttgaagactattgtgttggtgagaagctcaggattctgccctgctgtcacaagtttcatgctgcctgtgtggattcgtggcttacttcatggagaaccttttgtccagtttgcaagcgtgatgctagaaccggcttaactgatccaccaccttcagagtccacacccttgctctcatcaaccccagcatctatggcatcctctgtcttatcttctgcaagatcatcactagcttcatcttcagcaatacaaattgcccggacagcatctatggcatcctctgccttaccttctgcgagatcatctctagcttcatcttcagcaatacaaattgcccggacagcatctatggcatcctctgccttacattctgcgagatcatcactagcttcatcttcagcaatacaaatttcccgggcagcttcacagaccccatctgtttcccgtaaccactccatagccagtacaccttatgttcagccatctcttaggtcctcctaccatcaatccccctccctaagcatcagccgaagctccgtagatcttaggaatgcatcccaaagatctctagcttctcacttgaattcaccatgttccatgggatacccatctttgtcatctcttaactcaaggtacatgtctccacacattccaagtccaagcaatgcttcagtaagctatatgggttcatccagtcatcaacaacatcctctccgttatagtgagtcggctgcaagcttctccccatttgcatcgacacactcccttccagaatgttaaattgttcaattgattatatcatatgattgagacgtccacgcagttgaactagtaattgccaagtcttgaactaaaaggtggccatgtgatgaccggtggtctagttgaatagtcctatgtgatgcttggggcattccctacctctgtcatttgacttccgtcttggcacctggtgtacattgtagcttctctctggtgttagtttcgtttacatgtgctggttgaggttcttacatttataggttggagagcttgcatacagtaacttgtgcgtattgtttgtactttgaatgttgacgttttcatggccttgatgtccaagtatagtcaactgctaacaagagaaatgttgggctgtattgacactagacacattgaagtaagaagagttctttatgctctgtctagtggatttgtccaactgaatcatgagagatcatgtgatgtatcactctagtgttatctatacttgatcatctaattgcaactctgagtatcaataatacttgtaaaattttcgttaacaaaagaaatgtaaggctgtagtgacactagtctccttgaagtaagaatgattctttatgttctgtctcgtggatttgttcaactgatgcatgagagatcatatcttgtatcactccaatgttatctatacttgattatcaaattactccttctagtttatgtaagcactgcttaccaattttagcctacgttcgcaagcgacacatccgatgagagccgtcgagagttcctcatggtggtaaattacatgccatctgtggtctcttagaattagcgctgctagtttttataaggaatcaggtacaagacgacagacgtacacagggaacatgtgtttggcctataagtctcaattccaactgagaatgaggtcggtgggttctttggtccgatggctggatgtttacatggtatcaatatatacggtgcaatcaaccttcaagcgtcagccgacggctttggttggtaggaggagggggtcgaatgtgggatgattgcgaaagtctcacaccttcggcgtgcttcatggtagtttttgcctatatcactaaggttgctgcgagcttgggatcggaggtaagtctgaacgtcagaatgaacatacagcatttatatataaatttgaagctacattactaagcaagtataccggctgtgatggttgtatgaggatggccgagttttcaccaacctatactgaagccaccccaatctcgcctcctccctctatttctctgctgcctttcaccccggtgccggcccctttgtgccttccgccgcttttgctctgatgggtacttccaatcttctattgctcttctctctggtgagtctgtctgctatggccgctcccatgggcggtcttatcggcattatcgtcccctctctccttcgttcagagcggagcgcatcttgccccagcagtcaagggtcctggttcagttccaatctgaaatttcgtgcacccattcgatttgccgccttttcaacaccctcaactgaaacaatctttctggcgctacctcactctttcctcttcatgctctccgcccacgtcgctttgcctttgtgctgtccgaaccttttgctcggtcggtttgaaattgatacagagctgagagcatcaaggaatagaatagaagattcatttttccattttgatatggaagcagatgtttctattatttttgccgcgttttcaaaan

SEQ ID NO: 1507 - DNA, 1259 bp, Glycine max
  Peptide Sequence Number=SeqID_7772
  Probeset Number=SeqID_11286
atcgcgacgagctctcctggcccatttccctcgctgctgctgctaatcccgacccgaccgtcaccgccggcctttgcatcaaacgccctgacagcgcgcgtcgcatcgccacaacacgacggcctcgctcccttgatcgcctccctcgctccctccctgcctacttgcgtgtctacctatctacctgcctacctataccctataccctaatacaccacgcccatcgcccgcgacctgcagcttcgtccggcatctcttcctcacattcacaatggcatcaaagtttctccgagaatacaagttggtggtagtcggcggcggtggagtcggaaagtcgtgtttgactatccagctgatccagagccacttcgtagacgagtacgacccgaccatcgaggattcgtaccgcaagcagtgtgtcattgacaatgaggtcgccctgctcgatgtgctcgatacagcgggacaggaggagtactcggccatgcgcgagcagtacatgcgcacaggagagggcttcctgctcgtctactcgataaccgacaggcagagcttcgaggagattatgacgttccagcaacaaatcctgagagtaaaggacaaggactacttccccatgatcgtcgtcggcaacaagtgcgatctcgacggcgagaggcaagtgtcgacacaagagggccagactctggcgcggaactttggctgcaaattcatcgagacttcggcgaaatcccgcatcaacgttgacaacgccttctacgacatcgtccgagaaatccgcagatacaacaaggaaatgtcctcgtacacaggcgcccctggctcaaacggcaacgggccccagaagacgacattcgacacggacgaccaggcggagaagaagggatgctgtggatgcgtggtaatgtaaggatatggaagccactgtcgttgttgtcgttgttgtcgcgcacgctgtcagagagatacctacaccgctgggttcggttacccgccctggccattggcggtgctgcttggtccagcagaagaaaacacgcgatgctgctgttgcgtactgccagtacaccttctcttcgatactgtcactttgggttcgcattacggggtaacggattcacgtctgctggatgcgcctccgaacaccctacttctactactggtatcgactccatctttcctatctggtggcgctcttcgtattcgccttcatcatctatctagaccgatttctttatggcattttgatcggtactctg

SEQ ID NO: 1508 - DNA, 259 bp, Glycine max
  misc_feature (31)..(35): n is a, c, g, or t
  Peptide Sequence Number=SeqID_7773
  Probeset Number=SeqID_11287
ttgcaggtccacataaagcgtctgtaagatnnnnncaacagctgtgtcaaataagacatcattcgtatgcgagataggaagtcgggcatttagtatagtcaaccacaaggttgctcttcggagtaaggtgttccacccaaacatcaacagcaatggcagtatatgtcttgacattctcaaggaacaatggagcccagctctaaccatttccaagctgaaattaaacattacaaagcttgttgtgccatttaatgtgcct

SEQ ID NO: 1509 - DNA, 479 bp, Glycine max
  Peptide Sequence Number=SeqID_7844
  Probeset Number=SeqID_11288
attttttttttattggagaggaaagaaaattatatatgataagatttagcgtactagtgtagtctctctcttctcaatctcatctctcttagttgacaaaaaactatcatatgcaaaatggttgaccgggtggacagtaatgaacaatgatgctttctaataagggtttttgttctctcccctttttggtttaaagtttaaactctctagctagcaccgtaacttgaagctgaaatacatagcaagatatttatggttatttgtgaaaattgttcaagggacctctattctctggcgtgtgaatggagttagctagaggaagaagggctggtcccccacctcataaacacataaaacaaaaactctgttctgacaagtgccataatggacctgcctcacacggctcatgcctcaggtttgcgcggtcgtgacctaacattcccgtctcctcaaaggctcaaactccttaaccctcgtgc

SEQ ID NO: 1510 - DNA, 1573 bp, Glycine max
  misc_feature (59)..(59): n is a, c, g, or t
  misc_feature (72)..(72): n is a, c, g, or t
  misc_feature (117)..(117): n is a, c, g, or t
  misc_feature (135)..(135): n is a, c, g, or t
  misc_feature (245)..(245): n is a, c, g, or t
  misc_feature (320)..(320): n is a, c, g, or t
  misc_feature (339)..(339): n is a, c, g, or t
  misc_feature (368)..(368): n is a, c, g, or t
  misc_feature (1100)..(1100): n is a, c, g, or t
  misc_feature (1106)..(1106): n is a, c, g, or t
  misc_feature (1318)..(1318): n is a, c, g, or t
  misc_feature (1359)..(1359): n is a, c, g, or t
  misc_feature (1394)..(1394): n is a, c, g, or t
  misc_feature (1471)..(1471): n is a, c, g, or t
  misc_feature (1507)..(1507): n is a, c, g, or t
  misc_feature (1549)..(1549): n is a, c, g, or t
  Probeset Number=SeqID_11289
gcacgcggcgcacctatctcacatcctacattacttggctactctatccactccctacncaacgatgactgntcacaccgaatgtcgtgtagtatccgctgttattcacaaggcatnacgaagggatcaggacgntgtaactacgtaataacacatgttatgtcagctacaagtcactgtctgtactgctcgccttacgctcgacaatcaccgatacgtactgctctctctatccctgcatacanctttatttgatatcgtcgacactgcgtgctcgcctgttcgatatctcggacgtacattcagacgacactccgccntgtcgtctcccacactccntctcacgtacatctagtataatatgatgncgtagtgtgttccgagcgcttcattagtgcacaatcgactacatatccagaacaccgagctatcatttctatacgtggacattcctgcataccacaaatacatacattcatactcgatcatctcagaacacactccgagcagatatactcatatcttgtatacgtaactacgatcgtatcatgctagagcgactagcacttctcatatgataactctaacatctaacacgcgctacactgtgcactacaccacactgttcgttcctaccactactgtactaaaacacctcgtgtgtacatccagcacgactcacccagctatcatctctcacccgaactattcacaagctcacaccgatttcttttataccgttctaaccagctatattgacaacgcacacgagactgttattgaaacggtgaatctttcaactatactatgacgctatactagaacacacatctgtaatatacaattcagaccatgtccgcttcgatcgcatccgtctctgattttattctgtgtcctcttcctaactctcacactaccgatcaaagcaattctcattcgacaactgaacgctcaggtagcatatacaggagaatgaacttatgtcacagcatacaacacgatacgacactcacattatgacaatgatatacacggactccgtaacgtacacatatcagagcgcttacatcgaccatcagctcactgcagcgatgtgtaantgtcantatatcatctgtattctgtactcgacgcacaaccacaatgatcctctgtatattactgagactcaccgcgactctgataccgcgatcatcgcactctgttcagatacatcctctacacgatacactaccaatgcttactatcctctagaatcgacaatcaagtctcatccatacctttgatcactaacatcaccgtatacacactccaatcnctctcatcgcatcacttcttctattaccgtcaccacatcgnacctacaaccgtctttctgctcggtcctctatccntatcaaatacctatcatctcggtagttcatcttactattatcactataatggatctgactatcacgaatcgttagtncatgtgaatctctctgtctatatcatcatgcttctntactcatgcactcgacatcattagcacacatgaacactgaancacacacgtcttcatgcgcacacg

SEQ ID NO: 1511 - DNA, 465 bp, Glycine max
  Peptide Sequence Number=SeqID_7845
  Probeset Number=SeqID_11290
acctttaagcaaagtcttcgaagagcagccacaacaacaaactcccatctccttctctctctctcgcatctctcctcttttgtttttagggttttcttaaaaacggagaaaagatgttcagaagaggaccttcgagcaagagcgacaacaccaagttctacgagatcctcggcgtccccaagaccgcctcacctgaagatctcaaaaaggcttacaagaaagccgccatcaaaaaccatcccgacaagggtggagatccagaaaagttcaaggagctagctcaggcttatgaggttctcagcgatccggagaagcgtgagatctatgatcagtacggtgaggatgcgctcaaggaaggaatgggtggtggaggcggtggtcatgacccctttgacatcttctcctccttctttggtggtggcggtggacaccctttcggaggtggcagcagccgtggaaggaggc

SEQ ID NO: 1512 - DNA, 1435 bp, Glycine max
  misc_feature (5)..(5): n is a, c, g, or t
  misc_feature (179)..(179): n is a, c, g, or t
  misc_feature (1340)..(1340): n is a, c, g, or t
  Peptide Sequence Number=SeqID_7846
  Probeset Number=SeqID_11291
ccagntacatacttactcggacgctgtatgacatagatataacatcagatcactcgtctgcgtgctctctatctcctacactactatctcctagtctcgtactcgctccgctaacgccctcaacacaacgcctcgtcgctcactacttccatacgcataatcagcgactcagcattatntatgtcgccacccatactacctccgcctatatgctgatatctgtgtctttccgtctcatcgtctcttcttccatgatatgcacacacctcgtatactctttccccgtgtcaggaccgtcttcttcaatgatcttcgcgctctcccaacaccaatctctaacaaccatcacgtaaacacaatatctagtcaatctctactcgatctcacactaacctaacatatacggctctcttatacttatcttcctattactacattttttcgcatactcctcgtatctattctgcttactcccgtatctcttaccctaccaacgctccactacctctcgcgctacctgattcacgaaccactactctcctattcctccacgcatccctcactcaccttcgtcatcaatgttatctctcgcgatcctgtttacgtgctcatctaagcgaccatcgtttatacaccgagcgatgctcatgccttttaacacacgctctctcgactcactttcttcaattctcgtcgccatactaacctcgcacttatcgtgccactcttcctctcccacttattatatattctcgttttttctctctcttgcatacatcttatctacccgcgcccccgcaactactatctagtgcgcctcttcctctcctatgtctcctcgtcttcccctccatacgccgtcatatatagtgttctgctacctattagtacaatatacagacttcaacacctgtcctcgcatactaacgctcgtatcctacatatacttctcgaaccctacccgtcctgtcctccgtcgtgacgcataattgctacatattttatatccatccctcttcctcctcctactcctccatctcacaccatcttatctccttcatactgtttactcttctaacattattaaatatcatagacctcttatagtaatacatattcatcctatactatgataaataccttaacctctagttcgttaattgctctaaatagatactctatccacgtgcgctattttattatggtgtggtaaataactacttcatttctctcaccacctctttcttatttcatacctaccttattactcttccccactaattataggagaatgcacccgcccctctcgctatccctctcttgtggaaaaaactttttcncccctcctcctctctctctttcaaaaattcttatttatatttcgttcttgttgtttttgctcaactcgatagtcttagtatcagcaatagtgatt

SEQ ID NO: 1513 - DNA, 1897 bp, Glycine max
  misc_feature (10)..(10): n is a, c, g, or t
  misc_feature (34)..(35): n is a, c, g, or t
  misc_feature (49)..(49): n is a, c, g, or t
  misc_feature (52)..(52): n is a, c, g, or t
  misc_feature (54)..(54): n is a, c, g, or t
  misc_feature (58)..(58): n is a, c, g, or t
  misc_feature (64)..(64): n is a, c, g, or t
  misc_feature (98)..(98): n is a, c, g, or t
  misc_feature (100)..(100): n is a, c, g, or t
  misc_feature (102)..(102): n is a, c, g, or t
  misc_feature (155)..(155): n is a, c, g, or t
  misc_feature (180)..(180): n is a, c, g, or t
  misc_feature (183)..(183): n is a, c, g, or t
  misc_feature (186)..(187): n is a, c, g, or t
  misc_feature (196)..(196): n is a, c, g, or t
  misc_feature (204)..(204): n is a, c, g, or t
  misc_feature (230)..(230): n is a, c, g, or t
  misc_feature (261)..(261): n is a, c, g, or t
  misc_feature (275)..(275): n is a, c, g, or t
  misc_feature (294)..(294): n is a, c, g, or t
  misc_feature (298)..(298): n is a, c, g, or t
  misc_feature (332)..(332): n is a, c, g, or t
  misc_feature (343)..(343): n is a, c, g, or t
  misc_feature (347)..(347): n is a, c, g, or t
  misc_feature (352)..(352): n is a, c, g, or t
  misc_feature (361)..(361): n is a, c, g, or t
  misc_feature (432)..(432): n is a, c, g, or t
  misc_feature (436)..(436): n is a, c, g, or t
  misc_feature (461)..(461): n is a, c, g, or t
  misc_feature (463)..(464): n is a, c, g, or t
  misc_feature (485)..(485): n is a, c, g, or t
  misc_feature (497)..(497): n is a, c, g, or t
  misc_feature (501)..(504): n is a, c, g, or t
  misc_feature (551)..(552): n is a, c, g, or t
  misc_feature (558)..(558): n is a, c, g, or t
  misc_feature (579)..(579): n is a, c, g, or t
  misc_feature (600)..(601): n is a, c, g, or t
  misc_feature (615)..(615): n is a, c, g, or t
  misc_feature (618)..(618): n is a, c, g, or t
  misc_feature (663)..(663): n is a, c, g, or t
  misc_feature (689)..(689): n is a, c, g, or t
  misc_feature (741)..(741): n is a, c, g, or t
  misc_feature (754)..(754): n is a, c, g, or t
  misc_feature (758)..(758): n is a, c, g, or t
  misc_feature (768)..(768): n is a, c, g, or t
  misc_feature (774)..(774): n is a, c, g, or t
  misc_feature (798)..(798): n is a, c, g, or t
  misc_feature (820)..(820): n is a, c, g, or t
  misc_feature (824)..(824): n is a, c, g, or t
  misc_feature (862)..(862): n is a, c, g, or t
  misc_feature (866)..(866): n is a, c, g, or t
  misc_feature (894)..(894): n is a, c, g, or t
  misc_feature (899)..(899): n is a, c, g, or t
  misc_feature (903)..(903): n is a, c, g, or t
  misc_feature (913)..(913): n is a, c, g, or t
  misc_feature (946)..(946): n is a, c, g, or t
  misc_feature (984)..(984): n is a, c, g, or t
  misc_feature (988)..(988): n is a, c, g, or t
  misc_feature (1055)..(1055): n is a, c, g, or t
  misc_feature (1061)..(1061): n is a, c, g, or t
  misc_feature (1063)..(1063): n is a, c, g, or t
  misc_feature (1078)..(1078): n is a, c, g, or t
  misc_feature (1125)..(1125): n is a, c, g, or t
  misc_feature (1131)..(1131): n is a, c, g, or t
  misc_feature (1153)..(1153): n is a, c, g, or t
  misc_feature (1197)..(1197): n is a, c, g, or t
  misc_feature (1260)..(1260): n is a, c, g, or t
  misc_feature (1275)..(1275): n is a, c, g, or t
  misc_feature (1341)..(1341): n is a, c, g, or t
  misc_feature (1416)..(1416): n is a, c, g, or t
  misc_feature (1451)..(1451): n is a, c, g, or t
  misc_feature (1496)..(1496): n is a, c, g, or t
  misc_feature (1525)..(1525): n is a, c, g, or t
  misc_feature (1564)..(1564): n is a, c, g, or t
  misc_feature (1673)..(1673): n is a, c, g, or t
  misc_feature (1682)..(1682): n is a, c, g, or t
  misc_feature (1759)..(1759): n is a, c, g, or t
  misc_feature (1783)..(1783): n is a, c, g, or t
  Peptide Sequence Number=SeqID_7847
  Probeset Number=SeqID_11292
cagatgagantatgatgtagctgcagtcttatannccgcgcatcacgtngtnangcancgccgntattctatatcactgcgttttagatttagtggcncngnatacactacatacgtcggggagattcactttcatgtgtgactagtgactgatnctttatatcatccagttctatatgncgngcnnagcgtgatnatagctcntctagtactcaggtaaattcatccgncgaatctgttatatagatacgttagccgcgncccgcgcgcgcacnctcatgtctacaatcatcntatntgctgcttcgacagcgcgaggcatcgatctcgtnggcgcggagcncgantatancttatcatnttacgtcttgatatatcgactattagtagtgctgcgtcatcgataacgtcgccggcgcgttgcattatacnacanctaatacgcacccgtatcataggtngnngtatctcttggacgatcgtgngagcggtgcggngggnnnnggagcactctatatactatactacgcgcatctatatcgtctgtgcgnncgcgtngtgatatcatatatctcacantattattaacaaatatgtagnnaaatcaaccgcgcnagntacatatatctagattatacgcgtgcggaagacgacagcggcgcncgttattatctagacaacggtacganttacggaattacgtacaatgcaggtacggtatatgaatgtaagtcgcgtggncgtctgagtcgtnttgnctgtgctatntctgcngcccgcgcgatcgtgctatatatnactcacacgaggcaatcacgangcgnacactatactaatcaacttacacctacaacgcgcgcancacntcgctccataatcagtatcgcgccagancgcgnacgngagacgtatngatatgatatacctacccacaccacatcattgnccgcgtcgtcgccgtacctcgtcatatcttcgtagtantacntcactctcgtccgacggcaagcactactatagccggcgacctagcgtgtagctgcacgtccagtcangcgagncnggacgcgtgacgctnactaggattctgtacgtgttgatactccgactcacccagtgcacgcnaaccgncgccgcgtcgcgcattgagcgngcacgcacgcctcgtcatcgcgctcggcatcgcctattctgacntactcatggtcgcacgtgcgcgctgtcgcgcgcttcgctcgaatctcctgcgtaatatcgtanttcgtcatcactctntttaatacaatagtatgatgtatataaggatcgtcgcagaatgacggatatatagacatgacgcgngtgtataagagatatatcgatcgcgcacgtaaactatgtcgcgagatattacctattatgtctgacggtatacgngtgtctctatatctcccgccgtctacgcgtgcacncctatggcgcttcctctctcttcgcgccgcatatgttctagtcgnatgcagtttctgcgtatggatgtcgagcnatcgtcatatagcaatacaagcgcgccgataatctagtntgcgcgttcgccttcctatctcgctatatacatatcgtatcatattatcgccatggcatacgctgtttgctcggcgagttgccggctaggagataataagcaccatacnacatacgcngtacgtccctcgcgactgatattactgtctatatgctatgtcgcatcaacattatcacgcaagttgacgagcatgtnttacgacacacggtacaccacccnctcacgccgcgcttcgttcctttgctgtgatatgtgcggcgcgacactactcgcgactcaactcacaccgtcttcttggcagatatacgatatgcggtgtggtgggcctgcttc

SEQ ID NO: 1514 - DNA, 453 bp, Glycine max
  misc_feature (450)..(450): n is a, c, g, or t
  Probeset Number=SeqID_11293
catctttggaaagtccgcgaccgtgatccaaaactctctaatcctcatccgaaagggtagccagggacaggcccattacgttacagccgacggtaacgagaaaggtgcagcagtcaagatcggtatcgttcttcagaactgccgtatcatggctgacaaagacctcgaagctgaaaagctaaccaccaaatcgtacctaggacggccgtggaagaaattttccaccaccgtaattattggaactgagattagtgatgtgattaagccagaaggatggtccgaatggaaaggagaagctaaccacaaaaccgctaaatacattgagttcaataaccgtggaccaggagctaacactgctgctagggttccttgggccacgatcgctaagtctgcggctgaggttgaaggtttcaccgtcgctaaatggttgactccggttaactggattcnaga

SEQ ID NO: 1515 - DNA, 515 bp, Glycine max
  misc_feature (87)..(87): n is a, c, g, or t
  misc_feature (127)..(127): n is a, c, g, or t
  misc_feature (138)..(138): n is a, c, g, or t
  misc_feature (174)..(174): n is a, c, g, or t
  Peptide Sequence Number=SeqID_7848
  Probeset Number=SeqID_11294
taaccacgcaatttacaaattcactgtaacacatctcgccaccacatcaccggcaatggcgccacccatcgcggcgtacatcacggncttctccccctctcatcacgtcgtctccgccgccgaaaancggtacataancacaactgtcgtggcgcccgccgatgggtctttaanttcaccaccaaacaaacgccaacaaatatcctcttgggtttttaatcaaactttgacttgggggatatttccattttcaaaacaaatccaaccaaaagggggttttaatttttaaaaaaagactatttgtattgggcccccataatttccaaaagggaacttcttgtgaaaaaagggaaaaccggggttttccaaaaaaattaaaaaggttgggccgctggacaaaaatggggcgaaaaaattttttttctccaaacacccgaaaaaagtgaagaggcccaaacagagtttgggtgcaaaaaaaaatgccccccgcgggggtctcttttttttcccaaaaa

SEQ ID NO: 1516 - DNA, 429 bp, Glycine max
  Probeset Number=SeqID_11295
ccaatagttcagggtgttttctattgcctcgctttgataatcacgatagctaatcaattgattatttatcatctgctaatttcgcgtcgaacattttaatcaatttgtctaaggtggcatcaccaaccaaagacgccgggttatttccttcaattgtattcatctgataagacgaataaccgcccggagtggtggaaccgttaacgaatttaccgccattgagtaaattagaataaacccattcgttagaatccgtctgcctccctctacgtgcgcccccgcgaaattggcgttccaatttggaaaggggcgcggaaaatagatttttgggaaaatagtttattattcttttgcggttttcgccttatgacaatcctcacacaataactgtaagttgtctaaatcccaaatagcgccacctttcgaaac

SEQ ID NO: 1517 - DNA, 1391 bp, Glycine max
  misc_feature (127)..(127): n is a, c, g, or t
  misc_feature (142)..(142): n is a, c, g, or t
  misc_feature (147)..(147): n is a, c, g, or t
  Peptide Sequence Number=SeqID_7849
  Probeset Number=SeqID_11296
tcgtagtcggatagtcgctgtatacatagagtcgtatagcgatacaaaagatctgcctcacactcatctcagtgacaattacactgttcaattataccagataataattccatagcacacgatatanttaaggtggaggagngcagncaatgtgatgtgtattatcgataatcatatgagctcacgattattgttgcgggcgcgtataatatatcaatagtcgagtgcgccgcgagatatataatagttgtattgagtgagagacagggcgcggcaatacatcgcgggcgcgccataatcgtgatgatgtggggacattagatagtgttgttgtgtgttgtcgacccgctgagtatcgtgttatatatgagtgcagggagaatccaagtcaatcattaatggtgagtagtgaaagaagacaagaggcaatagtgttgcgggaaaacgtcagcgagcgtttgaatggatgattcaatgttgcatatgggccaacgttatatatagggtagagtgagtgtgtatgtttgtgtgttggttcggtacatcgcgaagcatgtctcagatacgacagaatacagagaaatagagagggatatatgcgtgaacgcgatatcattccattaggtgtgggtatcactgttgtggcggctatagcgggagctaaatatcagcggcgccgcgcacatggggtgcggagcgggtggaatcatataagacgctgtcggcgcgatgagcggataaatatatataagatgtagggtgggaatctagcatgtttggtgttgctgggttggtactagtagggggacatgggtggggtgtattatgagccataggggctcacgcgacgcctgatgctgaggtcgctcccttacgtatttctgcgtgcggggcgtgtagaggatgtcacataggcgacgggggcgcgcatcgagagtattcactatatacggcgagaggcggggtagggccagcactgaggcagtcagagctgggaggtaaataaaataagatacaattaatcagagcgtgcgccggtgtagacagccccgtgtgggaaaatcgaacgtcacgtgacagtgcagtgtcgttgtgtagtgcgggcggataagagctgtggatttaatgaggggcgacgaggggcggcgagcgcacagcgccgacgcgcaatgtgtgttgagtgcccctgtcgcaggcgcggacattacatggcatgggatgatagcagcgtcattagtcacggctactttataccgcgcccgcgacgacatcgcgcgccgcgaaccggtcttggttccaataaggtacatgcctaatataagagagtatgggcgacaaagtcgcgagataagggatgggtccgttcgtctcgataagtgggcgatcattaa

SEQ ID NO: 1518 - DNA, 1353 bp, Glycine max
  misc_feature (35)..(36): n is a, c, g, or t
  misc_feature (47)..(50): n is a, c, g, or t
  misc_feature (63)..(67): n is a, c, g, or t
  misc_feature (71)..(71): n is a, c, g, or t
  misc_feature (75)..(75): n is a, c, g, or t
  misc_feature (190)..(190): n is a, c, g, or t
  misc_feature (333)..(333): n is a, c, g, or t
  misc_feature (602)..(602): n is a, c, g, or t
  misc_feature (776)..(776): n is a, c, g, or t
  misc_feature (954)..(954): n is a, c, g, or t
  misc_feature (1103)..(1103): n is a, c, g, or t
  misc_feature (1105)..(1105): n is a, c, g, or t
  misc_feature (1107)..(1107): n is a, c, g, or t
  misc_feature (1258)..(1258): n is a, c, g, or t
  misc_feature (1302)..(1302): n is a, c, g, or t
  misc_feature (1328)..(1328): n is a, c, g, or t
  misc_feature (1353)..(1353): n is a, c, g, or t
  Probeset Number=SeqID_11297
ggtgtgtttgtgtgtgggtgtgtgtgtgtgctttnnttatgtttatnnnnggaggaggagaannnnnacantgancgcggcgagagtaaggatgtgttattaatatatatagactatatatataacagccctagcggagtgtgattatatagctgcgtgtgctttattataaaatattagtaaatatatngccgtgtatgctcatacgagtctaactagcgtggacctcactagtacgcccccgtagcgcgtcgtatgattctcgtatacgacaggccaggtctaggcaacgcgcacgcgtcacatgctagtaaacatcactgctgttacaanctcgaatggaggacacgcgatatcgtatggcgcgtgaagacgcggagcccgtcgcgcgcgtcggcctggctctcagctagctggcgcgcaccgcgccggccagcccgccgcggcgcgagcgccgcctgcgcgtacaggagctgctctgtcaccttcgcgtctcaccgtcctcccgcaccgcccccgcgcctgtatgtctgtccgagtttcggacgcgtcgtacacacaactatctgctacctatgtatatattgtaatatctgtctctntgactacgtctaacgtgcactacggatcagctcatcactggtcgcgtcgacgtgctcatctctcgtgacatctctgtagtccgcatcgtgtgcaaacgcggcgtgcgacttatgtattcctagcgtctacatataacaagataagctggtgcgtgtagctaattacttacgttncgtctgtgtctgcccctcgaccttgtgcatctcagtctctctcagcgagtatgggcggtgtccgccaacgcgcacggttgtgactgcgggggccgcccactagacagcgtgcgtatagcgtcttagatgtcaccatgtgttacctcctcgcgacacatctcgattctagatccgctcncggcctctccctcgctacgctcactatgtcatcgacacactctgccccctgatgcgacaccgcgccgcatcgatccgccgcgaatgcgcgcgcttcgtctgctactcacaccacacgtgggtgcgcgacgagacgtgtgcgggccaaanangnagagacaacccaggcgcgacataataatactcgcgctaaatactatacacctgtcgtgatatagagaaaagcgcggccgtaccgaccactctcctgcgcgcaacgaaacatgatatatatgtaccagtgccatcccttctgacccggatangacgccgccatcgctcgtccacactctcatgtagatagatctantacggtgtgtggtgttgtcgagcagnatgctaacatacctcaccacctccn

SEQ ID NO: 1519 - DNA, 385 bp, Glycine max
  misc_feature (369)..(369): n is a, c, g, or t
  Peptide Sequence Number=SeqID_7850
  Probeset Number=SeqID_11298
aatcgcagttcgcaacagttcaatacacttactgacttacacgaccacacgtataatctgtagatcgatcgctgttcgtaccaccacaatggagtaccaggggcagcacggccacgccaccgacaaggtggaggagtacggccagcctgtggccgggcacggcggtttcaccggcaggcccacggggacgcacggcgcgcagctccaggcgacgagggacgaccacaagaccgacggcgtccttcgccgctccggcagctccagctccagctcgtccgaggacgacggcgtgggcggcaggaggaagaaggggatgaaggagaagatcaaggagaagctccccggcggagcccacaaggacgccaccgncgggcagcagcacacg

SEQ ID NO: 1520 - DNA, 519 bp, Glycine max
  Peptide Sequence Number=SeqID_7851
  Probeset Number=SeqID_11299
gcccaaacctacgctcttcttaagcaacaattgcaagtagctgctaaatccgaggattacaaggaagccgctagaattcgagactcgttgaagctatttgaggacgaggaacctgttttgcgtctgaggagactattgaaggaagcagttgctgaagagagatttcaggatgctgctagttatcgtgatgagctaaacaaaattgctccacactctcttttaaaatgttgcagtgatgctacaacattgggaatcatggttcaagttaggagtgtatatatagagggcagaagtcagccttcaaaggggctatatttctttgcatatagaataagaattactaataactcagaacaccctgttcaacttcttagaaggcattgtattataactgatgctgatgagagaacggaaaatgtctgaggaataggatctgatggtgaacggacttagctacatgatatgataacttgtcagtactctgaatatacatatagtatatatatgtttatagatagt

SEQ ID NO: 1521 - DNA, 1994 bp, Glycine max
  misc_feature (1)..(1): n is a, c, g, or t
  misc_feature (4)..(4): n is a, c, g, or t
  misc_feature (7)..(7): n is a, c, g, or t
  misc_feature (9)..(9): n is a, c, g, or t
  misc_feature (67)..(67): n is a, c, g, or t
  misc_feature (98)..(98): n is a, c, g, or t
  misc_feature (111)..(111): n is a, c, g, or t
  misc_feature (117)..(117): n is a, c, g, or t
  misc_feature (124)..(124): n is a, c, g, or t
  misc_feature (137)..(137): n is a, c, g, or t
  misc_feature (155)..(155): n is a, c, g, or t
  misc_feature (160)..(160): n is a, c, g, or t
  misc_feature (162)..(162): n is a, c, g, or t
  misc_feature (167)..(167): n is a, c, g, or t
  misc_feature (183)..(183): n is a, c, g, or t
  misc_feature (208)..(208): n is a, c, g, or t
  misc_feature (212)..(212): n is a, c, g, or t
  misc_feature (239)..(239): n is a, c, g, or t
  misc_feature (245)..(245): n is a, c, g, or t
  misc_feature (250)..(250): n is a, c, g, or t
  misc_feature (275)..(275): n is a, c, g, or t
  misc_feature (298)..(298): n is a, c, g, or t
  misc_feature (301)..(301): n is a, c, g, or t
  misc_feature (317)..(318): n is a, c, g, or t
  misc_feature (331)..(331): n is a, c, g, or t
  misc_feature (386)..(386): n is a, c, g, or t
  misc_feature (427)..(427): n is a, c, g, or t
  misc_feature (429)..(429): n is a, c, g, or t
  misc_feature (435)..(435): n is a, c, g, or t
  misc_feature (444)..(444): n is a, c, g, or t
  misc_feature (455)..(455): n is a, c, g, or t
  misc_feature (463)..(463): n is a, c, g, or t
  misc_feature (510)..(510): n is a, c, g, or t
  misc_feature (513)..(513): n is a, c, g, or t
  misc_feature (535)..(535): n is a, c, g, or t
  misc_feature (559)..(559): n is a, c, g, or t
  misc_feature (586)..(586): n is a, c, g, or t
  misc_feature (620)..(620): n is a, c, g, or t
  misc_feature (639)..(639): n is a, c, g, or t
  misc_feature (677)..(677): n is a, c, g, or t
  misc_feature (868)..(868): n is a, c, g, or t
  misc_feature (917)..(917): n is a, c, g, or t
  misc_feature (943)..(943): n is a, c, g, or t
  misc_feature (1046)..(1046): n is a, c, g, or t
  misc_feature (1059)..(1059): n is a, c, g, or t
  misc_feature (1108)..(1108): n is a, c, g, or t
  misc_feature (1198)..(1198): n is a, c, g, or t
  misc_feature (1275)..(1275): n is a, c, g, or t
  misc_feature (1502)..(1502): n is a, c, g, or t
  misc_feature (1579)..(1579): n is a, c, g, or t
  misc_feature (1599)..(1599): n is a, c, g, or t
  misc_feature (1712)..(1712): n is a, c, g, or t
  misc_feature (1717)..(1717): n is a, c, g, or t
  misc_feature (1829)..(1829): n is a, c, g, or t
  misc_feature (1832)..(1832): n is a, c, g, or t
  misc_feature (1871)..(1871): n is a, c, g, or t
  misc_feature (1900)..(1900): n is a, c, g, or t
  Peptide Sequence Number=SeqID_7922
  Probeset Number=SeqID_11300
nctntgntnaggacgaggtcgtatcatgcgcgctggggaacggtatgaaataatgatgagtcagatnagtgtgcgctgcgttatcagcagtagtgtcntgacaggactgtntatcantgccttntggtttatctgtngtagtagatcatcgaganctacnancgacnccgacgcatgctaacncgctgctcgttgccgcatgccaagnagtnagcgtggaccctttaagtactatgatnctccgncatgncgcagtcgcctactacagcgcgctngccgatgatagagcacgacgagntcnggcgggctcggagaannatcatgtagagtntagtcgtcagcagtctcgagacagcgcagtcttcgacatgtctatagtatacagnagtacgcactcattcacgcgaacttacacgatcgtagctcngngctgtncagcgacgngcgtcacgctncctgcaanatagtcacatagatgatgacacggtcgtacacgagtatgtcatacgngangtcgtatatcgcatcatcattncatcaaaacatcaacgatcgtgangatcatagccgacgcggcgtgacgacncacggcgtacatcacaacacgacacgcacatganctgtcgcattacaggctantatataatcatatgacgctcacagcgatcagcgatggntgatcgacacgccggtcgtaggacgctattatactacactacagatagtcatcacatcgtgctggatattgagcagatgtaagtgtcgtaggtgatgtcgtatcgacagacatcagtcgctctgccgatcatgctagatcgatcgttaaatactatcgacatatcatattgcgtcgtcggtggtgacggcngtgtcgcgctgcgtactacactatatagtggatataggtcagacaccangactatgtcatgattatatatacgangccgtcgtcagcctatatgactttcagctggcctctctgtctgataacagtattctctcgcccgaatcacaatactactagcgctgagatcatactagtcatntattaatgtatancttctcgtgcaccagcagatccgcgcgcgtctgtctatcgactcgcgcnggcggtcaacatagatcggaccgtgacccgcagagataagtacatatatagtgtgtgcagcgcgacgagcacggcgctacttatgttganccgctatactcatattattatcgcgcgctatagcggttgatgggccgagccgcggccgtcacgcgcgcgcgctctcnctatacattctcacgtactctggtctctcacgcctgacgatgttgtggagacgacgtatatgttatatgactgcgctcgcgcgacgtacggatctgacagtcgacgcgtacgaacattatcatcataaacggcgggggtggcgtccgtcgcggctgcatctacagcgatattaaagcgccgctctcgttcatatcatgtgccgcgcgtactgacattactcatttcntattaatctataatatacatgcgtgcgcttatcaagataggtatataaggatcagacaaagttgacaaccgatacanaacgtgttcgagactaacantaacacactatgcctaacacggtagcctacaaggcgtacacatgaattatgcgcggacgacggcgcgcgatataaacatatatatatcgtcgcaccacgtgacacgttgcggngtcgntatacagtataagtagttaggcctcccgtactacatatcagtaacgccagcgtgcaacaatgcgggagcgcgtgtgagtcgggagtggggagtcgacgattgatgtgtgggncgntgatcatatgtatcaggagcgagatgaccgagcgcgcgncactgtgctgcccctgtcgctgctgtatnttctacgctgtatatcatattataggtcctaatcggtacatggcggcggcgttgcgacgcacgattaaagcgcgcgacgatcgcagcgaccgcg

SEQ ID NO: 1522 - DNA, 355 bp, Glycine max
  Probeset Number=SeqID_11301
acctagctgtatagcaccatactgccaggcagcgcgtatttaccttcgagttcaatctcactttctcctatctagactactcccattcaagtccatccaataggtattgcttatgtcgcgactaacagcgttccacccagacatctacagcaatggaagaatatgtcttgacattctcaaggagcaatggagcccatccctaaccatttccaaggtccttttgacaatttgctcattgttgacggatcccaaacctgatgatccactcttaccaaaaattgcacacatgtactagactgacagggacaaggatgaagataccgcccgcatctggacccaaaagtatgccatggga

SEQ ID NO: 1523 - DNA, 1414 bp, Glycine max
  misc_feature (858)..(858): n is a, c, g, or t
  misc_feature (1151)..(1151): n is a, c, g, or t
  misc_feature (1274)..(1274): n is a, c, g, or t
  misc_feature (1282)..(1282): n is a, c, g, or t
  misc_feature (1410)..(1410): n is a, c, g, or t
  Peptide Sequence Number=SeqID_7923
  Probeset Number=SeqID_11302
ccgctctgctctgcggcattctcttattagcctgacctagtcagcagactcacataaacgtaagatgaaaagagagtcgagataccagcgattaccactcatacgcatgtcagtggttcaatgctggcacatctcccacctcctcctcctctgattgtttgtctgagatcgatagccgtagccatcaacagctagcttatgttactaattatctagtcatccgctccgctcacatctggatcatgttcgtctatatattagtatgatcgtgtatcatgcagtctggctgtcggctcggtacactgctgaatctagcattaggcaacactatagtatcgcacgttacatcttgtgatcacatctatgcatatagtggttgtgttatgtatctgttccagcctagttaaatgatgtctatacattcgatagacgtatatgttaatgatcctatcgcggatatgttcggcacgacgcactacggcgtcaagagtgtatctgtacagagtttgcagaagcgatacgcgtcgactgagagacccaataactaatacacacagcataaaagctacataaacaacattcatcatcctattcctccatacgtggacgaagtaataagagtcaagagcaagtatggcatacatatcgaatgagctactggacctgtcgctcgcaacgccgcaagactcaactgtcacgacccgtcacatacgctatattcttatatgactcctcgtagccctcctccctcataggagttctcattatgtattgctaaataggcgactacataggagatgcaaatagacattccatatgtacatcgtcagcgagacaattagctacgtagcttcgtancagtcattcaggagcacgcatgaaccgagagatcaatcgaactatacgcttcgcatcagtgtctgaagctcgatgccacatatcatcagcatttgacgaactatcaacttcgcacttgaccgtgcacatgagcatccaccaatagtggctccgatatggcatctatcgctatcataactgactcgcagtcataccgtactctcgacaatatataaccatgtgagtatagtacggagacaatacatgagatatggacatatcatactctagtcatctcacccgctctgatcgantctcagacgtctcgacatgccggaacgagatagcgtgaattatcagctactgcgcctggatccgtgctccaactgtcgcatcgtgaaactaacgactcacagagtgatatcaatcagtgtgcnaacatggncgatagagacactgcgatactagcaccgttcagttcaggtgtgcgattcgagtatatgctgtgagctgctatcgctagtgagctccgcatctctctacactctatgtctagtatctctctgacactancttg

SEQ ID NO: 1524 - DNA, 1209 bp, Glycine max
  Probeset Number=SeqID_11303
aaaaataaaaacaatttagaaaaagagtattccttccaatcagatcttcattcaaaaatggttatgaaaagcaagttggacaaatatgaaaagcttgaaaagctcggtgaaggtacttacggtgtcgtttacaaggctcaagacaaaactaccaaggatttgttcgccttgaaaaagatccgtttggaatccgaagatgaaggtatccccagtactgccattagagaaattgccctcttgaaggaattacaacaccctaatgtcgtcagaatccatgatgttatccacaccaataaaaagttgatcttggtcttcgaatatgtcgatactgatctcaagaaattcatgaaccaatttgataaaggattggacgctaaagtcatcaagagtcttctctatcaacttgttagaggtgttgctcattgccatcaaatgaaggtcctccatagagatcttaagcctcaaaatctccttgtcagtcaagaaggtgtcctcaagttgggagattttggtcttgccagagcctttggtatccccgtcaaaaactatacaaatgaagtcgtcactttgtggtatagagctcccgatattctcttgggatctaaaaactactccacctctgtcgacatctggagtatcggctgtatctttgttgaaatgttgaaccaaaagcccctcttccctggaagctctgaacaagatcaattgaagaagatcttcaaaatcatgggaactcccgatgctactaaatggcccggtatcactgatctccctgattggaaggctgaaaactttgaaaagtaccctggtgaatctcttagcaagatctgccctaagcttgatgctgatggtcttgatttacttgacaaaatgttgagatgcaaccctactgaaagaatctccgctaaaactgccttgagccacccattcttcaaggatatccctgagaacctcaagaagttgtacaacaactaagttcactttcagaatttgatctactctttgttgagagaggaactgaactgcagtgttattcaccatcatgatcatattatataaatgggttttttctaaaatctggctgtacaagtctctataaaaataaaaactcttcttccataactgaagaatgagctctccataagtaatcttcataattatagattttttgagcttacagctaaaaattattatctaagaaaaattctc

SEQ ID NO: 1525 - DNA, 1631 bp, Glycine max
  misc_feature (23)..(23): n is a, c, g, or t
  misc_feature (292)..(292): n is a, c, g, or t
  misc_feature (294)..(294): n is a, c, g, or t
  misc_feature (553)..(553): n is a, c, g, or t
  misc_feature (572)..(572): n is a, c, g, or t
  misc_feature (731)..(731): n is a, c, g, or t
  misc_feature (733)..(733): n is a, c, g, or t
  misc_feature (808)..(808): n is a, c, g, or t
  misc_feature (819)..(819): n is a, c, g, or t
  misc_feature (876)..(876): n is a, c, g, or t
  misc_feature (891)..(891): n is a, c, g, or t
  misc_feature (952)..(952): n is a, c, g, or t
  misc_feature (1030)..(1030): n is a, c, g, or t
  misc_feature (1039)..(1039): n is a, c, g, or t
  misc_feature (1215)..(1215): n is a, c, g, or t
  misc_feature (1356)..(1356): n is a, c, g, or t
  misc_feature (1413)..(1413): n is a, c, g, or t
  misc_feature (1502)..(1502): n is a, c, g, or t
  misc_feature (1538)..(1538): n is a, c, g, or t
  misc_feature (1565)..(1565): n is a, c, g, or t
  misc_feature (1631)..(1631): n is a, c, g, or t
  Peptide Sequence Number=SeqID_7924
  Probeset Number=SeqID_11304
gtgtgaggtggggcgttgccttntggcggtaggggcgttaagagagaggaccgcaagccgggcaggtagactacaacacaatcaatcttattgacatatatatattataaagccgtgtgtctccttccgcccttcggtgagtacggcgcgcgagtctgcaggacccacacaaccattactctcgatgaacgcggtcggcgatgagacgtgatgtaagtgatgtaaggacgtccacataaatatattggagtctatatctagttaaggcacgcgcacgacgcgcccggtattntntgaagatatcgtgcgagcgtagacccgttggtggacttcctctgccacacagccccgcgccccttatccggaaaatacgcgtttgtatgtacagcatgttattactcgttaactcgtgtcagaccgcggcgcgcactatatgttcggcatgcacacactatatacgtttatcttattgtcatgtggggatggcgtactcaacagaaacgcgcggccgtctacacacaagttgtagattgctggagtaattaagtcacgnaccgaaacattgttatgtnctcgttacatcgactacgtattgatatcgacgacccgtcggagcggatctatcgagctggactatatatgacgtcatatttatgaacatgcgtcgggtgtgtgcgaatatgtctgcgccgcgccgcacgtatgttatgtggatgcaccgcgcgataaancnagtgacggcgccgacgatgtacacttgcgtacctggtggtcgtttaccaaccgcctacaccggcgtgtctgagcnctctatatttnatacatatttattatcactacccggcgccgcatagtcgtctgttgtgttatttttantgttgtagcactccncgcataatctctctcactcgaacacaccatatatttatgtactgaagataacgatagggtnaaagatcgcgtgccgcaaagctcttcgcgcgctgtagacaatatattatttgaagaagacggccggtgcgcgtgaatngagcggatngtcgcggaggcggtatgaatatgaatatgactgcgcgcggcgacacataatatatatgtcgcgtattctcgcctacttgcgccgataacacgcgcacgattagttattatctacgcgcgtgcctcatgtcgcgcggcgctatgtgtgcgtacacacacacttatatatttatattnattatgtcccacatatttgtgcgccgctccgcgccggcgcccacgatattatacacggcggtgtcggcgctcgggcgattatgagcacctctagatatgagacgggagtgggggccgagaatatcgataattccggcgatngtctatatccgcgtgcgacatatataaagttgataatgacatcgcgacgcggagtangtagaacgagaattatgcgcggtgagagcatacgctgcgcgagtatatataccaggatatttcgcgcgcgctgtgacgtgtgataacgncggtatatatacgcgctgcgatagagttgtgttaantagtgcaggtgtgtaaaactctagatnacaatacagaagcgcatgcggagcgcgatatgtgtatcgcgactctacgtatatgtacagacactn

SEQ ID NO: 1526 - DNA, 1849 bp, Glycine max
  misc_feature (48)..(48): n is a, c, g, or t
  misc_feature (66)..(66): n is a, c, g, or t
  misc_feature (75)..(75): n is a, c, g, or t
  misc_feature (78)..(79): n is a, c, g, or t
  misc_feature (84)..(84): n is a, c, g, or t
  misc_feature (93)..(93): n is a, c, g, or t
  misc_feature (100)..(100): n is a, c, g, or t
  misc_feature (102)..(102): n is a, c, g, or t
  misc_feature (122)..(124): n is a, c, g, or t
  misc_feature (127)..(127): n is a, c, g, or t
  misc_feature (131)..(131): n is a, c, g, or t
  misc_feature (143)..(144): n is a, c, g, or t
  misc_feature (148)..(149): n is a, c, g, or t
  misc_feature (153)..(153): n is a, c, g, or t
  misc_feature (185)..(185): n is a, c, g, or t
  misc_feature (188)..(188): n is a, c, g, or t
  misc_feature (194)..(194): n is a, c, g, or t
  misc_feature (201)..(201): n is a, c, g, or t
  misc_feature (246)..(246): n is a, c, g, or t
  misc_feature (265)..(267): n is a, c, g, or t
  misc_feature (301)..(301): n is a, c, g, or t
  misc_feature (309)..(309): n is a, c, g, or t
  misc_feature (315)..(315): n is a, c, g, or t
  misc_feature (337)..(338): n is a, c, g, or t
  misc_feature (342)..(343): n is a, c, g, or t
  misc_feature (386)..(386): n is a, c, g, or t
  misc_feature (396)..(396): n is a, c, g, or t
  misc_feature (399)..(399): n is a, c, g, or t
  misc_feature (483)..(483): n is a, c, g, or t
  misc_feature (516)..(516): n is a, c, g, or t
  misc_feature (524)..(524): n is a, c, g, or t
  misc_feature (529)..(529): n is a, c, g, or t
  misc_feature (583)..(583): n is a, c, g, or t
  misc_feature (610)..(610): n is a, c, g, or t
  misc_feature (761)..(761): n is a, c, g, or t
  misc_feature (813)..(813): n is a, c, g, or t
  misc_feature (818)..(818): n is a, c, g, or t
  misc_feature (847)..(847): n is a, c, g, or t
  misc_feature (950)..(950): n is a, c, g, or t
  misc_feature (974)..(974): n is a, c, g, or t
  misc_feature (980)..(980): n is a, c, g, or t
  misc_feature (1031)..(1031): n is a, c, g, or t
  misc_feature (1089)..(1089): n is a, c, g, or t
  misc_feature (1235)..(1235): n is a, c, g, or t
  misc_feature (1256)..(1256): n is a, c, g, or t
  misc_feature (1267)..(1267): n is a, c, g, or t
  misc_feature (1273)..(1273): n is a, c, g, or t
  misc_feature (1338)..(1338): n is a, c, g, or t
  misc_feature (1374)..(1374): n is a, c, g, or t
  misc_feature (1574)..(1574): n is a, c, g, or t
  misc_feature (1694)..(1694): n is a, c, g, or t
  misc_feature (1774)..(1774): n is a, c, g, or t
  Probeset Number=SeqID_11305
caccctcgcacacatcataattatatatttaattatatatctacaccntatttctactcacaattntaatgtttnatnnttctnttgtttttntgccacncncaatctacaccgctcccttnnnaantttnattttcatcttnntttnncccncgccaccgctagcacacacacacagaaaaaanaanacacanttgtaanactaatatagtaacatgatgacatactacgactcagaatgtgcanatatactatttcgactctnnngcctacccgtgtggtgagatgtgcggctgctggnggtgtatntcacgnttatccgctccgcatgtacagnnggtnnggggtgtgcagggcgagctgctgggtggagtagaacaagaaanacaagaatanatntgagcggaggtgtgtgaactcatcgatatgtgctcgggatgctgcgccagatgacatatagcatacacgatctaagatgacttntagtatgagacatcataacgataaatatatggngaagaatntaaanattgtgcgttgtggtcgagcgtctgtgatagcggagtgggtcgagcgggtgtgngtgtgcgtattagattgtcggagtcgngggtcgcgcgagtacgacaggccgcgtactgccgcgcgcctccgtacgccgtcggcgtgacgagaggagaagcgaagatgagagagtacacgaaggatgaagagaagatgagaggatatatcctcgtgtggatgatgactcgacgcgtganttgtagtaccacgctctatcgtctatgtgtgagatatgtgtgttatattatntgtgnttagtgtgtgttgatgtgttagagtgagngcgtgcgattgtagtcatggacggtgccgcgggctctgcgcctcgcgtgttcactcgtgcagctgagatgcagcaggcgcgaccacgccagaggcgcgggagnacggatgaggatgtgagtgaatantagaanatatgatgggagatgtgactcagataactgcacacagattcacgtatgatngtaggaactgcgacatgtgtatctgtaataccactgagctgtatagcatgcgaaatantggtaccaatagagttttatgatttatatatgcactccagatatagtggaagtatgatgggtaaagtagatacaatgtaatgttagatgataaacatatgttatctttatgataccacggatatgctgttatagcacgacaaaaangaagatcgcgagacagatacntagtagcgctnatgagnagcgaggatgaagagatgagagtgagcagatctacaatactgctcatattctcactatcacatcntaatcacctatagcgtgagcatgcgccgagtggagncgcggcgacgatcgtgtgcgcgtccggccggatgagaagttaacataatatatctatattgtcctaccagaggcaatatgctagttaatacataagattaacaggtcagacgcctcgcggctaatactgatatgatgtcaatggatgtcgatagagacaaatacataatctacattcacacacacaacaacacggccaantaataactatatgagatggagcgacacaccagacaacaacacgacccgcactatatacatatagcagtacgagagttgaatagatacacaacagagacaatagaagatcacgcgaacaanaacatgggaatctggatgcgtgaccatattcccgcgttgttcgaaactctgtgtgttcgttgcggtgcgatgtatatctngtgtgaactatccgactagtcttatgatatattatatgatatgtacgcgtattacgtatcagctaaacatccgcc

SEQ ID NO: 1527 - DNA, 1945 bp, Glycine max
  misc_feature (1)..(1): n is a, c, g, or t
  misc_feature (11)..(11): n is a, c, g, or t
  misc_feature (43)..(43): n is a, c, g, or t
  misc_feature (45)..(45): n is a, c, g, or t
  misc_feature (64)..(65): n is a, c, g, or t
  misc_feature (69)..(69): n is a, c, g, or t
  misc_feature (115)..(115): n is a, c, g, or t
  misc_feature (119)..(119): n is a, c, g, or t
  misc_feature (126)..(126): n is a, c, g, or t
  misc_feature (142)..(142): n is a, c, g, or t
  misc_feature (145)..(145): n is a, c, g, or t
  misc_feature (149)..(149): n is a, c, g, or t
  misc_feature (200)..(200): n is a, c, g, or t
  misc_feature (211)..(211): n is a, c, g, or t
  misc_feature (216)..(216): n is a, c, g, or t
  misc_feature (226)..(226): n is a, c, g, or t
  misc_feature (316)..(316): n is a, c, g, or t
  misc_feature (322)..(322): n is a, c, g, or t
  misc_feature (325)..(325): n is a, c, g, or t
  misc_feature (363)..(363): n is a, c, g, or t
  misc_feature (427)..(427): n is a, c, g, or t
  misc_feature (445)..(445): n is a, c, g, or t
  misc_feature (464)..(464): n is a, c, g, or t
  misc_feature (468)..(468): n is a, c, g, or t
  misc_feature (476)..(476): n is a, c, g, or t
  misc_feature (480)..(480): n is a, c, g, or t
  misc_feature (535)..(535): n is a, c, g, or t
  misc_feature (552)..(552): n is a, c, g, or t
  misc_feature (594)..(594): n is a, c, g, or t
  misc_feature (614)..(615): n is a, c, g, or t
  misc_feature (619)..(619): n is a, c, g, or t
  misc_feature (630)..(630): n is a, c, g, or t
  misc_feature (688)..(688): n is a, c, g, or t
  misc_feature (827)..(827): n is a, c, g, or t
  misc_feature (838)..(838): n is a, c, g, or t
  misc_feature (848)..(848): n is a, c, g, or t
  misc_feature (863)..(863): n is a, c, g, or t
  misc_feature (910)..(910): n is a, c, g, or t
  misc_feature (980)..(980): n is a, c, g, or t
  misc_feature (1025)..(1025): n is a, c, g, or t
  misc_feature (1072)..(1072): n is a, c, g, or t
  misc_feature (1084)..(1084): n is a, c, g, or t
  misc_feature (1086)..(1086): n is a, c, g, or t
  misc_feature (1093)..(1093): n is a, c, g, or t
  misc_feature (1120)..(1120): n is a, c, g, or t
  misc_feature (1130)..(1130): n is a, c, g, or t
  misc_feature (1206)..(1206): n is a, c, g, or t
  misc_feature (1241)..(1241): n is a, c, g, or t
  misc_feature (1323)..(1323): n is a, c, g, or t
  misc_feature (1358)..(1358): n is a, c, g, or t
  misc_feature (1444)..(1444): n is a, c, g, or t
  misc_feature (1490)..(1490): n is a, c, g, or t
  misc_feature (1513)..(1513): n is a, c, g, or t
  misc_feature (1535)..(1535): n is a, c, g, or t
  misc_feature (1546)..(1546): n is a, c, g, or t
  misc_feature (1691)..(1691): n is a, c, g, or t
  misc_feature (1807)..(1807): n is a, c, g, or t
  misc_feature (1817)..(1817): n is a, c, g, or t
  misc_feature (1861)..(1861): n is a, c, g, or t
  misc_feature (1890)..(1890): n is a, c, g, or t
  misc_feature (1901)..(1901): n is a, c, g, or t
  misc_feature (1909)..(1909): n is a, c, g, or t
  misc_feature (1913)..(1913): n is a, c, g, or t
  Peptide Sequence Number=SeqID_7925
  Probeset Number=SeqID_11306
ncaaccggatngagatctgtcgtatctcacgttcgactgcatnantgtgctactgaggtagtgnnttanttagtcgttgaagtgttcatctagcgtcgggcatgcggctgatganatgngagtagnaggctgagtgctagcngtnatcntcgtatgtcacgatgacgatgtcgagtactctgatcgctagtatctacaangctgacgatgnagganatagtctagnatcatcagatgatctagtcgcgagctggagatgagcagtacgatttggatcgtgatctcagtgtaataaagggtacactagtcgtatcgnagactntantcgtgatatgtgtgctaatgagtcgtgtagttacgtgntcgcgagtagcagtgagtagtagacgcagagagtgagcgacgtatgtagcaacgactgaagcancagagctagtatgacgangtatacgtacataccgatngcantagcaggnatcngcggagtgaagctcagcacgtacactactgcatcgtcgggcagtgcagatagtcngtgatgtatcgtgcagnaccatgcgttagcacaatgacacatcagtgaaggatgtcctngtgttcctgagcgtcgtagnntacncgtcataatcnacacatcgcactgataaatcgtcgagctgtgagtgtggtgcgatatatcacactgtgntcgatatcgtcggagaggtatatgtatatcttgatgacttactagtatgctcgtagtgcgcggctagagagaagtatgtgctattcacgacgagcatagtaggtagacatgtcatacagccgttgtcgcgatagaacgngtaacgacacngcagagagancgcagtgacacatgncacgtcgactgcaatcacagtatgcagtatgttagtcgttcgactancgaagtgtagagtgtgtgagtactaatggagatatcgtgtcgtggcgtagcccggcgcagtctcgtgtgntcgatatactacgtgttacatcgacgtcaagcagcagtgtagatngtgcgactgagcgcaagtcaaatcaatctgagtagcagatcatatanccacaaatgagngnacgaagngtagtatgatcagaggtcatgagcggntacagagatnaggttgacgtgttgtcgccgccactatatatgacccggagagcgtcgttgcttgaatagggtcacagagtcttctnggctagacatgattgagctttcgagtgtatctcgngacggttgataatatatctagttggtctgctaatggttggtcgcgtacacctacattattgtgtgactcgttcgattgtagncgcgcatgatgttacagaactgtcatgtataatgntgacggttatgtagtatcgaataagtgaggtgcgaggatggggccgtctagagcatatatgtgggtcatgacagtactattgatgntgcgactgcagtcaataagcaatacacaatagtatatcagagatgngatacagcaatgcatgtgcgtgncgatgtgagagaggatgaccanagcagcccatnagtagatagggctgtgatattcgcagtgtatggtcgtcatctgcgaatagagtgttcgagtcgtataagcatagtgcagtagctctgagaggtgatatatacctgctggtgctagacttgagatgctgtcgagctgatctcgatncgagacatcctaactcgatgatgacataagagggatcacaccactatgcgacgctcgagcgggcgttcatagtgcgtgcggtagtatctcataggacagaataaccatcgcactcnccggacgcgncgtgaagatcacgcgcaggtacacaccctcatttatcgcgcttnacggatatgtcatgtggaggtactagatngtatcagcagnggtggagngacngagtgtagggagtggggaggcgggtggggcgg

SEQ ID NO: 1528 - DNA, 1868 bp, Glycine max
  Probeset Number=SeqID_11307
aagttgtaattaaaaattaaaacattattttttgagaagccgtaattcctaaaatggaaggaatcatttctggcgtctggaacgtcctcttacaatatttcagatcttataaagtcgcaaagactgctgtcctcaactatatcacccctttcactgataagttcgaccttgttgacatcttgcttgtttggactgttatcgttgtcattggcactgttatttacagaaatgtgaattatgccagaaagcacggttttagaaagactgtcactgcttggttcttcagaagactcaagagaatctcttttattaccaacaaaatcgatggtgaaatcagcaaattagcttcctctcttgaagctgatatccaaaagcatagagatgcctccaagaccacccatatccccacaactggtctcagtgaagaagctctcgttaaaaaacttgctcaatggcaaaaaattgatcacaaaatctatggtgaaaagaaaatcactggttgcatctattataatgaaggtgaaaaattacaaaccattgtcaaggatgttgctaaggaatatttctatatcaaccctcttcatttcgatttgttccctactgccaaccaaatggaaggtgaagtcatctacatggtcaagaacctctacaatggtgatgataagagttgcggtatcctcagttctggtggtactgaaagtatcatgattgctatgctcgcttacagagaacaaggaagaatcaacggaatcttcgaacctgaaattgttgcccctatcactgctcacgtcgctttcgaaaatgctgctttctactacggaatgagaatgaagtgggtccctgttgacatcaagactggtgttgttagcccccatgatatcaagaaagccatctctaaagataccgtctgtgttattggttcttatcctaactatccttatggtacttgcgaccctattgaacaacttgccgcaatcgccaagaagaagaaggtcggtttccacactgattgctgcctcggtggtttcgttgctcctttcgctgaaaaattcggtgctatgagcgaagtcttcgatttcagagtcccaggtgttacctcaatctcagttgatcctcacaagtacggtcttgctcccaagggtgtctctgttgttcttttccgtgatagaaaacttagaggtggctcattcttctcttgcactacttggcctggtggtatttacagtactcctactcatgctggtagtagaggacatgccccagttgctggtgcttgggttgctcttcaatatactggttacaacggttatatggataaggctggaaagattattgaagctaccagaagagttgccaagaaaatctctgaaatccctgaacttcaagtcgtcggaaatcctcaattgggatctgttgcttttgtcaccaagactaacaagttgagcatttatgatttggttgataagattggacaaagaggctggaaattagctgccctccaattgcctcctgctgttcatttgtccattaccaactacaatatcggccaaattgaagactttatcgcttctgttaaatggggtgtcactgaacttttgaaggctggcccacccaaggtccaaggagaattagcccaaatttacggttccaatgccaagttacccgagagtataatgcaagatggtgccaaagtcatccttgaaggactcttgaaaccttaagtttataaaaggaattatcttcatctcaaaaagttaatgaaaaaaaagtttatatagttaaaagtaacctttatattcatttatgattggttctcatataaactattatcattgttattatgacattttattcatcatttattattc

SEQ ID NO: 1529 - DNA, 1748 bp, Glycine max
  misc_feature (9)..(12): n is a, c, g, or t
  misc_feature (16)..(17): n is a, c, g, or t
  misc_feature (23)..(25): n is a, c, g, or t
  misc_feature (27)..(28): n is a, c, g, or t
  misc_feature (30)..(30): n is a, c, g, or t
  misc_feature (32)..(36): n is a, c, g, or t
  misc_feature (38)..(41): n is a, c, g, or t
  misc_feature (44)..(44): n is a, c, g, or t
  misc_feature (52)..(52): n is a, c, g, or t
  misc_feature (75)..(75): n is a, c, g, or t
  misc_feature (92)..(92): n is a, c, g, or t
  misc_feature (101)..(101): n is a, c, g, or t
  misc_feature (120)..(120): n is a, c, g, or t
  misc_feature (130)..(130): n is a, c, g, or t
  misc_feature (198)..(198): n is a, c, g, or t
  misc_feature (214)..(214): n is a, c, g, or t
  misc_feature (235)..(235): n is a, c, g, or t
  misc_feature (270)..(272): n is a, c, g, or t
  misc_feature (274)..(274): n is a, c, g, or t
  misc_feature (302)..(302): n is a, c, g, or t
  misc_feature (314)..(314): n is a, c, g, or t
  misc_feature (430)..(430): n is a, c, g, or t
  misc_feature (560)..(560): n is a, c, g, or t
  misc_feature (625)..(625): n is a, c, g, or t
  misc_feature (820)..(820): n is a, c, g, or t
  misc_feature (1024)..(1024): n is a, c, g, or t
  misc_feature (1030)..(1030): n is a, c, g, or t
  misc_feature (1087)..(1087): n is a, c, g, or t
  misc_feature (1194)..(1194): n is a, c, g, or t
  misc_feature (1234)..(1234): n is a, c, g, or t
  misc_feature (1239)..(1239): n is a, c, g, or t
  misc_feature (1274)..(1274): n is a, c, g, or t
  misc_feature (1338)..(1338): n is a, c, g, or t
  misc_feature (1364)..(1364): n is a, c, g, or t
  misc_feature (1375)..(1375): n is a, c, g, or t
  misc_feature (1379)..(1379): n is a, c, g, or t
  misc_feature (1454)..(1454): n is a, c, g, or t
  misc_feature (1464)..(1464): n is a, c, g, or t
  misc_feature (1565)..(1565): n is a, c, g, or t
  misc_feature (1607)..(1607): n is a, c, g, or t
  misc_feature (1624)..(1624): n is a, c, g, or t
  misc_feature (1665)..(1665): n is a, c, g, or t
  misc_feature (1679)..(1679): n is a, c, g, or t
  misc_feature (1708)..(1708): n is a, c, g, or t
  misc_feature (1746)..(1746): n is a, c, g, or t
  Peptide Sequence Number=SeqID_7926
  Probeset Number=SeqID_11308
ttttttttnnnncttnntttttnnntnntntnnnnntnnnnttnttctgtcnagtgtctgtgcgtctttgtgctngttcttatgtgacaccntcctacccnccaacgtatcgccttggancaacgctaanctaacgctgtatcttggatgttgctcgttgtcccgcgtaatatataaatatttaactactgtattacncactcacgtgtcactnagagtgttcacaggatagatnaggtataacagtaatcaacacacatatcaacaacnnnantataacacgataccgtcgggacacgcanatagcacggccnctgacacgtgccggggagcatatgagactgcgaacggtgaagatacggtcatatgggtcagtagcttataccatctcatcgatctcattaatataagaagtgatgtacagagagtntattcgaaatatgtcctgaggttgagatgaagtcgctgaatatatacaagtatccggctattcaattccaagtagaagagtactactgtacatacggtgtatttctactaacatcgtctctacaccagantacactatcatatataactcttcactactcatacgccataaccatcactcctacttctactattntactcctatacgcgtatatctactatacactatatatatatttatatgatatgttctcttacttatttattcgcgcaccgcgacacacatacgctactctagcctgtccatagaatactcggacattctactagttgttcatcgtctctcgcgcgagactatctgacttctgtgtatctacgtcactatgtattntctctctgtctatcgcgtcgtatttctcgtccatctgcgttcgttgctcggcgcactgtcgtattgatctgtatatgtttatgtatatgatatatatctctcgagtatagataattcgcggtcgtcgtgattcgcgtgtgacgtatactcagtatagatacatatagtagaggtcgttggagagaagcgatagagatgtgtggntgtgtntgatagcactacacaaccacactgcgaaatgtgcagtatggctatctcgtactctgncgcacatgcagtattgctacgttactatactatatactctatcgtctccgtactctatgatcgtgcttatctcggcgcgccgcccctgctgagtacagctacaatancacggacagtaccagtgcgctctgctacactactgatggncgtgngtagtagcccagagaagactaaataatagcaatanatcacagatgtcgtcggatgtattccacgtcataaggtagatagtgtacagatggatagagatnatattgtctgatggacgaagcgggantctgttgcatnatcnacgcgtatctctgacgacttacatatcgagctgcgacgacatatatgataattgatatctgtgttctagtgtccngcatggcagnagtcatgacgcacacgtcatactcatgtggtgcgccgcgtgcagagaggtagtgcatatccactgacacacagaccacataggcacctgctgctagccggncttcgttgcactgatacgcatatatcaatgtgcatctaccangcgctctatcgacagtncgggagcagcgaatagatcgacttcatatcccatgcgatcnagcatagacatatngctaacgcgtacacacaccgcaccgccancgatgcgtgattcatctatctaccgctctcgtcacgtntg

SEQ ID NO: 1530 - DNA, 379 bp, Glycine max
  Probeset Number=SeqID_11309
aagaagaacgtcagatgatccctttgccaagaaagattggtgtgacaatatagctccttctgttgtttgagtgaaagaggggtggcaacaccctccttctccgtactccggaaccaggatggcttgtgaaggactcacgcttacagtgctcgaggtgtccttggctgatcttcaaggggatgaggatcatgcattcaataagattatgttgagagctgatgatgtgcaagggaagaatgttctgacaaatttctggtgaatggatttcacaacagacaagctgaggtcattggtgcgaaaatggtcatctcttattgattcccatgtggatgtgaagacagctgactagtacacattgtagatgctctgcatcggatat

SEQ ID NO: 1531 - DNA, 1674 bp, Glycine max
  misc_feature (1)..(2): n is a, c, g, or t
  misc_feature (1598)..(1674): n is a, c, g, or t
  Peptide Sequence Number=SeqID_7927
  Probeset Number=SeqID_11310
nnattgttgacttcacagatctttttttttttttttttgaactttaacaagtgcacatatgccattcataaagttaaggcttccctagtgaaacacaatcttccgagcctcaacaaaataaaaaggagctctcatcaatattaatatcatgttttcataaatgaggaaggtaacctcaccaaagtatcttttgtgagatcactcagtccacctcccataaaattatttccacacttgacaagtcaattaaagaatctgtacttggagcagggacattacattattgtctcttgaacaaaaacacaaagggtgtagccatggcaaaagatgagatagtaagagcactctcttactgtattcatggcagatcatcagagacttcggatacacgctgtagaggtggaagcaccactgcggccaaagattaccaatggtagctctcaagatcagaaaagggtagttcaggtgcagtaccatcctgcattactacatgttatgctagcaatacactcaacacccccaagaaggctgcatttgcaagcgccatgtgttgaacactcagcccaattatttaattgacagccttcgagattatgcttaagggtagaaaagggatttagtagaaatccttattgtgtgatgatgctgttagagcaggggacaagcttaacggaattgattctgtgatattcctcttgcacaaaaagataagaattctgttattagaggatagtataaataagtatgtaaataagccagaatcatgaatgaaaatatcccttgccttactatttcctcttttctcttttatggaggccctggtcctcgaaaccagctagctcgatcttcaagtgaagtagctcattgatgacacaaacttctatgtatggtaatataaccattaacaagttaacaatttactattttcatctagcattggagtataatactttaataaatactaatcagaaagagagaaacatcatctaatacaaggacccttgcacataatcagaaacatgcagttactctattgaccaccgggaataatattcatcttttacaaattactaccattcaccttgattcaacaaagcagacactcaacagccaccaagcagatttgcttatttgtttatgcaataaattttttatgactagatgtggcaaacggggggggggcctacgtagctgacgtcgagggggggtcccggtacattcttttcgcaaacattcaccccctttttacatgtctgcagtcagctattatatagcaatttgtttttttcttttttgtaaattgtagtcaataatctgtttatagattttgtgtaatgtgtttgagggaaaattagatcattagtgatcgaatgtttttcctcctggatcatctattgtacaggtgatcatttttccatagtttttgtctaaatggtgtttaaaagatcatttacatagtaatttgccaaacaagggagaaatgaaataacacctggtttgatgcataatggattatgtttgaaagtcatcatactgtttatcatctataatagatgtttgaaacaaattccaaaaaaaaaaaaaaaaaaaaaaaaaannnnnnnnnnnnnnnnnnnnnnnnnnnnnnnnnnnnnnnnnnnnnnnnnnnnnnnnnnnnnnnnnnnnnnnnnnnnn

SEQ ID NO: 1532 - DNA, 277 bp, Glycine max
  Probeset Number=SeqID_11311
tgctctcttcttcactgtggttaggggcacatatgttccatgtaagacaccccccttaactcccggagacccacctgtcccaaaggcaccttccccccagcaagattcttgccccaacgacactgttaagattgttgtgtgagcagatgtgttaggcctgattaacgtgcaactatggaaggcaccaaaaaccccatgctgcagcctcattcagggttttggtgatcttgaaactgcagtgaggctttgcactgctctcaagggtaatgtgttgggg

SEQ ID NO: 1533 - DNA, 1300 bp, Glycine max
  misc_feature (1)..(1): n is a, c, g, or t
  misc_feature (830)..(830): n is a, c, g, or t
  Peptide Sequence Number=SeqID_7928
  Probeset Number=SeqID_11312
ngagcctgaggcgacggttctggcagttgccctcgtctcagcctcgcgtatgtttccttgctctttcatcttttcctctttctctatgcaaataaccgattgatcaatcgaatttttttgtgattcaatttcgctcttttttctcggcgcgagaaatcatggctttgggaacggtgactcgacggttggggaataaactcttgccggcgttatctccttctcccaggcttctacattctcacgccaccagtttcgggttcaaacaagtaaacgaagaagaaaaggctcgcatggttggtgacgtattcacgagcgttgcttcaagctacgatctcatgaatgacctaatgagtgctggtttgcatagattgtggaaggataggttagtttccaagctgaatccgtttcctggaatgaagcatcttgatgtggctggtggaacaggggatgttgcttttagaatcttggagaacatacacaaagttaagctgagaggacttcgaggtgcttttcaagatactttagaggcagaaactcagatatatgtatgtgacattaaccctaagatgttaaatgttggcaaacagcgggcctcagagaagggttttggagaagatggttcccttgtatgggtggagggaaatgctgaaagcttgagtttccaaaatgattcaatggatggttatactattgcattcgggataagaaatgttacacacatagagaaagtactcagtgaagctcatagggtattgaaaccgggcggcaggtttccttttgccttgaactggagtcatgttggtattccccgatatttaaagatttttatntggaatatttttccttttctcagttattccccaacatggagttgctggtgaccgggactcctatcagtacttagttgagagtatccggcgtttcccctcacaggaaaaatttgcatcgatgattgcggatgcagggttccagaaagtagagtatgagaatctagttgggggagtggttgctatccattcagggttaaaaatctgatatattttttaactttcctctcgattattattatgtctaataattcatgcattttttctccaccgtctataagcatggagactgaagatcaaatgtaatgttattagaattcatagagaagatttgagttgtcagaatgtgtactgtaatttcgatagtatggcgtctgcaattttttttacagggactcaagtttttcttgaaacatgtatatacgcctatcatacgaagagtaaacagatttgattttttttaccaaaaaaaa

SEQ ID NO: 1534 - DNA, 586 bp, Glycine max
  Peptide Sequence Number=SeqID_7929
  Probeset Number=SeqID_11313
gaaatccaagaaaccgatatcggtaaggactgtggtttgttcgaaatctccaagatcggtgatgaatacttcacttacttccttgaatgcaaggctcccaaggcctgtactatcctcttgagaggtgcctcaaaggacgtcctcaatgagctcgaaagaaacctccacgatgctctcgctgtcggcagaaacatcatccaaaaccccagactcgttcccggtggtggtgccatcgaaatggaacttgcccacagactccaagaaaaggcaaagaccattgaaggtctccaacaactccccttgaaggccctctcttatgccttggaagttatccccagaactttggctaccaactgtggtgctgatgtcgttagaatcatcactgaattgagatccaagcacgctggtgaaggtggcaaattctttggtatagacggtaacgccggcaagattgctgatatgagagaagccaacgtttgggaacccgcagttgtcaagatccaaactttcaagactgctattgaagcttctgctatgcttttgagaatcgatgatgtcgtttcaggtttaaaaaaaaaaaaaaaaa

SEQ ID NO: 1535 - DNA, 1974 bp, Glycine max
  misc_feature (1)..(1): n is a, c, g, or t
  misc_feature (15)..(17): n is a, c, g, or t
  misc_feature (23)..(23): n is a, c, g, or t
  misc_feature (25)..(25): n is a, c, g, or t
  misc_feature (28)..(34): n is a, c, g, or t
  misc_feature (40)..(41): n is a, c, g, or t
  misc_feature (50)..(50): n is a, c, g, or t
  misc_feature (61)..(61): n is a, c, g, or t
  misc_feature (65)..(65): n is a, c, g, or t
  misc_feature (101)..(101): n is a, c, g, or t
  misc_feature (127)..(127): n is a, c, g, or t
  misc_feature (156)..(156): n is a, c, g, or t
  misc_feature (158)..(158): n is a, c, g, or t
  misc_feature (168)..(168): n is a, c, g, or t
  misc_feature (219)..(219): n is a, c, g, or t
  misc_feature (223)..(223): n is a, c, g, or t
  misc_feature (235)..(235): n is a, c, g, or t
  misc_feature (242)..(242): n is a, c, g, or t
  misc_feature (276)..(276): n is a, c, g, or t
  misc_feature (286)..(286): n is a, c, g, or t
  misc_feature (301)..(301): n is a, c, g, or t
  misc_feature (313)..(313): n is a, c, g, or t
  misc_feature (323)..(323): n is a, c, g, or t
  misc_feature (328)..(328): n is a, c, g, or t
  misc_feature (345)..(345): n is a, c, g, or t
  misc_feature (365)..(365): n is a, c, g, or t
  misc_feature (377)..(377): n is a, c, g, or t
  misc_feature (392)..(392): n is a, c, g, or t
  misc_feature (408)..(408): n is a, c, g, or t
  misc_feature (413)..(413): n is a, c, g, or t
  misc_feature (418)..(418): n is a, c, g, or t
  misc_feature (441)..(441): n is a, c, g, or t
  misc_feature (496)..(496): n is a, c, g, or t
  misc_feature (520)..(520): n is a, c, g, or t
  misc_feature (527)..(527): n is a, c, g, or t
  misc_feature (541)..(541): n is a, c, g, or t
  misc_feature (555)..(555): n is a, c, g, or t
  misc_feature (641)..(641): n is a, c, g, or t
  misc_feature (646)..(646): n is a, c, g, or t
  misc_feature (686)..(686): n is a, c, g, or t
  misc_feature (690)..(690): n is a, c, g, or t
  misc_feature (702)..(702): n is a, c, g, or t
  misc_feature (731)..(731): n is a, c, g, or t
  misc_feature (736)..(736): n is a, c, g, or t
  misc_feature (752)..(752): n is a, c, g, or t
  misc_feature (901)..(901): n is a, c, g, or t
  misc_feature (969)..(969): n is a, c, g, or t
  misc_feature (1080)..(1080): n is a, c, g, or t
  misc_feature (1086)..(1086): n is a, c, g, or t
  misc_feature (1341)..(1341): n is a, c, g, or t
  misc_feature (1355)..(1355): n is a, c, g, or t
  misc_feature (1377)..(1377): n is a, c, g, or t
  misc_feature (1549)..(1549): n is a, c, g, or t
  misc_feature (1614)..(1614): n is a, c, g, or t
  misc_feature (1684)..(1684): n is a, c, g, or t
  misc_feature (1703)..(1703): n is a, c, g, or t
  misc_feature (1764)..(1764): n is a, c, g, or t
  misc_feature (1771)..(1771): n is a, c, g, or t
  misc_feature (1796)..(1796): n is a, c, g, or t
  misc_feature (1840)..(1840): n is a, c, g, or t
  misc_feature (1934)..(1934): n is a, c, g, or t
  misc_feature (1943)..(1943): n is a, c, g, or t
  misc_feature (1946)..(1946): n is a, c, g, or t
  misc_feature (1958)..(1958): n is a, c, g, or t
  misc_feature (1974)..(1974): n is a, c, g, or t
  Peptide Sequence Number=SeqID_8000
  Probeset Number=SeqID_11314
ntttttttttttttnnntttttntnttnnnnnnnttattnnttaatcatnatattatattnttantagctagtatcatatatatagagtattatctagcgntacataaatatcatcaaacagtacgnatctgcgtcagtgtctcccacatcgtaangngaatagatgnatagagatagacggtattacatgaaagatatattaagtatagtgatatgantacncgcactagggcngctgctnagtgttagtgataacaattcggagtagatcgcgnaacgtcgcgntctactcttcagctngctatagtggtnaggtgatggncgtcnagtgtcgtgtgtgtganagtgcacatgtctgcgctgnactgcggtcggntcgtgcgtcgtgtcntagttcatgatagagnacttncaacntgatacaggtagagtgacactgnatacatcgagagtatgtacactctagtccgtgcgctgtgctgggctctgtgcccncgtctctcttcgcatctcttgctntgtgcgncgctgcctgctgtngtctgtcctctgtncatagacagtcagacgcagatgtatgatcgagtacgacatgagccgcggcaccgagtcagtgcatacatcgctctgcgatgcgtcncacancatgcacacccgacccacacagtccgacgacagacagcgngatnactagcgtcgangatttaaataatacaatgctgatagactnagtangaatgacatgacatanagacgatatctcacgtacagactactagatacgcagcaggatgaacagatcgatacatacgagtaatcatcacatacgcagatgactggaacacattgcaatatgcgcttccgatacgtacactcacccacagcctccgcaagcagatntgctctatgtgtagctcacgatcactcatccgatcattgatactacgcctatctattatcctcctccnctctaaactgactccactatatactgacctacaagtatagcgtacaacatcactgatcatatcacactactctataagtatctactaactcagactgatatgctaacatgnattatntctgacatagactacagcgaggtgtcgtatcgagttcttcggaggacgtcagtgccgcggcgtgcgtcggcgtagtgggacagactagagtgcgtgtgagagactgcacacgtccgcttctcatagtgctggtctgccgcgctattgtcacctgctcatggacgtgcatcacacatcgaattgtgtcgcgctatctctagctcgctgcatgtgctgtgtactgtggcgtgtgactctcggctcgccgatcgctcntgacgatacgtcgntcagtcagtagtgcggagctantatcgactgctgtctatcgtataatgacacaccgcatatggtatgcagctccgaggatccagctgcacgcatctgtatctatacccacacacggagagcacactctacgctcaccatccgacactgtaatctgcatatgtgtgcagactctcacatcgacccactcacagtnctactcgcacatcgcacacgcaccgcactcacctctctcgcatcgccccgcgtcgtgtattctgntttgctatcgtcatactgcgtcgctaactactcatatgttatctcagtgatgcctcgctcgcttgatgtnatattatgcgactcgtaangacgcattgtctcaatgtgtatgatgacggcatctgacggcacgtgtaggactagatcgtncgtgctncgatgacgtcatgatgcgctctcantgtgacagtgtgtgatcatcactgcccaagcgagagagatgtantatctgactgacacgaaccacgatagatgatcgtcgagtagcgagagacgagcatatatactagctaccagatatacttcaactcacatacgcnactcatctnatnatcatacactcntctcgtacatatgtcn

SEQ ID NO: 1536 - DNA, 1605 bp, Glycine max
  misc_feature (25)..(25): n is a, c, g, or t
  misc_feature (32)..(32): n is a, c, g, or t
  misc_feature (57)..(57): n is a, c, g, or t
  misc_feature (70)..(70): n is a, c, g, or t
  misc_feature (168)..(168): n is a, c, g, or t
  misc_feature (188)..(188): n is a, c, g, or t
  misc_feature (237)..(237): n is a, c, g, or t
  misc_feature (242)..(242): n is a, c, g, or t
  misc_feature (269)..(269): n is a, c, g, or t
  misc_feature (482)..(482): n is a, c, g, or t
  misc_feature (488)..(488): n is a, c, g, or t
  misc_feature (506)..(506): n is a, c, g, or t
  misc_feature (521)..(521): n is a, c, g, or t
  misc_feature (568)..(568): n is a, c, g, or t
  misc_feature (629)..(629): n is a, c, g, or t
  misc_feature (638)..(638): n is a, c, g, or t
  misc_feature (641)..(642): n is a, c, g, or t
  misc_feature (675)..(675): n is a, c, g, or t
  misc_feature (709)..(709): n is a, c, g, or t
  misc_feature (739)..(739): n is a, c, g, or t
  misc_feature (937)..(937): n is a, c, g, or t
  misc_feature (1373)..(1373): n is a, c, g, or t
  misc_feature (1379)..(1379): n is a, c, g, or t
  misc_feature (1422)..(1422): n is a, c, g, or t
  misc_feature (1460)..(1460): n is a, c, g, or t
  misc_feature (1497)..(1497): n is a, c, g, or t
  misc_feature (1529)..(1529): n is a, c, g, or t
  misc_feature (1535)..(1535): n is a, c, g, or t
  misc_feature (1537)..(1538): n is a, c, g, or t
  misc_feature (1540)..(1540): n is a, c, g, or t
  misc_feature (1543)..(1543): n is a, c, g, or t
  misc_feature (1546)..(1550): n is a, c, g, or t
  misc_feature (1552)..(1553): n is a, c, g, or t
  misc_feature (1555)..(1556): n is a, c, g, or t
  Probeset Number=SeqID_11315
catatagacagtaagagagcgttgntgagatngatagtatcgacgatatgatatagnagatagtagtcgnactagacacgcatacatgagtcgagtgtagctcgcaagagcgcgataggacagtctaacaagagcatcgatgaaaatatcatattataccgtacgatnaagacagttgatagagtganatttcatatcacaacatacaacaacggcataagtagataacagacatcnttaanagctccttccagtctgcgtcgtatcanatatagtgtagataactgtggatgaagcagcgtctccggatcattctatagatacaacacactctcacaatagtatagcgtatagataacacacaagaacacaacatctcactcatgagtccgatcactgtacgtaatcacgagagcgcggcaggatacgcggtcgagaggacacatcacgcaccaccacatgcacaggtaatacatcacaanagctangccacatctcatggaagntggagagagtgagtnatatcgtatagaatcacgtagtataataatagggagaggtgtgaganggctgtatgatatagattgatctagttctatcacgtcgtagagaggaagaagacgaggagnaaagatagntcnncctttcccagtgagcatctcactacaacacatncccacgcgcgcgcgggacgggcgcgggagacacnaacacgcagacatagaccgtggggtggttntcacactatatcccatctcataatatatctcacaactcaacctagaacagataacatacagcatgacacgatagaacatatatatgtgatcacgtggtacgcttaatcgtacattttcatctattcctattatacatatatcataactacaataacaacataaatcaaagcagataactaaccctccttcgaaacgtnatgtcccgtcgcagcagattaccatattcgtccggattagggttgtactataaatagctcacaaatactatattatctcattataagatgaatacttcgacatctactctataatatatcctgtctatggtatggtttcagactagaatatcttcagtgagcaagtcgagatggcgctacgtgtagcgatcacgacgccctccgaatatggctgtcttagttgagtagctagacttcatagaatatacatatgactatttaatcatatatatttggatagacagaataaggactaaagaaaggctgacatagagcacattatatctaacatatacatgtatcgtagtgagatgtaagggttgagttctagtgcatcgtagatagctcacactattgatgacatatatctcacgtgtgcgtatctgtgtgtatgtancatacnaatcatggtgctatccccagcgggttgaggcgtgggtgggggngggcggaggccactccacaacgataaagtcacgcactngcataggaggggctgccgcctcccctactccaatcanaatcagaaacacaaggagaaaaagaagaacanaaaaananncnaanaannnnntnngnnacagaaaagaaaagcgaggggagggaagacgcaaccaacaaaaaaccca

SEQ ID NO: 1537 - DNA, 586 bp, Glycine max
  Peptide Sequence Number=SeqID_8001
  Probeset Number=SeqID_11316
atgagctcgtggcataaacagcattggcagaaaaaccccatccggtgtcgcattctatactgcgaggtgtgtagtttgccccccgaatactggaaattcgcatccgatttcgagaaatgcaaaccctggatgatccaaaacgtccctgacctataccctgatcttctcacagaggcaaatgataatgaagttgataaagttgctgacaaactacacagtaccgctatatcacgagctgccgatgtcgctgcttcctcagcaccgaagcaagaagatgtgacgcgtcttcctgtagtgaagattaagatagatgataaccacgaggttgttattgactacggtgtacgtaacaagcgaaagtgtatcagcactgtgaaaggactgaaactcttcggagttatgctcaccgatgcttccatgagactcgggaaaaagtttgctacaggtatcctccgttctaaggggaccaactgaaaaagaacaaattgctgcttcagggggagataagctaagactcctcggattttccttaaggaaacctgggcctgatggttccacaatgaagaaatttttttttgtagaggag

SEQ ID NO: 1538 - DNA, 1454 bp, Glycine max
  misc_feature (20)..(20): n is a, c, g, or t
  misc_feature (22)..(22): n is a, c, g, or t
  misc_feature (50)..(50): n is a, c, g, or t
  misc_feature (71)..(71): n is a, c, g, or t
  misc_feature (79)..(79): n is a, c, g, or t
  misc_feature (92)..(92): n is a, c, g, or t
  misc_feature (97)..(97): n is a, c, g, or t
  misc_feature (288)..(288): n is a, c, g, or t
  misc_feature (529)..(529): n is a, c, g, or t
  misc_feature (548)..(548): n is a, c, g, or t
  misc_feature (945)..(945): n is a, c, g, or t
  misc_feature (1018)..(1018): n is a, c, g, or t
  misc_feature (1118)..(1118): n is a, c, g, or t
  misc_feature (1263)..(1263): n is a, c, g, or t
  misc_feature (1289)..(1289): n is a, c, g, or t
  Peptide Sequence Number=SeqID_8002
  Probeset Number=SeqID_11317
gtgggagtgatgtgtgagtntngggttggaagtgtgttattgatgtcgtngggtatatgtaatattatatntgagatantcatattgttaantaagnagaacggaaagggtaaagagaggagcgcgctgtcgtggcttagtcgacaactctaaagaatagagggcgactgcgggaggtaacacggcagtgtgccatcgccggcagcgccaagacagactcatcacatcatacagcactcatgcgcagtgatatacgtcaatcgtagcaagatcaggcgcgttatgccntgcagtgatacgagtaaaaatataaagcgagaaatcgtatatagcaatatagtaggagaagttagctctgcagacaatcatatgttgttttttggtagatatcattagtcgtgatcagagagtacttaaatgtagtgcaggtgtgctcagttgacctcgcgcgtcaatcttgtgatctatcaatattcggctagttcgcaatataaacagcgcaagacgtgcggccgaccgaggcgaaaantttattaacaccgtctggnaccttatttgaatcgggatacctagtggtaccttatgtttcgatatgatattaaataatatccgcgagtactcgtttgtttcagtgtggtgtgcactctagccttcccacacttgtgacgctctttcatttggtgtggctctgccccaatacctgcgggagggaatgtcgacttcgatctcaaatccacacgccaatataatggtgcgggtgaggtctatataatcatcaaccaccggtcactccatctacgatctacctatcttctttcgacgtctcaacaaatccacacaggcacacatctctgggtgggcacattcaccccaccccgcgtgacaggttctcctctcattcttcttttggcggcacagaccctccccactccctatatggtgtgnagagtggagtatgcacacagatcgacatctaatctccggcggtgccactatagaatgatgtactgcctctctntatacactgcgtggatgcctatcataacacacttatatctcttcgcccccataccccatacatattcttcacactgccgcacccgttctctcgccactanccactccgcactcaccgcgcgcatcttccgcgcggctctgaactacctattaagagctcactcaccacctctctactacctcacgcacacttcgcaccatctagcgaatgcacgacctcctcacaacgatccaacaccacacaanatacatccacgtgagagattagtaanaaactaatcttatcacgcggctgactctaacgcacgatcttaatgcgagacatctcagaatataacgtatgcgtgcgcgagtggcgtcgctactatactcctcatcatacacacgacataacgcactaatctaactataggctctcacttggcggtgctagctcg

SEQ ID NO: 1539 - DNA, 1635 bp, Glycine max
  misc_feature (368)..(368): n is a, c, g, or t
  misc_feature (612)..(612): n is a, c, g, or t
  misc_feature (615)..(615): n is a, c, g, or t
  misc_feature (876)..(876): n is a, c, g, or t
  misc_feature (1168)..(1168): n is a, c, g, or t
  misc_feature (1192)..(1192): n is a, c, g, or t
  misc_feature (1411)..(1411): n is a, c, g, or t
  misc_feature (1608)..(1608): n is a, c, g, or t
  misc_feature (1625)..(1625): n is a, c, g, or t
  Probeset Number=SeqID_11318
tatggtgcgcaccacacctcgtgagactatcgcctattcggcgtctcccatttctgttcgccccgtgttctcctcccttgctcttatattgccgttcgtgtcttctattcaccctattgtccgtaattgtattaccgctaagatttattccatatctcccttctccgccccccgcttttttgttattatataagtgggttgcggtgttgcgcccccgtcacagctacttttaacttttttcctccccccgcgacctctcttcacacagatatcacctgcgatctaaataataaaggagggtgcctatattattatatgtatgccgcgccatgcgcccgcttcaatgaatcccctcacatatatattanattcactattctcccccccgcgtcttatttatatattcgagctcgccgccatgaggattatattttcggcatgcgcgccgcgcttatataaaaaggcgctgggtgtgggtgccccacccccgccccccctaataaacacaccgagatgtgtgaatataacccgcgcgctgcctcttgcggaacattttagacggatatattgagcgccccgccagcgcgcataattattatttattatggacanggngtaaagaaataagcggtgtgttgcgccaccgatagaggcacgtggtctgttgtcgtctcccccgcccgcccgcatatatcttgtgcgatatacaaatcagaaaataagcaaggacggcccccgctaaaaaaaagatacggctgcggggcgcgacggactaagaaatacacgcggcggttatattgcacagatgaaacatgtgtgtgggactaaataacacccccgccccaccttaaatattattaactaacgagccgtggngcgccgacactgagcgcattatatcactgggataactattggtttcgatcctaccggcgacggtcatgttgtacctccttatcccgcggtacgtacgtgtcttctactacactgtttgttttgtcgccgcaccatcgctgccccgataatactgttttgactctagtgttatactagtgagacgaagccgtgtgaggctcggaataatacgcgccatgagtaatacacgcacggcgtcatgcgactcgacccccactctacgacctattatttataacacatcaccggcagnattcctgcgtgtgcgttactagtnatatatattgataacgcgtcggccggggaacgtatacacgccgcggtgcgcgcgggaacacgcgtcgagtgtgtcatagtcggtgcgctagccgcgcttgcgtcgcgacagatattataacatatcaaatattgtgtgtgtaataaaaggcgtgcgtcgcggccgtatgtgttggtgggtaatgaaatatacactcgcgcgggatactgaacgcgtggntacgtgtaatacagatcacttatatgtggtacgaggctgcgtatgtcgtcgtcggtgtttaataatgtgtgtcgatatattattacgcgcgggccgcgcgcagaggatgatcgcgaggagcgtggcattgtggctgcgtgcgcgccgcatccgacgtccgtacgactatgagttctgttgtctgcgcatatataacncctcatattgccgctgnccgagcgcgg

SEQ ID NO: 1540 - DNA, 1849 bp, Glycine max
  misc_feature (1)..(79): n is a, c, g, or t
  misc_feature (97)..(97): n is a, c, g, or t
  misc_feature (99)..(101): n is a, c, g, or t
  misc_feature (104)..(110): n is a, c, g, or t
  misc_feature (112)..(113): n is a, c, g, or t
  misc_feature (115)..(117): n is a, c, g, or t
  misc_feature (126)..(126): n is a, c, g, or t
  misc_feature (128)..(131): n is a, c, g, or t
  misc_feature (133)..(134): n is a, c, g, or t
  misc_feature (136)..(139): n is a, c, g, or t
  misc_feature (143)..(149): n is a, c, g, or t
  misc_feature (153)..(159): n is a, c, g, or t
  misc_feature (161)..(161): n is a, c, g, or t
  misc_feature (164)..(165): n is a, c, g, or t
  misc_feature (168)..(169): n is a, c, g, or t
  misc_feature (171)..(173): n is a, c, g, or t
  misc_feature (175)..(177): n is a, c, g, or t
  misc_feature (180)..(181): n is a, c, g, or t
  misc_feature (184)..(185): n is a, c, g, or t
  misc_feature (188)..(189): n is a, c, g, or t
  misc_feature (191)..(194): n is a, c, g, or t
  misc_feature (196)..(198): n is a, c, g, or t
  misc_feature (203)..(213): n is a, c, g, or t
  misc_feature (222)..(222): n is a, c, g, or t
  misc_feature (224)..(224): n is a, c, g, or t
  misc_feature (227)..(227): n is a, c, g, or t
  misc_feature (237)..(238): n is a, c, g, or t
  misc_feature (246)..(247): n is a, c, g, or t
  misc_feature (252)..(253): n is a, c, g, or t
  misc_feature (257)..(257): n is a, c, g, or t
  misc_feature (259)..(261): n is a, c, g, or t
  misc_feature (263)..(263): n is a, c, g, or t
  misc_feature (265)..(265): n is a, c, g, or t
  misc_feature (267)..(267): n is a, c, g, or t
  misc_feature (271)..(273): n is a, c, g, or t
  misc_feature (277)..(277): n is a, c, g, or t
  misc_feature (279)..(281): n is a, c, g, or t
  misc_feature (290)..(291): n is a, c, g, or t
  misc_feature (294)..(296): n is a, c, g, or t
  misc_feature (298)..(299): n is a, c, g, or t
  misc_feature (302)..(302): n is a, c, g, or t
  misc_feature (308)..(312): n is a, c, g, or t
  misc_feature (315)..(315): n is a, c, g, or t
  misc_feature (318)..(320): n is a, c, g, or t
  misc_feature (325)..(325): n is a, c, g, or t
  misc_feature (329)..(329): n is a, c, g, or t
  misc_feature (336)..(336): n is a, c, g, or t
  misc_feature (340)..(340): n is a, c, g, or t
  misc_feature (342)..(342): n is a, c, g, or t
  misc_feature (350)..(350): n is a, c, g, or t
  misc_feature (352)..(352): n is a, c, g, or t
  misc_feature (355)..(355): n is a, c, g, or t
  misc_feature (359)..(361): n is a, c, g, or t
  misc_feature (365)..(365): n is a, c, g, or t
  misc_feature (367)..(367): n is a, c, g, or t
  misc_feature (371)..(371): n is a, c, g, or t
  misc_feature (396)..(396): n is a, c, g, or t
  misc_feature (426)..(429): n is a, c, g, or t
  misc_feature (465)..(465): n is a, c, g, or t
  misc_feature (528)..(528): n is a, c, g, or t
  misc_feature (535)..(535): n is a, c, g, or t
  misc_feature (544)..(544): n is a, c, g, or t
  misc_feature (613)..(613): n is a, c, g, or t
  misc_feature (625)..(625): n is a, c, g, or t
  misc_feature (661)..(661): n is a, c, g, or t
  misc_feature (779)..(779): n is a, c, g, or t
  misc_feature (813)..(813): n is a, c, g, or t
  misc_feature (945)..(945): n is a, c, g, or t
  misc_feature (950)..(950): n is a, c, g, or t
  misc_feature (1000)..(1000): n is a, c, g, or t
  misc_feature (1050)..(1050): n is a, c, g, or t
  misc_feature (1241)..(1241): n is a, c, g, or t
  misc_feature (1344)..(1344): n is a, c, g, or t
  misc_feature (1367)..(1367): n is a, c, g, or t
  misc_feature (1504)..(1504): n is a, c, g, or t
  misc_feature (1647)..(1647): n is a, c, g, or t
  misc_feature (1649)..(1649): n is a, c, g, or t
  misc_feature (1671)..(1671): n is a, c, g, or t
  misc_feature (1800)..(1801): n is a, c, g, or t
  misc_feature (1849)..(1849): n is a, c, g, or t
  Peptide Sequence Number=SeqID_8003
  Probeset Number=SeqID_11319
nnnnnnnnnnnnnnnnnnnnnnnnnnnnnnnnnnnnnnnnnnnnnnnnnnnnnnnnnnnnnnnnnnnnnnnnnnnnnnnggggttttggggtgtgtntnnnttnnnnnnntnntnnngtgtggtgngnnnntnntnnnngtgnnnnnnntggnnnnnnntnttnnttnnannntnnnatnntgnnggnngnnnngnnntctgnnnnnnnnnnnttgcgtcantnggnggggccgggnngtgggtgnngtggnncacntnnntncntntatnnntatntnnntctgtgtgnnggnnntnngtngacaannnnnccnccnnntcctngcgngctcgtntcgncncgtagggngnaantgtnnnctcntnttcntgtgcaatatatctaacacgcgtcncactacacgaacgatactcatatatcacgnnnntcgagtgcgatacgccatctcgacaggcatgcagcnagcggatcgcactgtgcatatatagtaattactcatctcacacgcgtatgatatactctgctncaatatntactacacncactctataatcatatatgccgatatacaccgacacatgataactctgagtatcgtaatatgtgcgcangtaatgccgcgnctatctgcactctcactaactctacaatacgtctantgctgtgatgcgtatataacgagagaggatgaagtgatgtagataatgccagaagaactatgatcatagttgtgttgcgaactatggttgtcttcctaaataaatatatttgcgtttntgtaatagtattactctagtcgtctgtcaatgtnttcatgagtgagagatttcactcatttaagacagtgcgtaacgtagtaatagataattcattacatatacagctctagagtctagtatctatcaattcgatgagcgcataccacaaaactatccgcgctgantctantaattagacagtatatgtctgtgatattctcgatcgtatctatgtacatnctatcggttgcatatgctcaatatctatgaggcaattcattaatctatantatactatatcatatctgtgactacgctacacatatacatcatagaaatatactaagatttctgagtgaatctcgaatatactactctaaatagtataaacataacaccgctattggtctgtcgtacacgtatacatagaatatgttacatcactacaccatcactcaatcgctcaactcatctcacacanagctagagatcatacacacacgtccatctagacatcacacacagcgagcgaacgcgtcctgcacgcgcgctctgcggccactaactacaccatccatattganacatacacactaatctctatctncctcatctacatatgatgactgtatctaagtaaatatgacatatacatatacaagaaagccgttcgacgcacgaaacgcaggtgaacgatggcgacatgtgcagtcgcagccacagacgagagatggaatacacacntactatgtattgcatatagacgagacgcgatacatacgtacacacactcgagcaatatctgctagactattcagtacacactacgatacgcttatcagagcgggcgatgtctcgatcgattcactgtgtagcgcgctataacntntcaatctagacacaaggaaggnatcttatagagtgactgatgatgattggattgtattgagattaaaagtatatgagaatatgagtgtagtagacggttacagagatgtcaaatctcagaatgatacttttatgatataaagacactcgtnnctcgtagtaatagatactgttctttactatgcatacgatgtactcgan

SEQ ID NO: 1541 - DNA, 477 bp, Glycine max
  misc_feature (62)..(62): n is a, c, g, or t
  misc_feature (112)..(112): n is a, c, g, or t
  Probeset Number=SeqID_11320
ctcacacaagatgatcaagattctgttcggctacttgctttttttttttgtgcagctctagnaaaattgtgggggcctcaaaataatgtgtgacatgttcttcctatcatantcaatttttctcagtataagtcatggcgtgttcgttacatggttgctaatcaactatatgagctatgtcaatctttttttcctgaccccaccaagtcagaattggtccctgcatatcttcgtctgctgcgttataatcaggctgaattacgtcttgttgctgcttggaaagtaactaatttttccctcattttaaatccttacctttccatacatcatattctaccattttttaagtgattatcttcaaattcattttaacatgttctctcttcacttacttctgattttatatgaattgcaccacttatatgtaatgtatcttcactttacatacatcgcctattttcctttctttttttaaaa

SEQ ID NO: 1542 - DNA, 675 bp, Glycine max
  misc_feature (601)..(675): n is a, c, g, or t
  Peptide Sequence Number=SeqID_8004
  Probeset Number=SeqID_11321
ttttttttttttttttttaagttgaattctctaattttatagtataaaacaaagcaaacaatgaatgatatgtatgcgtttatacaaaattgtcaaatttgaatattcaagttgttaaacattattaatgcctaaactattatctggagtcttttataaaaatttacattccaaaataaaaacgatccctgcttagatcaagaaagcatcatcaacaagagctttttgtgagatgtttctttctccaaagaatgatctgatccatgcgaaagctttattggtgaaatatgaagcaaagatagcaataaaggtgttcttgaagatcatgtcccacatggtcaggatgacaatatcaaaaatgatcaaagcgaattcatttccatagaagatagtattttggaatccatagccaggatctctgtagaacaagggatttccttggaaagtttcgatatcaattggtggaataccaaagaatctcatagcaggagtcttttctctaataagcttggcactttcgaccttaactccttcaatataaagcttcaaatgttcttgaataacaagtcttcttccttcaagtctagcgtaatcgaaatcnnnnnnnnnnnnnnnnnnnnnnnnnnnnnnnnnnnnnnnnnnnnnnnnnnnnnnnnnnnnnnnnnnnnnnnnnnn

SEQ ID NO: 1543 - DNA, 719 bp, Glycine max
  Peptide Sequence Number=SeqID_8005
  Probeset Number=SeqID_11322
gaacaaaattcaaagtaataaagaacatcaagcatggaatactacacattttctcaagggtttgccgaaaacgaccaggaacgtgcaccgggaaagcatcacgttaagaagacgtgggttaaagaacgttatgagagtgatgaagaagatggttcgagagaggaagaggtgaaccaaatgatcataaaagaagaagaagatgaagaaactaaaggcatggtgatgtcatctagtacgatgctaacaagtaaggtgaagtatctcaactatggagctctcaaacatgatacgccaccggcagcgtctagtggtggaggaagagtcatgcctcctccgtcgaacaggtaccaccgtggccatcccaagtactacagatgcaggggttgaagtgaaaaatctccggagattaatctgttctcgaattaataaatgaatgataaataagtttggtaagtatatatatttactttccatgcaaaatgtttcaccatgtgcttgtaagttgtaatttctgttgcgaaatatttgatatctaagagaaaaaaataatatgaatgatcatccagtacttatttagtaatttggtcacttggtccgattttagaaagcaatgtattggttctttgctggaaaccgcggaatcaagtacatgacacgcccttagtttaaggtggtcggtgcctaaagaatcgcggatatgagtggcccttggttccacg

SEQ ID NO: 1544 - DNA, 1578 bp, Glycine max
  misc_feature (1)..(1): n is a, c, g, or t
  misc_feature (26)..(26): n is a, c, g, or t
  misc_feature (29)..(29): n is a, c, g, or t
  misc_feature (120)..(120): n is a, c, g, or t
  misc_feature (123)..(123): n is a, c, g, or t
  misc_feature (127)..(127): n is a, c, g, or t
  misc_feature (242)..(242): n is a, c, g, or t
  misc_feature (248)..(248): n is a, c, g, or t
  misc_feature (265)..(267): n is a, c, g, or t
  misc_feature (309)..(310): n is a, c, g, or t
  misc_feature (316)..(316): n is a, c, g, or t
  misc_feature (328)..(328): n is a, c, g, or t
  misc_feature (433)..(433): n is a, c, g, or t
  misc_feature (440)..(440): n is a, c, g, or t
  misc_feature (492)..(492): n is a, c, g, or t
  misc_feature (586)..(586): n is a, c, g, or t
  misc_feature (593)..(593): n is a, c, g, or t
  misc_feature (606)..(606): n is a, c, g, or t
  misc_feature (645)..(645): n is a, c, g, or t
  misc_feature (654)..(654): n is a, c, g, or t
  misc_feature (707)..(707): n is a, c, g, or t
  misc_feature (746)..(746): n is a, c, g, or t
  misc_feature (750)..(750): n is a, c, g, or t
  misc_feature (774)..(774): n is a, c, g, or t
  misc_feature (788)..(788): n is a, c, g, or t
  misc_feature (830)..(830): n is a, c, g, or t
  misc_feature (874)..(875): n is a, c, g, or t
  misc_feature (926)..(926): n is a, c, g, or t
  misc_feature (937)..(937): n is a, c, g, or t
  misc_feature (946)..(946): n is a, c, g, or t
  misc_feature (949)..(951): n is a, c, g, or t
  misc_feature (977)..(977): n is a, c, g, or t
  misc_feature (1035)..(1036): n is a, c, g, or t
  misc_feature (1082)..(1086): n is a, c, g, or t
  misc_feature (1093)..(1093): n is a, c, g, or t
  misc_feature (1164)..(1164): n is a, c, g, or t
  misc_feature (1166)..(1166): n is a, c, g, or t
  misc_feature (1169)..(1169): n is a, c, g, or t
  misc_feature (1198)..(1198): n is a, c, g, or t
  misc_feature (1214)..(1214): n is a, c, g, or t
  misc_feature (1261)..(1261): n is a, c, g, or t
  misc_feature (1265)..(1265): n is a, c, g, or t
  misc_feature (1279)..(1279): n is a, c, g, or t
  misc_feature (1289)..(1295): n is a, c, g, or t
  misc_feature (1351)..(1351): n is a, c, g, or t
  misc_feature (1353)..(1356): n is a, c, g, or t
  misc_feature (1500)..(1501): n is a, c, g, or t
  misc_feature (1503)..(1503): n is a, c, g, or t
  misc_feature (1513)..(1517): n is a, c, g, or t
  misc_feature (1519)..(1519): n is a, c, g, or t
  misc_feature (1521)..(1521): n is a, c, g, or t
  misc_feature (1531)..(1544): n is a, c, g, or t
  misc_feature (1548)..(1549): n is a, c, g, or t
  misc_feature (1551)..(1551): n is a, c, g, or t
  misc_feature (1553)..(1555): n is a, c, g, or t
  misc_feature (1561)..(1562): n is a, c, g, or t
  Peptide Sequence Number=SeqID_8006
  Probeset Number=SeqID_11323
nggagaggaggaagcgcgatgtgggngcnctgatgattctgtagagtgagagagagaacgacagcgaacaacgcgcgtgagcgggagtgcgtacgccacgatcatcttacgcacacacanccncgcnacgagagagtgcgagggtaccacacacgctcgcccgaacgcagataggctgcacacgtctacacgatgtgacccgcatcgtcacccgtcgcatagagagacgtcgtgagaggcgnggcggnggagcagagagcgaggnnnagggcgacgagcagccagccacataaatattatttgttcttnnccgttntagtgggtgtgnagtaaggtctcaggggtgtggtgcggtgaatataataagagcactctccaacagccgcgtgtggcggaggagcgcggagagaagacggcgacaaacgtcgcgtgntatacantagaagggatgcgatgggtgacgtacggggagataggatatatgatgagagnagcgcgcgagagatcggagagcgagcgcaggcgcagacgagcgaagacagaggatcggtacgtgaggggcagcggcgacggacgtctatctgcnccacacncacacgccagtgnacaaccgtcccggtgtggaagatgtgagtgagccgcacncacacaccnccaacacgcgtacaccagacgatcaccccgatagccgaccacacagcacagcnccgagaagaaaaagagcgctgtgacggcgtatgtcatgnggtntttgtatggtggtggtgggttggngtgatggatgtccnttctcaactgctcgtgagtgggcgttggtccgcgggatgtcnttgacgcatcggtggcggcagtagtgattgtgattgttggaagnngtataaaagatgggagggcgttgctagacccaacgcggaaagaccccagtncaccagacacnaaactatcnatnnnccgcttggggtggtcgtggggtgtgntgtggtggtgttggttgttgtgttggtctgttttgtcattatggtgcgcgctactttnnacacacgccgacagagagacatagggaccccgaagaaaacaggttnnnnnatatatnacactcacacaccaccagaagacagaccactgtccagactacaaccaacaaaaggagaggtcgcatccacnanaantataaattcacaaggagtgtaataaatantaacaacacagcatanacgctatacagaaagcgaccagagagaggagccacacaagaaacaanaaancgcgatagaacaangaaatcgatnnnnnnngaaacaccccacgcaccgcgcgaccaaccgcccccacgagacacccaccgaccacnannnnttgcggcgccacgagcgagtgttcgagaccctagtgggagagagagagggcggccgaatcaccctgaacaagagagagaaggatgtaggccatcataatggttgaggagtgtagtaagaagaatgaacacgcccacaccaatanncnacaggcgcannnnnancncgcacgcggnnnnnnnnnnnnnncttnngngnnntcgtgnnaagaaaaaaaatttcc

SEQ ID NO: 1545 - DNA, 1937 bp, Glycine max
  misc_feature (4)..(4): n is a, c, g, or t
  misc_feature (7)..(7): n is a, c, g, or t
  misc_feature (12)..(12): n is a, c, g, or t
  misc_feature (71)..(71): n is a, c, g, or t
  misc_feature (101)..(101): n is a, c, g, or t
  misc_feature (109)..(109): n is a, c, g, or t
  misc_feature (112)..(112): n is a, c, g, or t
  misc_feature (139)..(139): n is a, c, g, or t
  misc_feature (165)..(165): n is a, c, g, or t
  misc_feature (169)..(169): n is a, c, g, or t
  misc_feature (190)..(191): n is a, c, g, or t
  misc_feature (230)..(230): n is a, c, g, or t
  misc_feature (258)..(258): n is a, c, g, or t
  misc_feature (275)..(275): n is a, c, g, or t
  misc_feature (284)..(284): n is a, c, g, or t
  misc_feature (290)..(290): n is a, c, g, or t
  misc_feature (376)..(376): n is a, c, g, or t
  misc_feature (390)..(390): n is a, c, g, or t
  misc_feature (416)..(416): n is a, c, g, or t
  misc_feature (423)..(423): n is a, c, g, or t
  misc_feature (494)..(494): n is a, c, g, or t
  misc_feature (516)..(516): n is a, c, g, or t
  misc_feature (572)..(572): n is a, c, g, or t
  misc_feature (595)..(595): n is a, c, g, or t
  misc_feature (637)..(637): n is a, c, g, or t
  misc_feature (656)..(656): n is a, c, g, or t
  misc_feature (661)..(661): n is a, c, g, or t
  misc_feature (724)..(724): n is a, c, g, or t
  misc_feature (781)..(781): n is a, c, g, or t
  misc_feature (791)..(791): n is a, c, g, or t
  misc_feature (867)..(867): n is a, c, g, or t
  misc_feature (873)..(873): n is a, c, g, or t
  misc_feature (924)..(924): n is a, c, g, or t
  misc_feature (926)..(926): n is a, c, g, or t
  misc_feature (1002)..(1002): n is a, c, g, or t
  misc_feature (1036)..(1036): n is a, c, g, or t
  misc_feature (1047)..(1047): n is a, c, g, or t
  misc_feature (1063)..(1063): n is a, c, g, or t
  misc_feature (1076)..(1076): n is a, c, g, or t
  misc_feature (1086)..(1086): n is a, c, g, or t
  misc_feature (1123)..(1123): n is a, c, g, or t
  misc_feature (1138)..(1138): n is a, c, g, or t
  misc_feature (1199)..(1199): n is a, c, g, or t
  misc_feature (1204)..(1204): n is a, c, g, or t
  misc_feature (1223)..(1223): n is a, c, g, or t
  misc_feature (1238)..(1238): n is a, c, g, or t
  misc_feature (1244)..(1244): n is a, c, g, or t
  misc_feature (1273)..(1273): n is a, c, g, or t
  misc_feature (1282)..(1282): n is a, c, g, or t
  misc_feature (1298)..(1298): n is a, c, g, or t
  misc_feature (1300)..(1300): n is a, c, g, or t
  misc_feature (1326)..(1326): n is a, c, g, or t
  misc_feature (1345)..(1345): n is a, c, g, or t
  misc_feature (1367)..(1367): n is a, c, g, or t
  misc_feature (1372)..(1372): n is a, c, g, or t
  misc_feature (1422)..(1422): n is a, c, g, or t
  misc_feature (1436)..(1436): n is a, c, g, or t
  misc_feature (1459)..(1459): n is a, c, g, or t
  misc_feature (1461)..(1461): n is a, c, g, or t
  misc_feature (1467)..(1467): n is a, c, g, or t
  misc_feature (1530)..(1530): n is a, c, g, or t
  misc_feature (1561)..(1561): n is a, c, g, or t
  misc_feature (1640)..(1640): n is a, c, g, or t
  misc_feature (1650)..(1651): n is a, c, g, or t
  misc_feature (1653)..(1653): n is a, c, g, or t
  misc_feature (1655)..(1655): n is a, c, g, or t
  misc_feature (1657)..(1657): n is a, c, g, or t
  misc_feature (1659)..(1659): n is a, c, g, or t
  misc_feature (1684)..(1684): n is a, c, g, or t
  misc_feature (1747)..(1747): n is a, c, g, or t
  misc_feature (1761)..(1761): n is a, c, g, or t
  misc_feature (1778)..(1779): n is a, c, g, or t
  misc_feature (1781)..(1784): n is a, c, g, or t
  misc_feature (1786)..(1787): n is a, c, g, or t
  misc_feature (1801)..(1802): n is a, c, g, or t
  misc_feature (1808)..(1808): n is a, c, g, or t
  misc_feature (1833)..(1833): n is a, c, g, or t
  misc_feature (1881)..(1883): n is a, c, g, or t
  misc_feature (1887)..(1888): n is a, c, g, or t
  misc_feature (1892)..(1894): n is a, c, g, or t
  misc_feature (1906)..(1906): n is a, c, g, or t
  misc_feature (1908)..(1909): n is a, c, g, or t
  misc_feature (1911)..(1914): n is a, c, g, or t
  misc_feature (1917)..(1917): n is a, c, g, or t
  Probeset Number=SeqID_11324
cagntgntgtangaggatagtatttcgatcgtacgagcgacgatatacgcgtatgatatatatagatcagnagagccgcacgtcagatatcgacagtcgtngccggctngtnttgttagtatatatgcagtcaggtcantggattatgtcagcatgtgtgctttnaacncgcgtcgtatgctgcatagtnntgatcagactggtacttgatcatctgcagcatcactcangagtagtgtgtacgctctcgatagtcantgtatgtagcgacgtancgcaggagntgtagngtaggtcgtaactagtctagtctgattatgatcacgttatagtactcgcagcagtcgtcgagttacacgcgtactttcgcacgtancaacgcaaatacgngtcatcactcatcaacgagcgagatnatgtacncagcgtacgtgtcgcacgtctcgcacacgtagtcgactgcatcacactgtagtgagagcatgcgcttcgancacaagttgtctgcgagaggangggtgcgcagcagtatataacaatacacagagatgagttgagcgcagtgtggcgtncacggagctatgatatcagcgtngtagctagagataatgatgagagtaatcgatcatcggcgtangggtgtgtcgtgcactctntgtantcgcacgattgctgtgacgcgcatcgcagtagtataactacatagagacagtagcgcacgtantgttagctcgcttcgtgatatatgtcaacgacgatgtacgctggcgtcagacatcangatgcagtangtccgcatacagccgtcgtagtcgccacgtcagtgtacgtacgcagtactaggcatgacagcgagtggcgtcactngtactnatgtctgatgtgctacatacatatacatgcacagtatacgactgctcgtangntgctcgcatgctcctagtatatactcgatcatgagtgttccgaccagctgtagacgatatgtgtaattcaagtacnagtgatgtatgagagatagtattagagagtgggngtatcatgatnatgaatacagatgtangctcgacatagtnatactcatcntgctcacactgtcacgccgagtagacgtgtcgtaagnccggcagcgcgcagncgagctgtcacacgcgtcacgacgcgacggcgacgacacagcgcacacttcgcgcagccgntcatnatttcgtgagagtaggatngtactagttataganataganagaatctatcatgatcgcattataatgantacgcgcgnatagttctaacgagcnanatctactaatgatggactgatagagnaggagtcatagtataagtngatggtcatgtgatatatatgncaganatatatatgatcgtatcatgctatctactcgactctcactccatatcgtnttagagtgcgcatnaaggatcacacacagccgatacntnactcantgtcgtgtgctatgcctatacgtcgtgacgttcgttgtgtgtgtgtgcggtcggggcgactcngtcacacactatgtgttcataatacgtgagntagtatagattagtctacctattcactagtggtcttctgactatatcacaatcacaatatcatctcgcacacactcacnctaagagcgnnangngngncgactatctgatagcataaacagtncatactatatagaggatatgcaaggtgtcgcacgcccaaccagcagcagaatctcagccgacnacataatcaaatangacgaaagacagtcgcnngnnnngnnccccccccacaacnnaactcntcacaacatcacgtcatccacaacnaaattagtgaaagtataaacatgattatgttattaacaggaaaaacgnnnaagnntatnnntaaagtgagagnanngnnnngcnaagcgccacccacaaaccaa

SEQ ID NO: 1546 - DNA, 490 bp, Glycine max
  misc_feature (267)..(267): n is a, c, g, or t
  misc_feature (323)..(323): n is a, c, g, or t
  misc_feature (361)..(361): n is a, c, g, or t
  misc_feature (393)..(393): n is a, c, g, or t
  Peptide Sequence Number=SeqID_8007
  Probeset Number=SeqID_11325
ctgtggaaccaaaagaaaaaatctccttcacccaccagccaggggtatccggatttgaatttctctctcaacttaagttaggtccattccaagaagtgggaaccccatttcgtgggaaattaatatatgcgccggccgtgttcgatccatctcggccaatggcccatacccagccttttcgggtgatcccaagccaggatcctctttataaccactgcgtgtgattccagccaattcttgaaagttgaatagttgagagagtggggnttatccacttcccaataaagaggcttgatttcgatcccgaaggagcagagcaaaanccttctttcagcaaatgcatacttgaacaaccccagancaaggagaaggacaaagatgctcctcattttncagatgagaaaacgagaaactgttttggactgagaagagtggctcaaatgaaagtaggtggataagtgtgtcacggactcacactcacactagcact

SEQ ID NO: 1547 - DNA, 1013 bp, Glycine max
  Probeset Number=SeqID_11326
accgatcttctccagcaccaacaccacaacaatggcaccaagtcggggtatcgcagtactgcgctcgttcacgcgatcatcaacaactacaccacaagcgacatgtcgcgccttctccgccgccacgatccccctctccggccacaaccgctggtccaaaatcaaacacgacaaaggcaaagccgacgcactcaagaaccgccagcgctccatcttcgcccaagaaatcgccaccgcctcgaaactcttcggccccgacatcaactcaaatcccaagctcgccgacctcgtcaccaaggctaagaaagaagctttccccaaagcctccatcgaagcagccattgcgcgtggccagggcaagagtttgactggcgcgagtttggagaggttgactgtggaggggatcttgccgaacaatgttgcggttattgtggagtgtgagacggatagcaagctcaggacgctggcgaacatcaagttgattattaaggacagtggtggaacggcgacgccttcgagctatctgtttgaaaagaagggacgcatcgtgtttgacaagaaagatggtgtcgggctggacgaggctatggacccagctttggaggcaggcgcgacggacatcgatgtgctggaagacgactgcgtggtcgttttcactgcgccagaggagacgacagctgtcggggaggctgtctccagtgcccttggcttgtcaatcaaaacttcagacatcttctgggaccccaacgaggatactaagacaaccgtgagcgatgatgcagcccaagatctggccgtgttcatggacgctatggtcgaaggcgaatccaccgttcaggctatctcgatgaatgttgcgcaaggagacctaagcatcgaatcctggaaagaactgcaggccagactatcctagggaaacgatgctgcttactagacgggaagccgagtgtaccattaccggtgtacatatacacactttgtaagatacctgtacatactgaatttgtacatct

SEQ ID NO: 1548 - DNA, 1417 bp, Glycine max
  misc_feature (1)..(1): n is a, c, g, or t
  misc_feature (66)..(66): n is a, c, g, or t
  misc_feature (96)..(96): n is a, c, g, or t
  misc_feature (108)..(108): n is a, c, g, or t
  misc_feature (187)..(187): n is a, c, g, or t
  misc_feature (358)..(358): n is a, c, g, or t
  misc_feature (1400)..(1400): n is a, c, g, or t
  Peptide Sequence Number=SeqID_8078
  Probeset Number=SeqID_11327
ngtagtaggtcgtcgctgctctggtgtgtcacgagttagcagtaatcataggtaggcgtattagtntgagatctatgatcacaatcatacaatgcnatatcgattgcncatacgtccgactatggagtacggcttcgtctctcaccattagcataagagagtgtgctatatcattaggcgtgtcctncagcagcgcattcagaccatcactcaccgtgtacactcgctgctgcgtgtgcggcatgtggagtcgtgtacgattgggacggcggcggagcaccgggtgatcgatgtagatatattactccgatgtaaatcagacagaaatacatcgaatcgcgtgcgtagctagcatacngtatgtacgtcattcgcagggatcgggcgcgggagggtcggacgcaataagtgaggtgttgtgcgtagggtacactattcacattacggtccaagtacatcgatgtataggacgcggagatacatcgcggctgttgtgctgtctgtagagacgacgcggatagttgagcaagctacatgctgtatcgttgtgtgcaaggcgtctactcgagcggcgtcactgcagatcgtaagcgggtgaatctcgtggtataggctagtagtggggtagactagtgagtatatgtagagttgcgtatcatacgttcacagatcattataagtattacgagttctcctatgccgtactcactgctacacggcgatgtcgacgctgatcaggccattctgctctacgtcgagagataggcgttcactgacatccatattggtctggatggtcacgataatgccgaccaagttacatcacgcgacgatatggtatagagatagaggaagatatcgcgctggtggtcggttagtctgaacaacagcgagtaggtggctagagtgtggccgatatgcgtggtggagaacgggggcacgatcgacctggcgtatgcagacgcatgatgtccgggtcgcagcaaggcgtgaccacttcgcacgccgacattctcggcgacgccgagtgccgatcgtaatcatatttaggtcctgctatccccgcggataagggtgcaatgtctattagatcattccagacgtgtcggcgtgtccggtgtgtctgtttctacagcaaatgccggctacggccggtggtagagctccgtgcgtagtactatattatgctccagatctcgctacagccccgtcgatatgtgccggagtgtgtatcaacgcctcactcttagtaaccatcacactccgttgagagagggtggggggcggaggtcccctcgcgctcacctcacctccgacgaggggggcaccacagcaccccaatatttgattctggctgtcgttcgcgcttatgccctctccatcgacctcggcgcgtgcanacactcgccgtacacta

SEQ ID NO: 1549 - DNA, 456 bp, Glycine max
  misc_feature (63)..(64): n is a, c, g, or t
  misc_feature (66)..(69): n is a, c, g, or t
  misc_feature (75)..(75): n is a, c, g, or t
  misc_feature (78)..(78): n is a, c, g, or t
  Peptide Sequence Number=SeqID_8156
  Probeset Number=SeqID_11328
atcactcaagtatagctctgtaattaatgtgacttcacttacaatttgaaacacgacctgcanncnnnnattcgnaanttttgatgggtgaacgaaacatggcatctcggcaacacaacaagcaagagcttgatgaaagtggcaaggcccggagagactgttgttccgggtggcactggtggcatgagcactggaggcccagcaacaccttgcttgaaggaaggagcaggggagggctaacaaggaagagagcagctggggacagaagggtaccatgaaatgggacgcaaaggagggttgtgcactttggacaaatcatgagaagaacgtgcttaagaggaaggcattgtcatcgaataagtccaagttcaggactggtaataacaagaaccatattcatgaactgaagtaccagtgattaagttgattaatcgtagacacctcttccactagtca

SEQ ID NO: 1550 - DNA, 1578 bp, Glycine max
  misc_feature (7)..(7): n is a, c, g, or t
  misc_feature (20)..(20): n is a, c, g, or t
  misc_feature (28)..(28): n is a, c, g, or t
  misc_feature (85)..(86): n is a, c, g, or t
  misc_feature (102)..(102): n is a, c, g, or t
  misc_feature (188)..(188): n is a, c, g, or t
  misc_feature (199)..(199): n is a, c, g, or t
  misc_feature (204)..(204): n is a, c, g, or t
  misc_feature (208)..(208): n is a, c, g, or t
  misc_feature (222)..(222): n is a, c, g, or t
  misc_feature (225)..(227): n is a, c, g, or t
  misc_feature (229)..(229): n is a, c, g, or t
  misc_feature (252)..(252): n is a, c, g, or t
  misc_feature (259)..(259): n is a, c, g, or t
  misc_feature (261)..(261): n is a, c, g, or t
  misc_feature (263)..(263): n is a, c, g, or t
  misc_feature (318)..(318): n is a, c, g, or t
  misc_feature (343)..(343): n is a, c, g, or t
  misc_feature (369)..(369): n is a, c, g, or t
  misc_feature (371)..(371): n is a, c, g, or t
  misc_feature (389)..(389): n is a, c, g, or t
  misc_feature (404)..(404): n is a, c, g, or t
  misc_feature (414)..(414): n is a, c, g, or t
  misc_feature (420)..(420): n is a, c, g, or t
  misc_feature (439)..(439): n is a, c, g, or t
  misc_feature (443)..(443): n is a, c, g, or t
  misc_feature (481)..(481): n is a, c, g, or t
  misc_feature (494)..(494): n is a, c, g, or t
  misc_feature (509)..(509): n is a, c, g, or t
  misc_feature (547)..(547): n is a, c, g, or t
  misc_feature (549)..(549): n is a, c, g, or t
  misc_feature (564)..(564): n is a, c, g, or t
  misc_feature (569)..(569): n is a, c, g, or t
  misc_feature (575)..(575): n is a, c, g, or t
  misc_feature (578)..(578): n is a, c, g, or t
  misc_feature (580)..(580): n is a, c, g, or t
  misc_feature (615)..(615): n is a, c, g, or t
  misc_feature (617)..(617): n is a, c, g, or t
  misc_feature (622)..(622): n is a, c, g, or t
  misc_feature (626)..(626): n is a, c, g, or t
  misc_feature (632)..(632): n is a, c, g, or t
  misc_feature (639)..(639): n is a, c, g, or t
  misc_feature (647)..(647): n is a, c, g, or t
  misc_feature (649)..(650): n is a, c, g, or t
  misc_feature (656)..(656): n is a, c, g, or t
  misc_feature (674)..(676): n is a, c, g, or t
  misc_feature (714)..(714): n is a, c, g, or t
  misc_feature (742)..(742): n is a, c, g, or t
  misc_feature (746)..(746): n is a, c, g, or t
  misc_feature (749)..(749): n is a, c, g, or t
  misc_feature (751)..(751): n is a, c, g, or t
  misc_feature (753)..(754): n is a, c, g, or t
  misc_feature (762)..(762): n is a, c, g, or t
  misc_feature (793)..(793): n is a, c, g, or t
  misc_feature (829)..(829): n is a, c, g, or t
  misc_feature (845)..(845): n is a, c, g, or t
  misc_feature (890)..(891): n is a, c, g, or t
  misc_feature (907)..(907): n is a, c, g, or t
  misc_feature (919)..(919): n is a, c, g, or t
  misc_feature (971)..(971): n is a, c, g, or t
  misc_feature (1004)..(1005): n is a, c, g, or t
  misc_feature (1077)..(1077): n is a, c, g, or t
  misc_feature (1156)..(1156): n is a, c, g, or t
  misc_feature (1194)..(1194): n is a, c, g, or t
  misc_feature (1254)..(1254): n is a, c, g, or t
  misc_feature (1366)..(1366): n is a, c, g, or t
  misc_feature (1430)..(1430): n is a, c, g, or t
  misc_feature (1487)..(1493): n is a, c, g, or t
  misc_feature (1499)..(1501): n is a, c, g, or t
  misc_feature (1503)..(1503): n is a, c, g, or t
  misc_feature (1529)..(1532): n is a, c, g, or t
  misc_feature (1537)..(1541): n is a, c, g, or t
  misc_feature (1543)..(1545): n is a, c, g, or t
  misc_feature (1554)..(1554): n is a, c, g, or t
  misc_feature (1558)..(1558): n is a, c, g, or t
  misc_feature (1560)..(1560): n is a, c, g, or t
  Probeset Number=SeqID_11329
ctggtgngcgatgcagtcgntgcgtcangtcacgtcatcatcgctatgattattagtgttcatgtagtcatttctcgtacttgcnncgcgtcgtcatgcgtncgtcgtcatgtcgagctagctgagtgagtcagatcgtgtgtctctactcttgcatacaccacagtatatattgactacagtaatgnataacacgttngagangtgntgggggtagagctnggnnngntgctgattcgccttcgttgaganagtatangngncacgcatgtgatgtatatactatgacagctctcccggcgtacagttctcgactanccatgtagtgagatttcttcaacancgcacggtgcagagaaccgcagtagnangtaacacgtggcagcganagtgtgcatgtttgngaagcagacnattgcngcacgccatcagcacgcgncggncacgcgacgagagaacgagctgctcagctcatagtacnaaggagctaacancaagatacagctagnggccagcgcacgtgcagacggacaggagctcagacacnanaatggagggaggtgnagcgncctcanttngnatgcgcatatcaacaaataaacatagtcatcgacngngctgntgtnggtggngatgtgnggtgtgtngnngtgtgnagcggggggggtgtgggnnnacaacacacaaaaccacacacaacacctcacacggacncttccctggaggatacccgctagatggngtgnagngngnntcccacanacaataatcagcacacgcttacaatacacanacacaacgtacagatagatagtacctctgcaccacnaagtgtagacacgaanagcacagagaaggagcgcgctgcgagtggagtggagatgtctgannatgttattcacaccantcatagtgatcnaccaccatcacacgccacactagatacactatcagacacctatcacacctcncactccctacaatctacacccactactcacaannactcacgacccgcgcgcggcagtgcggctgtgtgtgtttgtatctctcacactagaatcatgtgaattagangctatctgagagagtcataaacaactcgagacacgagcaacgcagaagactacatgatttcttctcgatctctatacgncttcgatactaaaacataataacaaagaatgatcagantatatatatttcttgtctgtctttggacgtgagtatttcaaatactgaatctaaaatatntatattctgttcttatatgtttgttatgtttgtgcgcctatatataactttgtgcgtgatttacatactacattatgtataggtgatgttgatatgttgagagatcacttcnacacaataaatatacctttatttggtagaatgaggggtggttcgcgctcgcctcttcttctagnccagactcctcatctccagaagggtagtggccctccactgtacatgtatgtgtgggnnnnnnncacgannncntctctctttcttttgtgttccgtttnnnnttaannnnntnnnagagagganaggngngcaaacacaccaccaaaa

SEQ ID NO: 1551 - DNA, 452 bp, Glycine max
  misc_feature (445)..(445): n is a, c, g, or t
  Peptide Sequence Number=SeqID_8157
  Probeset Number=SeqID_11330
acagggtaaggccggaacattttgttatcatcgccgtcgtcaagatgccgccggccggagaactccaacatcaatccccatcaaaagacaaacaacccaccgatactcaatctgccgaagcagctgcggcagcgattgccgcggctgcggcggatgcggaagctgcgggattatggacacagatcaaggcggaggctcgccgtgacgctgaggcggagccggcgctagctagctacctttactcgacgattctttctcactcgtctctcgagcgatccatctcgtttcatttgggaaacaagctctgctcatcgacgcttctctccacgcttctatacgatctgttcttgaacacgttcacctccgatccttctctccgcaacgccaccgtcgcggatctccgtgctgctcgtgttcgtgatccggcgtgtatctccttctcctnttgcctt

SEQ ID NO: 1552 - DNA, 453 bp, Glycine max
  Peptide Sequence Number=SeqID_8158
  Probeset Number=SeqID_11331
atttttccgcttcgttcctagggtttcccccccctcctcctcccaattctgcgcccccgctcgcgcgatccccaccgcgatggtctccagcgcccgtagttccggcggcatggctcactcggcttccaacagcgccggaagcgcaggttccccctccggcggcatcgggcccggcaatggggttgcggcggcggccgccacgacctcggcgtcagcgtccacgccggccagcgggagcaccgttgcccgccgcctcaatgatctcgaaattcagggagatgacgcgccatcgtcgcagcccgccgctagcaagaagaaaaagaaaggaacacgcgtagtaggtcccgataaaggtaaccgtggattgcgccaattcagtatgaaagtctgtgagaaagttgaaggcaaagggagaacaacctacaatgaggtggcagacgaacttgtagctga

SEQ ID NO: 1553 - DNA, 1518 bp, Glycine max
  misc_feature (7)..(7): n is a, c, g, or t
  misc_feature (31)..(31): n is a, c, g, or t
  misc_feature (42)..(42): n is a, c, g, or t
  misc_feature (48)..(48): n is a, c, g, or t
  misc_feature (105)..(105): n is a, c, g, or t
  misc_feature (154)..(154): n is a, c, g, or t
  misc_feature (158)..(158): n is a, c, g, or t
  misc_feature (177)..(177): n is a, c, g, or t
  misc_feature (222)..(222): n is a, c, g, or t
  misc_feature (229)..(229): n is a, c, g, or t
  misc_feature (306)..(306): n is a, c, g, or t
  misc_feature (343)..(343): n is a, c, g, or t
  misc_feature (350)..(350): n is a, c, g, or t
  misc_feature (382)..(383): n is a, c, g, or t
  misc_feature (417)..(417): n is a, c, g, or t
  misc_feature (420)..(420): n is a, c, g, or t
  misc_feature (488)..(488): n is a, c, g, or t
  misc_feature (490)..(490): n is a, c, g, or t
  misc_feature (530)..(530): n is a, c, g, or t
  misc_feature (609)..(609): n is a, c, g, or t
  misc_feature (737)..(737): n is a, c, g, or t
  misc_feature (739)..(739): n is a, c, g, or t
  misc_feature (780)..(780): n is a, c, g, or t
  misc_feature (793)..(793): n is a, c, g, or t
  misc_feature (1069)..(1069): n is a, c, g, or t
  misc_feature (1074)..(1074): n is a, c, g, or t
  misc_feature (1123)..(1123): n is a, c, g, or t
  misc_feature (1318)..(1318): n is a, c, g, or t
  misc_feature (1320)..(1320): n is a, c, g, or t
  misc_feature (1335)..(1335): n is a, c, g, or t
  misc_feature (1413)..(1413): n is a, c, g, or t
  misc_feature (1443)..(1443): n is a, c, g, or t
  Peptide Sequence Number=SeqID_8159
  Probeset Number=SeqID_11332
cgctgcnggaactgcgacgcgctcttctatnaatctgtactnggtagnaaaggtgcggaaccctacggtctgcttctggagcgcgcacgacgatgctgtctggtnctctctacgtatctcctgctcggctggcgcactcgagacgagcaagaanagangaaggtgtgcgctctgatngagacgccgagctctaggcgtcacttcttatccaacgaccgcacnatcgttngcatcttcgccgacggcggtagcggtctgttagcgcgcgccgcatcttatacgtatgagcactcattttacttcacngggggaccaatagccagggatgcagcgccacattcangatatantacgccgcgcacaccaaggcttacaccatganngaccttgccgcgggcggcagtgagtggcgagagnttntaattcaacctctcgccgcgcggcgtaaaaccaataatcgccgcgcgataggctcacgccgtcctctncnccgatattgtttatgtacgcaccgatcccgcggtggcgcntaaccgcgcccgcaccgaagagacgcgcggaggatcccctccctgcgtgcaattaagataatccgcggccgtgagccgnacagcgtggatcctactctccacagcgcgcttgcgaagggcgggagcggagtgtcctattcagtccaagttgggctgtttctttaccacatacaactgctagagtgccacaagacactcggaccatcngnggtcggttcgccctaacaactccgacatgctttacaccacnccccacaatcacnacctcagaggcgcgtgtgccctatacacaacacgagagtgagcgcagcggctccagtgcgtgttctattgcgcccgcttccaggccggaggcggtcgtcttttttgcacgcgtctttgcacgatcattctggaccctcgtcactacgcttcgcctcccccacagctcgcgcatcgagcacctccgtgccgggtgaccacatgaacgacatataacattaccactgtttacgaagtgaggctgatcagagctttggtagtccgacgcatcgatatcnattanctctcctcctccccagctgcgagcaaacgagaatgctgccgacgccagnagacagtttgcacgtacatcgcagtgtgctatgactcgcagttgtgcggggcacaccgtggctagactctactacatggttgacaggcctccctatcagagatggctgagtgctctcttgtccaggaggctgagcgcatcgctttactgagagtgatagtgagttgctccggtggcagcatatgtcgccgtcgcnangccacggcgtggtgngtatgcgcacgcgtagtcttcattaggtaagacggaacgccgccgcagtcccgtgcgggtggcgaggctgtcagcatnttatgttatatagaatgggagtagacacgncggaacggctgtacgatgcgcagccgattagatagggtgaggccggccgcggcgggcggcgtggcccacccaccc

SEQ ID NO: 1554 - DNA, 1520 bp, Glycine max
  misc_feature (43)..(43): n is a, c, g, or t
  misc_feature (101)..(101): n is a, c, g, or t
  misc_feature (155)..(155): n is a, c, g, or t
  misc_feature (157)..(157): n is a, c, g, or t
  misc_feature (160)..(160): n is a, c, g, or t
  misc_feature (200)..(200): n is a, c, g, or t
  misc_feature (246)..(246): n is a, c, g, or t
  misc_feature (282)..(282): n is a, c, g, or t
  misc_feature (308)..(308): n is a, c, g, or t
  misc_feature (511)..(511): n is a, c, g, or t
  misc_feature (576)..(576): n is a, c, g, or t
  misc_feature (627)..(627): n is a, c, g, or t
  misc_feature (702)..(702): n is a, c, g, or t
  misc_feature (734)..(734): n is a, c, g, or t
  misc_feature (755)..(755): n is a, c, g, or t
  misc_feature (776)..(777): n is a, c, g, or t
  misc_feature (779)..(780): n is a, c, g, or t
  misc_feature (985)..(985): n is a, c, g, or t
  misc_feature (1311)..(1311): n is a, c, g, or t
  misc_feature (1429)..(1429): n is a, c, g, or t
  misc_feature (1431)..(1431): n is a, c, g, or t
  misc_feature (1433)..(1433): n is a, c, g, or t
  misc_feature (1435)..(1435): n is a, c, g, or t
  misc_feature (1450)..(1450): n is a, c, g, or t
  Probeset Number=SeqID_11333
ttgtcactacacgtacacagtcgtgagatgtagtagataagtncacctcacgcgttgggagacttacattaatgtcgagtgataatgtactagtcgtagcnatcgcagtgacagcgtatcattcgacgctgcgagaggtcgatcgatagtgtagntngcnaagttatcactgctactactcacgtgagtagtcaatgcgnatactgaagtggacatatgtgatactcatctgacgctacatacgantgcgtgtggatatgagagaatgtcacatcgacggtnagctcacagcatcgcgtgccgcggcnccagagcggtgcgctcagtaggtgacatgattattgatgtagtgtgtgctagtcatcacgtatgcgtggtaatagtcatagagtgtaagatagatagtgatgagtgtagtgagtgaggctcgtccgttgtcgtcgcgacccgcaggtagtagtcagtgagatacgtgcgcagtgaagaggtgtggaggtagaggagtagtacngttctaccgtcactacttatatgactatcgtatatcgcgtgcggcgggagggtgtgaggcgtgtngaaagatggagtaatgacttccggggtgggacgttggtgtggtgtgatggnagtacaagatgttagtatgtgctgttctcgggattacaacgttatgagtgtctgtgatcacctcacatcattctnacctactagtcgagcagggtgagggtatgagnggtggtgtatctacgtttgtncacatcttatttttatactannannttcatatggctctccctattacaacctccccacctcaacggacttcctaatggtccaccctcctagagttgccggcgtctgacatagggagccgcgatgtgggggtgatgcatcatacaatccacattagtcaggcctcagacatgtagtgagtctcagccgtctatagtgctgagtaatgagccagacggtgtgtgtactgtgntaagtacacatccacaccccggttgtttctgttcggagcatactgaacagacattttgacactgtcgagatggtgaattgaatgatagcgatagtacagaaccatcagagccacgacaaagtaacacgacggacaggtggtacgactatatagagaaaacaagtgatagaaacatgagagtaggagaaatgcgcccgacagttatcctctctttatatggaagagaaggaccagcgagaagcaatgataaaatgacaagtcggtatattgtgtatagtagagccccccggtggaagaagagtgcgaaacctaagatggtagaaggngaggaagtcacgtaagtgtgcggtgccggtttgggattgaggagttaatttaccatgggcattcatcctgcgtgacgtgcaggtgggtatctgcctagtgtttaaagtaatgtggtantngntnattcgagagcgaganggcgagcagcaacactgacggaggagggccgttgcggccgctcgattgtgttgtaataaaaatatataaa

SEQ ID NO: 1555 - DNA, 2130 bp, Glycine max
  misc_feature (19)..(19): n is a, c, g, or t
  misc_feature (39)..(39): n is a, c, g, or t
  misc_feature (41)..(41): n is a, c, g, or t
  misc_feature (46)..(46): n is a, c, g, or t
  misc_feature (108)..(108): n is a, c, g, or t
  misc_feature (162)..(162): n is a, c, g, or t
  misc_feature (170)..(170): n is a, c, g, or t
  misc_feature (173)..(173): n is a, c, g, or t
  misc_feature (198)..(198): n is a, c, g, or t
  misc_feature (201)..(201): n is a, c, g, or t
  misc_feature (212)..(212): n is a, c, g, or t
  misc_feature (240)..(240): n is a, c, g, or t
  misc_feature (250)..(250): n is a, c, g, or t
  misc_feature (415)..(415): n is a, c, g, or t
  misc_feature (451)..(451): n is a, c, g, or t
  misc_feature (510)..(510): n is a, c, g, or t
  misc_feature (595)..(595): n is a, c, g, or t
  misc_feature (609)..(609): n is a, c, g, or t
  misc_feature (679)..(679): n is a, c, g, or t
  misc_feature (759)..(759): n is a, c, g, or t
  misc_feature (808)..(808): n is a, c, g, or t
  misc_feature (879)..(879): n is a, c, g, or t
  misc_feature (887)..(887): n is a, c, g, or t
  misc_feature (889)..(889): n is a, c, g, or t
  misc_feature (935)..(935): n is a, c, g, or t
  misc_feature (992)..(992): n is a, c, g, or t
  misc_feature (1025)..(1025): n is a, c, g, or t
  misc_feature (1054)..(1054): n is a, c, g, or t
  misc_feature (1081)..(1081): n is a, c, g, or t
  misc_feature (1090)..(1090): n is a, c, g, or t
  misc_feature (1165)..(1166): n is a, c, g, or t
  misc_feature (1188)..(1188): n is a, c, g, or t
  misc_feature (1205)..(1205): n is a, c, g, or t
  misc_feature (1232)..(1232): n is a, c, g, or t
  misc_feature (1235)..(1235): n is a, c, g, or t
  misc_feature (1246)..(1246): n is a, c, g, or t
  misc_feature (1302)..(1302): n is a, c, g, or t
  misc_feature (1355)..(1355): n is a, c, g, or t
  misc_feature (1381)..(1381): n is a, c, g, or t
  misc_feature (1386)..(1386): n is a, c, g, or t
  misc_feature (1401)..(1401): n is a, c, g, or t
  misc_feature (1528)..(1528): n is a, c, g, or t
  misc_feature (1601)..(1601): n is a, c, g, or t
  misc_feature (1623)..(1623): n is a, c, g, or t
  misc_feature (1676)..(1676): n is a, c, g, or t
  misc_feature (1681)..(1681): n is a, c, g, or t
  misc_feature (1700)..(1700): n is a, c, g, or t
  misc_feature (1738)..(1738): n is a, c, g, or t
  misc_feature (1844)..(1844): n is a, c, g, or t
  misc_feature (1868)..(1868): n is a, c, g, or t
  misc_feature (1907)..(1907): n is a, c, g, or t
  misc_feature (1909)..(1909): n is a, c, g, or t
  misc_feature (1931)..(1931): n is a, c, g, or t
  misc_feature (1950)..(1950): n is a, c, g, or t
  misc_feature (1958)..(1958): n is a, c, g, or t
  misc_feature (1961)..(1961): n is a, c, g, or t
  misc_feature (2013)..(2013): n is a, c, g, or t
  misc_feature (2015)..(2015): n is a, c, g, or t
  misc_feature (2089)..(2089): n is a, c, g, or t
  misc_feature (2116)..(2116): n is a, c, g, or t
  misc_feature (2119)..(2119): n is a, c, g, or t
  misc_feature (2130)..(2130): n is a, c, g, or t
  Peptide Sequence Number=SeqID_8160
  Probeset Number=SeqID_11334
actatcgcatgcagactanccctcactactctacacttntnatctntcatctagcgtcatgcctacacagagatataatagtacacgaagcagacagagtacatatanggagtagagactcgctagattatactatcacggtagatagagacatcatatccnacacaccngcngtcgacgcgtgagagtatgtagatngtnatagtgtcagncgactcatcacgcgacgttcgcgccgcncgtgctgcgncgtctgatgcgtctgtgagttgtctggtgtcttagtcgtatgtactagtagatacatgtgtagtgtgtgagcacgagcgacgacatacgttaattccactgtcgtatcacactatattcgtatctcgtcgatcactactgatacaaacaagtgtacgctgatcangcgagtatgtgcagctaagctagatcgtgatactantgcgcagtacgatagcgtagtcgcatggcatagcacgcgactcatatcatctcgtggtntcgctctagttcactctgtgccgcgcacggctcacgcgcacactaatcgcgtctaactatatcagatctacatgcaacagcacangatatgatgcgagntacgatatcagtggagctaagacacttatctgcacgcactctatctctcagacgctgaacgatgctgatngcatgcgctaagtagcgttgaagatgtaacgtgcgctagatgaatgagtgctgcactagctgcatactcgtctgcgatgnctactcatatgctataagtatcacgcaatacttgatgtctgtcgcgcancgtcctatctgctcgtatcgtcgtatgctacgccactagtgtgtgcggtggcatacagcgctacctgcganctggatananacgatatatagcactcgtatcacgcgatacatctgcatgcgctacnggacgtcagctgcgtgcgacgtcgatactgatagtgcgagacgatgacggcgtagantatcagtgagcgcgcgcttcacgtgtgcacganatggctagcgatatgacactatcgtatanattgacactgctatacgtatttgtgancgtattgantgcgtagtgtagtcatagtcatgatcgtcgagagtgtgtatcagactcgtctattatcacgtactggcgctattnngatcgatgcacgataacaggcncatcactactcgtacgngtactgatgaactgatgtcactctacntcntcgtctcgaantcgcgatctgtcgacgcgctacatcgatgctcatgcgcacaagattcaatgtgatnacgatgtgtagcgacgacgagtactcacgcagacacggatggcgacgctcgancgctatgcgcagacatcgcttgagangtgantactacggtgatcanattgcaattactagtcgtctatcgcgcgacagagcgcggagtgaggcgtatagatatatatacttgtcatcgtaatgcactacttgggatgtgtgtacatagtatagcattgaatagcagtacttangagcagtagcgtctgtgtattagatacgtactgtatatgtcatgctacgtcgtcatctcagataacacgtacngactctacgtcgtcctaatgtncgagcaaatgagacgctgacatacagcagaagcgacgtcgtcgatctcgctantgatnagcgacgatagatatactncaagctcactcatgcatgaaatgactgctactatggantggcacgcacgtttaatagagagagtacaggagcgcgatcgtgactttggtacgatgtctatcgagcgtagtgtgagctacggtgacgtgctgaagacgttcggcngacgaatatatgtgacagcgacgncgtagtcgcacgtgatgctgtacgatgacggagacggcncnaacctgatatagcaatagaganatgacacatgacgcattancggacggnctngacattcgatatgaggcgtatgtctctacagagtacgataacacgtcgtcgnanctacttctgtatgtatcgctaatcgtgtactctgttgacgaacactcactgttagcattgcggtagatacgtgntacatcgtacgtcgagatgattgcggntantgtgcactgtn

SEQ ID NO: 1556 - DNA, 265 bp, Glycine max
  misc_feature (188)..(210): n is a, c, g, or t
  misc_feature (236)..(241): n is a, c, g, or t
  Probeset Number=SeqID_11335
gttgcttttattggtgtcaacattggtacagatggtggcccttcttaaggctcaagatctgagccagatgcaactcttgataatgctaatttacacttacaatattaacttatcaggcatatcattaacaatacatagtgggactcctaagcaacctggaattgcacttagcacgtatatttatgagnnnnnnnnnnnnnnnnnnnnnnnagatctgtcagaaaataactaagggnnnnnnctaaaactcttggagcctgcatta

SEQ ID NO: 1557 - DNA, 1714 bp, Glycine max
  misc_feature (1)..(1): n is a, c, g, or t
  misc_feature (4)..(4): n is a, c, g, or t
  misc_feature (8)..(8): n is a, c, g, or t
  misc_feature (59)..(59): n is a, c, g, or t
  misc_feature (63)..(63): n is a, c, g, or t
  misc_feature (84)..(84): n is a, c, g, or t
  misc_feature (86)..(86): n is a, c, g, or t
  misc_feature (109)..(109): n is a, c, g, or t
  misc_feature (114)..(114): n is a, c, g, or t
  misc_feature (117)..(117): n is a, c, g, or t
  misc_feature (126)..(126): n is a, c, g, or t
  misc_feature (184)..(184): n is a, c, g, or t
  misc_feature (261)..(261): n is a, c, g, or t
  misc_feature (272)..(272): n is a, c, g, or t
  misc_feature (276)..(276): n is a, c, g, or t
  misc_feature (383)..(383): n is a, c, g, or t
  misc_feature (397)..(397): n is a, c, g, or t
  misc_feature (407)..(407): n is a, c, g, or t
  misc_feature (469)..(469): n is a, c, g, or t
  misc_feature (511)..(511): n is a, c, g, or t
  misc_feature (523)..(525): n is a, c, g, or t
  misc_feature (527)..(527): n is a, c, g, or t
  misc_feature (606)..(607): n is a, c, g, or t
  misc_feature (612)..(614): n is a, c, g, or t
  misc_feature (620)..(620): n is a, c, g, or t
  misc_feature (626)..(626): n is a, c, g, or t
  misc_feature (629)..(629): n is a, c, g, or t
  misc_feature (665)..(665): n is a, c, g, or t
  misc_feature (673)..(673): n is a, c, g, or t
  misc_feature (675)..(675): n is a, c, g, or t
  misc_feature (793)..(793): n is a, c, g, or t
  misc_feature (842)..(842): n is a, c, g, or t
  misc_feature (894)..(894): n is a, c, g, or t
  misc_feature (897)..(897): n is a, c, g, or t
  misc_feature (950)..(950): n is a, c, g, or t
  misc_feature (1051)..(1051): n is a, c, g, or t
  misc_feature (1084)..(1084): n is a, c, g, or t
  misc_feature (1242)..(1242): n is a, c, g, or t
  misc_feature (1272)..(1272): n is a, c, g, or t
  misc_feature (1445)..(1445): n is a, c, g, or t
  misc_feature (1572)..(1572): n is a, c, g, or t
  misc_feature (1652)..(1652): n is a, c, g, or t
  misc_feature (1666)..(1666): n is a, c, g, or t
  misc_feature (1685)..(1689): n is a, c, g, or t
  Peptide Sequence Number=SeqID_8161
  Probeset Number=SeqID_11336
natntggngatcacatatcatagtctcgtacgatgctctcctggtactcttcatcatcntcanattactacagtgacaatatgnanttgtgcattgagatcgtccagtnacganagnaccgatgtnatatctcatgatatagaaatgatgtacgcagtgcacgctcacatgcatctgtcgcacntctcgctcatctcaccctcacacataacacgagatatacgacagagacatataagtagatgtaggactagtcggagngccttttgctncttncattagctatcacgtactccgatgtctacatatacgtgggcaggtacatagttttcgcggcggcgaattcgtgatcgatacgtcctcgacgctcgactgcggcatcngtatgtcttgttcnctcatttcgncgacatcgcgtgctacgagcagtacggtggtgaatacagctcgaccgcactagaggtcctanatctacgcgcctccacatatacacgagagtatacagtcgcgntatcttgtgtgnnngntgctgttcaccttctatgagctcgtagagatcgagcgtatactcagtgagtcagtcgaagcgtcataactgttgatcgnnggcgnnngcaganccagcngtntagtagatagcgtgtctgcgatcacatcttacttcntatcgagnantcaaacgtatctcatgagtaccacgcgtgtcatcttgaatatgtcgctgtcgtcatgatgtgacagagtagtgagtcgcttggagtgatgtgtgagtatactagattagatgattgtngtgtcgtcagactcatgatactgctgctcacaatattctaatctaccgnatatcatcgcgaggatagtctatattatgtagttctcgtatgatgaatgacnacncagaacacctaaatgaaatagagtcccgtagagcgagtgcacgacgcgcctgnagcgcgtggaacagtaggagagcgtaccatcctatataatatatattatattaatatatagaggcgcgtcgcgaagtatgatatagtggtagaaacatagnagcggcaacatagcggacaacaccgacacacangcgtgatctgcgtaaaatgtgcggttgggatgtcatgcggagtccgcgttgttccgtgtcgcgtgttctcactacagaatatagattacagtaagagaggatcgataagatattatgtatagtagcagcgcgcgacggacataacaagacaggacacnctcaatattatcagcgcgtgaagtgagtanatcctacatacgcgttaatatgctgtaaagtgcctggtatattgttcgataccatttgcgcgagcgaatatgatctagaagataataggagatctacggtccagtcacgttcactgatatgcgacaaatgcagacacgtcggcgtccagtaagcgacgtagatgctagtctgnttgtgtccttcattacatcaactattgcgtctcgtgagactgtctctcgatataagcaacagatacaccgctatattttcttatgtcgagccctctctgttgagtcgtaatccaactaacggtccgngagaatgctcggccgccgccgcaccgcgtccgggtggaggtcgtcgccaggcttctttaaaaggccgactggcagtccgnatcttttggtttgntgtttagagatagaggcgnnnnnccggatatagaaagtgtcctgcgcg

SEQ ID NO: 1558 - DNA, 1726 bp, Glycine max
  misc_feature (1)..(5): n is a, c, g, or t
  misc_feature (14)..(14): n is a, c, g, or t
  misc_feature (17)..(17): n is a, c, g, or t
  misc_feature (30)..(30): n is a, c, g, or t
  misc_feature (32)..(32): n is a, c, g, or t
  misc_feature (37)..(37): n is a, c, g, or t
  misc_feature (61)..(61): n is a, c, g, or t
  misc_feature (122)..(122): n is a, c, g, or t
  misc_feature (232)..(232): n is a, c, g, or t
  misc_feature (529)..(529): n is a, c, g, or t
  misc_feature (654)..(654): n is a, c, g, or t
  misc_feature (835)..(835): n is a, c, g, or t
  misc_feature (847)..(847): n is a, c, g, or t
  misc_feature (876)..(876): n is a, c, g, or t
  misc_feature (887)..(887): n is a, c, g, or t
  misc_feature (994)..(994): n is a, c, g, or t
  misc_feature (1032)..(1032): n is a, c, g, or t
  misc_feature (1136)..(1136): n is a, c, g, or t
  misc_feature (1213)..(1213): n is a, c, g, or t
  misc_feature (1234)..(1234): n is a, c, g, or t
  misc_feature (1306)..(1306): n is a, c, g, or t
  misc_feature (1311)..(1311): n is a, c, g, or t
  misc_feature (1317)..(1317): n is a, c, g, or t
  misc_feature (1412)..(1412): n is a, c, g, or t
  misc_feature (1433)..(1433): n is a, c, g, or t
  misc_feature (1481)..(1481): n is a, c, g, or t
  misc_feature (1526)..(1526): n is a, c, g, or t
  misc_feature (1542)..(1542): n is a, c, g, or t
  misc_feature (1544)..(1544): n is a, c, g, or t
  misc_feature (1549)..(1549): n is a, c, g, or t
  misc_feature (1554)..(1554): n is a, c, g, or t
  misc_feature (1593)..(1593): n is a, c, g, or t
  misc_feature (1595)..(1595): n is a, c, g, or t
  misc_feature (1615)..(1615): n is a, c, g, or t
  misc_feature (1659)..(1659): n is a, c, g, or t
  misc_feature (1679)..(1679): n is a, c, g, or t
  misc_feature (1706)..(1706): n is a, c, g, or t
  misc_feature (1708)..(1708): n is a, c, g, or t
  misc_feature (1726)..(1726): n is a, c, g, or t
  Probeset Number=SeqID_11337
nnnnnttgggtggnggnttattgttcgggngntgcangtgtccaccctggtgggccacttnacactcccttccaccactcgccaaacggggagccacgagcgcgaaattgaaaacatgtatntatgctcactaactcgtataaacaatgaaagcgcgaagtagatgaacacgccacacacgcccgtcgtcgatgttagagtacttattatagcatcattattactacaatgnatcagactgctcgcactcgctacgcgtacgcgcccgcgccccggcatgctgtggtctgccgcgctgtcgtctctctgtcccacctgtcctgtggttgtgtctgggtgctgtcgtgcgctcgaacgcgctgtatttgccatcgcatcctgcgccatgcgcgggatcgtggtgcgggatcatgtgtaggtggtgcggtcagcgccgcattcgactgatacgattatatgtgactcttcttttgtgtgcgtgtccagcgcctcttgcagcgcggcgcgcgtgagagggagaacgtggctnggggagagatcacgcttgcagcatgctctatcgtattttagcgtgtaggagtgcgcgaggcgatggacgcgacgagtaatgaagattcagcgtaaggacagacaaaaagcacagacacgcgccanagcgcccgcgcagtcgctccgcctcactctcatctctcgtctacgtcagctctacactatatcacatacattcaccgtatataccgcaggcggcagtggtaacgaaacacagaaatacggatatatatatattatgtagcgtagtatcagcaatgatggttgacactatatatatgattanaataaggagtgnaaaaaatatagacaagagtaacaagaagntaccatctctncactcaaccaaatccatcctctcacgcgccgcgtacgatctgtgacgagtcgcacgactgacggtgcctcagctcattccgcaccgcacgaaactcgcatctgagtngatgctgactactcgccgcactctcgagccatgtcgangattcgcgctctcgcgacgtcgactcttccgagtgtcgagcgtgagctacatcaacgattcgacatacgacatgctagtgagatagcgatcgcgcaccgcgtcncgttgcgtcgcgcgtgtgatacacgcgttcggtcgtctctcgattcgtattcgcgatgtcgctgtgcttgctctgtnctccgatgtgtcgataatctnatcgctgatagtactagcgcgtcggtgccgtacgctgatgatatcgcacattgcgcgctgcgcgcgagactncgacnctcgtntacacgtcatacacactgtgctactgctatcgtagtggtataccgcgcgcgtgtcgacagataatgcatcgcgacggtgatcgtaattcgagcgngacggacggcacgatgcgcgnctcgtcatgctggtgttaacgcagaacagctcgcgcacttgccgctgnctcacatatgaactcgcgtgcgtgtctacttgctgacgagagttntccgcacgcgcccgcngngatgncaacnatcgcgatagcacggctcgccgcgagctgcgcgatacangntgagcgcgacgcggtgtagntgagctaggttacatgcgtggtgctatgatgtatgacgataagncaatgcaccgctgacttgcntcattatgatatgatgatgcatgtaantnaactacacgtgctactcn

SEQ ID NO: 1559 - DNA, 986 bp, Glycine max
  misc_feature (1)..(2): n is a, c, g, or t
  misc_feature (83)..(83): n is a, c, g, or t
  misc_feature (107)..(107): n is a, c, g, or t
  misc_feature (126)..(127): n is a, c, g, or t
  misc_feature (199)..(199): n is a, c, g, or t
  misc_feature (957)..(986): n is a, c, g, or t
  Peptide Sequence Number=SeqID_8162
  Probeset Number=SeqID_11338
nntgaagagaaagacaattaattgttttggttggaattatagagaccagaggaaatgagcggaataatctgttgatgtgtgantagaatatacgtctactatagatncgtggttagggccgatgtnnctggagacgcgagagagttattcggcgtatagtgataaagtggcctcctgtctggagtaataatatgcaganattagtctgttgactgtagatgtgttgccctagattctcatgggaagcatcacttgagcgattgtagcagccgagggcggaaagagatattatttggctttcaaatccggtgtagggcatgaacccgggtatacctagtacaagggggcgggttgctttgtgcgggagagatttgacagcaagttcgaccggggaggcagtgtcgggggggggggaatagtcaggctgcgtttggtgcgcgggggggggtaaaggctgccctggagggaagtaaaagcttcgtgccagagcctcgcagggatgaactccaagtatgtgggcgagcagcagcaacggccgccgttcagcgctggccgatacggcgcggtgaccaaggtctatgtgattgtcaatcaggaccagtccatggtcgaggagtaccagaggcagattatcgcaggcatccccgtggctgaggtgagtgagatgtctgacgccgaccacatggccatgctctccgcgccggaggaacttgcgggccacctcgccgacatcgccaacaactacacttgatcgatttgcggagcctacttgtactgttcctaagataaaacgcatgtcttccgtagttggattgtacttacaattagaggaagaaatctcctgaaatgtgagtccagatgtaccgcagacgagggctctttttcaaatgaattttatataaattacatgtggtatgcaaatctgtagatatttggcagtaaaaaaaaaaaaaaaannnnnnnnnnnnnnnnnnnnnnnnnnnnnn

SEQ ID NO: 1560 - DNA, 545 bp, Glycine max
  Peptide Sequence Number=SeqID_8163
  Probeset Number=SeqID_11339
ggagagtgtatacatgagatggtggctcacctcgatgaggtgaccagtgttgcctgtgatccaaatggactccacttactcactggtagtcatgattgtagcgtcagactgtggaactcttgattctagaacttgtgtacaagaaataacctcacatagagaaaagtttgacgaggcaatatttgatgttacctttcacccttctaaacctttcttcgccagcgccggtgcagatgccttggccaaagtttttatatgaacataagttgttcttctctaatcacaaccatcaacatctacgaaacaagttacaaaaaagattgactattgtaacaccaatcatcaccaattgattcgcgcaaacaaactttttcctgattatttccacttcgtggcgttgataatacttttactctcactttctttcctttctttctgtctttctctctctctcctcactcatattgtcacagtttcaattgataaaccataacactagtagacataccttaaagtacattttaaaaaaaaaaaaaaaaaaaaaa

SEQ ID NO: 1561 - DNA, 1631 bp, Glycine max
  misc_feature (1631)..(1631): n is a, c, g, or t
  Peptide Sequence Number=SeqID_8234
  Probeset Number=SeqID_11340
tcagctacgtaggccccccccccaattaatttaaataatttggacaaatggaaaacaagccagaagaagtaaaagcaaaccaagaaggtgaaactgagaccgttgagaatgtcgaggccacaaagcacgttgagctagatgaaggaaaagatgaacaaattgaatgtgatgacaaagaaaacaacactcagctatcttccaacgatttgcaataccttcttgcagataaagaatggaaagatgctattgtaaacttccctgaaaccgaaaagattatcagtagacttattgagctcggttttgcaaagccctccaaaatccaatccaaaactgttccttttgcacttgctaagaaagacgtcggtatcattgctcaatcacataatggttcaggaaagactctcggcttcgtgttaccagctgttctgagaattgatgccacaaagcctttgatgaaaagccagacaactttcttaccacaagcaatccttattgctccaaatgctgaactttgctctcaaattgttaagattgctgaactagtagctcaaccatttaaagatattaaggtatctggtggcagaactccagctcaccttattgttaagacttcccaaagtctagtcagtgcaattagtaaaaaggagattgatttagctaatgcagatgtccttattgttgatgaagctgatgatcaattaaaaggagacactgctcttagactcctccaaattgtatccaaactgccaaaaggagctggtttattcttcttctctgctactttcaccaaagaagccattgattatatgaaccaattctttgcaaagttgagcttaaaattcgtgttaagatatatgcttaagaccgatgagctaaaacttgacggaattgaacaatatagccgaaaatgtgaccctaatggcaaggcagactatattgctaagcttctcgataagttagaagttgatacacaagctatcatattctctaacactaagaattttgctttgagagttagtaatgaattgaaaagtaaaggtcacaatgttggcttgctaatgggtggtcttatgcctcaagaaagaagtgaaatcttgaactcatttagagaatctaagattaaagtcctgattacaaccaatcttttggcaagaggatttgatcaaagatccattggacttgttatcaacttagacgttcctagacactttggagcagaaaataataaagctgattgcgagacttacttatatagagttggaagaacaggaagatttggagacgtcggattagcaattaacttatattcaaaagaagatgaaaaagacttaatcgatcaagttgaaaagttctacaccgtagaaatcaaggatctttcaaaggaaagtggtgataatgaatttgatttaatcaacgataagcttggaaaagttgtcaagattaatagcaaaaagcgtgaagaaaacagggaaaaaatcgttaaatcctaaacctatctataaaatagttatgcgtttatttcataatatacatgcgtttacgtaaactagtttcatgtttcaaaatagcagcaaattagagtttattcatttattaaattagtctaaaatcccaaaaaaaaaaaaaaaaan

SEQ ID NO: 1562 - DNA, 1591 bp, Glycine max
  misc_feature (1)..(1): n is a, c, g, or t
  misc_feature (47)..(47): n is a, c, g, or t
  misc_feature (126)..(126): n is a, c, g, or t
  misc_feature (144)..(144): n is a, c, g, or t
  misc_feature (343)..(343): n is a, c, g, or t
  misc_feature (535)..(535): n is a, c, g, or t
  misc_feature (1049)..(1049): n is a, c, g, or t
  misc_feature (1067)..(1067): n is a, c, g, or t
  misc_feature (1159)..(1159): n is a, c, g, or t
  misc_feature (1445)..(1445): n is a, c, g, or t
  misc_feature (1582)..(1582): n is a, c, g, or t
  Peptide Sequence Number=SeqID_8235
  Probeset Number=SeqID_11341
ngaggagagtgtatgtacacatgtactagattccgacagacgcgagnggtggataaagtggcgtggcgagaagagacgaccacacaaggtagatgtcagcaattagcgcgtccgtgagccatatgnattcacatatgctaatcnatcgtcgattcgatgagaatgcgatagccacactcactcacgaccgcggtgacagacagcagaggtacgaggacaagcagagaatcgaatacgaccgataatcaggacgtcgtagagagagattcaaaacattacaagagagtgccagcatagtactatatcacactgtacatcacgatcgggtcgtcactcatattanatattagatcataacaacaggctcatacattcatagcacacgcgagatgtatgagtatagacagcacagcgcgctgaggaggaagacgacgagagatgtgtgtcaatcgtatgttatacgtccgtcatagttgtctacatatctggtcactacacatcgtgtagtatgtgcagtactgcacatacacgcacnaggctgcgttaataggcaattatgtatatgacaacaagatcgcctgctatgtgtgatgtgtagatcgctcattatacgcacgacaactccgtcaggtacaagatactatttatagtagagatattatcattatacactgtcacatagtcgtcatcgtatgatcgtggcacggcgtaatagcgtgctataaaatacgatagtagctttcacgaccgtgcttagtcacgtcgatgagtacgtacactattataccacatagtagcttcgctcaagtgttagaatcaggagttcagcaacagagctgagtacgagtagtggagagtaaatagatatgaagtgaattaggtatatttttcttaatgtggcgtagtgctaggagagcatctgtccgtctattttagggtgatgtgcactcattgaataacacgtaggcgcgttacgctgcacacatcactctgaggtgtggatagaattaatgaaataggtatgaacaagggacgatgtgtatatcagntctatcatatatatctgncgcctattatatgatgatattttatactgcaaacatctttcagttatgttatattatctgtagtatatacacatagacagatcaataccganaatactaggtgtttactcttctattcaacgctctattgtccggttctcacttgatgagtaggcctatatctttatagaggtgtaaagtccgcgcactactcactatagacgggtaagtcgccatctctctcatcgacggcatactgccaagacacgccgcagagagacataggtgcgtgacagagcaggacgcaccgcggatgtgagggcgtgtgatctcctgatccgtgttgacgagcgatagcgcaatcgcacgtctactcctcctatttcaattgtataatgngataatatatcatatataggaatgagtgtctattaatacgtggataaaatcggcgtcgccagttacgggttgtatattattctctttttcttttgttttatcataagtgagattgagtctgtctcatcagaacctcnttatataac

SEQ ID NO: 1563 - DNA, 490 bp, Glycine max
  Probeset Number=SeqID_11342
ttttttttttttaaaaagcaaataatatgtattgaaagtatatattacactcatcatttcatttattgttgtgtatgcaaatcatgacaaacttcggagaagaagcgaataaatataaaaatacagacactctttatatttgatcttggcagcctaaagaaatacaaaaattaaaataagtacataataaatgatagcagtataatttagaccaaaagaagtagaaattgaactttgactgtaaaatacattgaaattcacaagtgcaagttttgtgtcagcttgacagtagtagcatggattgttcggacactagtatcaaagtcctgatgggtcatttgatgtcctatgaagcctacaagtgatcagttttgggaagatttgctcgtgtgcagaaagacatgacctataatatgtggaataaatatacaatttggccaaaaaaaaaaaaaaaaactcgagactagttctctctctctctccctcgtgc

SEQ ID NO: 1564 - DNA, 467 bp, Glycine max
  misc_feature (279)..(279): n is a, c, g, or t
  Peptide Sequence Number=SeqID_8236
  Probeset Number=SeqID_11343
gatcctcgtgtcccagaagaacaatggcgagtccttattgcatattggaatacggaaaaggcaaaggccagaagtgctgcaggtaaagcttgtcgggcgaaatcaacctatatcactaaaaccggatcaaagagctttgcacgtatatttgaagaagagtcacgatctggtgaccctgctcttgagaatccagaaagcccagaagatgattatgcacctgccatgggtgcaaaaaggagggctagtgcacgcacgtatacacctgcgccctcccccaangacctacaggaaaggtcagacccgcaagctgcgagggccaaacgaaaggctggagatgaagtctccacaccgagaaagaaggtggtagtaacagaggaaagtcgccccaaaaactctcaggaaaatgcagtcttggaagctgcgagggctaaaagaaaagctgaagatgaggcagccgctctaaggaa

SEQ ID NO: 1565 - DNA, 688 bp, Glycine max
  misc_feature (59)..(59): n is a, c, g, or t
  misc_feature (317)..(317): n is a, c, g, or t
  misc_feature (449)..(449): n is a, c, g, or t
  misc_feature (601)..(688): n is a, c, g, or t
  Peptide Sequence Number=SeqID_8237
  Probeset Number=SeqID_11344
acaactcctcctcccttccgcccgagaaatcccaaccatttctccgcatccgcctcggnacgcggccgccggcacacgctgcgcagggagtgggaaagggcgcgatggaggatgactcgccggcgacgaacacggtgaagggcgccgtgacgggcctggccgcgggcaccatctggggcaccatcgtcgccacctggtacgacgtgccccgagtggagcgccacgtcgcgctcccgggcctcgtccggacgctcaagatgtgcgccagctacggggtcactttcgtcgccgccgaagggccctacatccgccgagtnaccagaacgcgtcacacgcagcccaaagaaaagcgacttccagtaaccgggcccattctacagacttccgacttccctacaacaaacggtccgcgggcttcccgacgcgaattacctatttcagaccccgcnccaaacttgccgcgcccaaagccctggccatctaccttcctcgcactcccggccaggccggtccgcctccctcccccaccatttgcataattggttctaaccccaacctcagaaacccattccatctcaacaattctccccccccctctacnnnnnnnnnnnnnnnnnnnnnnnnnnnnnnnnnnnnnnnnnnnnnnnnnnnnnnnnnnnnnnnnnnnnnnnnnnnnnnnnnnnnnnnn

SEQ ID NO: 1566 - DNA, 1501 bp, Glycine max
  misc_feature (1)..(1): n is a, c, g, or t
  misc_feature (25)..(25): n is a, c, g, or t
  misc_feature (112)..(112): n is a, c, g, or t
  misc_feature (125)..(125): n is a, c, g, or t
  misc_feature (129)..(129): n is a, c, g, or t
  misc_feature (135)..(135): n is a, c, g, or t
  misc_feature (155)..(155): n is a, c, g, or t
  misc_feature (166)..(166): n is a, c, g, or t
  misc_feature (220)..(220): n is a, c, g, or t
  misc_feature (233)..(233): n is a, c, g, or t
  misc_feature (244)..(244): n is a, c, g, or t
  misc_feature (320)..(320): n is a, c, g, or t
  misc_feature (356)..(356): n is a, c, g, or t
  misc_feature (470)..(470): n is a, c, g, or t
  misc_feature (487)..(487): n is a, c, g, or t
  misc_feature (552)..(552): n is a, c, g, or t
  misc_feature (574)..(574): n is a, c, g, or t
  misc_feature (722)..(722): n is a, c, g, or t
  misc_feature (731)..(731): n is a, c, g, or t
  misc_feature (783)..(783): n is a, c, g, or t
  misc_feature (939)..(940): n is a, c, g, or t
  misc_feature (972)..(972): n is a, c, g, or t
  misc_feature (1045)..(1045): n is a, c, g, or t
  misc_feature (1107)..(1107): n is a, c, g, or t
  misc_feature (1118)..(1118): n is a, c, g, or t
  misc_feature (1142)..(1142): n is a, c, g, or t
  misc_feature (1212)..(1212): n is a, c, g, or t
  misc_feature (1267)..(1267): n is a, c, g, or t
  misc_feature (1407)..(1417): n is a, c, g, or t
  misc_feature (1419)..(1422): n is a, c, g, or t
  misc_feature (1478)..(1478): n is a, c, g, or t
  misc_feature (1490)..(1490): n is a, c, g, or t
  Peptide Sequence Number=SeqID_8238
  Probeset Number=SeqID_11345
nagagtgagatcgagataactaccnccccacatattgtatgtgtcactcctcatgtagtgatatcagcacacgcatataaacacgtgtccacgccgtattatcacaccgcanatcttaagttttntgtncgctantagcaataggtctacgccanagatatctctntctccgcgtattattgtacagcactattcacacacacttctgtattacgcagcnctcttatcgcgcnatgttgctggngtagagcagcgatatctatgtcgagtgtgcacggcagttgtagtcgcaggatgaccaccgtaattcgtccaaagcnacgtattactacgtaaccggtatatattgcccgacngtattgttccacgatatgacctgcaccatgttattcttgcgaaataacgcgtgtgtattgccaatgcgcttgtgacaccctcgtacctgcattgctatgttatatcgtctcatnttatttatctgtgcgtngttgtgagcggcgagtagtggcgcgattatgctgtacggagtggcgcacggatctgtatcacgantgagcgcggtggtggtatccgntccactaatctcatatccacaatacatcactcgtatgaatcccgcacgccgtgggttgtactgcgcactactcacaccccactattttatcaccaatatatcaccctcactatcatacaactccacctagttatagatcgctcacctncaccatcangactagccccattcatatatcacaaccactatctacaataccatatcacgcngagtaacacagccacgtacatgtcagagaccgaccttctagtagcgcgatctctgcccgcgtgtgaccactagacacaaccacattgttcgccctcttattcttcttgtttatttagtgcgccccgcgagtgcggcgcgcgtagtttgtgtgtgtnnctatactcgccagataacgagacgaactatangggcatatccccacccgattatgtcagcacgtttaactcacatatggtagtgagcaagcgttccgacagttgngagtgttacacaacgagtatcgactattctaccggagttgattatatctcacgatatcccanacagtctcacnttgttaggcccgcatgacgcgacngttccctcacttacgatgacatgtctcacgccacgcgacgatatagatgagattgttatgtttctctatnttgactcacatcgtcaacaaatcacgactatatatctacgtacacacattacatntatctcgaagtatataaacacgtttttgacgatccatcacactaccaccagatagggggggtggtgtgcgtgccttctatctttgtttcttgtatcttggtgtgggtggggccctctgccgtcctcccacacatatgggnnnnnnnnnnnannnnatatcaataattttttaaataacacaaacaggtagagtaagaagataacagaaatnagaaggaggagnaggaagaccaa

SEQ ID NO: 1567 - DNA, 1453 bp, Glycine max
  misc_feature (26)..(26): n is a, c, g, or t
  misc_feature (29)..(30): n is a, c, g, or t
  misc_feature (35)..(38): n is a, c, g, or t
  misc_feature (43)..(43): n is a, c, g, or t
  misc_feature (48)..(48): n is a, c, g, or t
  misc_feature (52)..(54): n is a, c, g, or t
  misc_feature (58)..(58): n is a, c, g, or t
  misc_feature (61)..(63): n is a, c, g, or t
  misc_feature (674)..(674): n is a, c, g, or t
  misc_feature (929)..(929): n is a, c, g, or t
  misc_feature (1122)..(1122): n is a, c, g, or t
  misc_feature (1220)..(1220): n is a, c, g, or t
  misc_feature (1287)..(1287): n is a, c, g, or t
  misc_feature (1289)..(1289): n is a, c, g, or t
  Probeset Number=SeqID_11346
tttttttttttttttttttttttttnttnnccttnnnngcgancctcncgcnnnatcnccnnncctctctctaaatggttaagtggtaaggtattgtatagaatgtcaagttatcatactcgagtatatagacgacatctctctatcgattacaatttcatgttttctcacagtgttcaaaaactcaccacacaatctatataagtgcttcgtacctacaacacttacacaatgacacatcccttcccacttatcacactatgaccaccagcctctcgccctcaatacgggacttccctatccccaatcacctgcgcggcatattactaacaacacactgaaccgtcgaacacccagtattgaaagacgccaatgcaccagccaaatcgccactcatccccacttccttgtcgtatttgctccgccgcaaacgcgccattcgtcatgttatataagcacctgacccccataagagcaatcagagatgtttgttaaatatctcagccaaactcgcccataacacaactacctctcgaacactcaacatatagtaggcaaacgacaataacagactgcgaccatatttacactcacaattatacttaaattgttactacaagagatcacacaggctaccccaaaggccacaaattctacctcacacagtacccggncgaagatactcacacccctaacccccctccacaacacagccacccaatccccccccacgccttcactatctactccctcaccctactttctaattacacaccatttctaatagtggaaccacgatcaataacaactggcaagacactctctactaaaacacacaaattcaagcgagacataacaatacgacctgctatctatccttgacacgctagacgcactctgcgcgacccatttcttagcgcctccacacntaaatctctcctaccatcaatctagtatttatacacaccatcctcaccctacatcagcctgtctaaatcgataccttacatcatctacctcccgccctcactctgcccacacatatatagacatgatgacagactctatatgtatatttctgttatatctacactctctttctgaccattacacactatcatnacacccacgcacgcacacacctcgactacacacacgagcacagccaacaccacccgccccccacaccccacgccaccacacctcgcacgacctaccgntcctccaaccacctcagaaggaccagcaataccaaagatgctagattcccacaatacaccgcgcaanantattcccgcctaccctatcttcatcactcaccactaaacacaccgctatctctcttactgcgcccgcgccgcctatttatcgaatacctcccaactcctcacaatataatgtgtctctatatctgcacacccgtctccccacgtctcatacaccacgtcgcact

SEQ ID NO: 1568 - DNA, 473 bp, Glycine max
  Peptide Sequence Number=SeqID_8239
  Probeset Number=SeqID_11347
aaaaacgagagactcatcgaaggacagatctcaaaagttcaatgtcagccgccagaatcagtcttccgctccgccgcaagccgagcatccgccgcggcgtcaagattctccaccggacccaagcctacgccgtcatcttctcggcctgcgtttcggatgcctaaacagagccctctttcaaaccgcattttcaggtctccggttgaattgagctgctgcgtggagacgatgctcccttaccacacggccactgcttccgctctgctcaattcgatgctctccgcttctcgccgtggttggatcgtcgaaggtctagacgagactagatgaagatctttcaacaaaaaatgatatggatgactctccttctcaccgttgcagtaaactggaagatttgtttaagagttctaaaaccacttttcttaaaccataacaacagatgcatatggttttttttttttgctgttactttt

SEQ ID NO: 1569 - DNA, 1545 bp, Glycine max
  misc_feature (1)..(7): n is a, c, g, or t
  misc_feature (1287)..(1545): n is a, c, g, or t
  Peptide Sequence Number=SeqID_8240
  Probeset Number=SeqID_11348
nnnnnnncccacgcgtccgtacggctgcgagaagacgacagacggggactccctcttcttaagttgttccttcacctttcttatattcaggaaagtaagatcatctgcatcgccgacgcttccaacaataacaatggccgataatgcaacaacgcaaggaagcaacaccctattttctccttacaagatggccaaattcaacctctctcatagggtggtgttggctcctatgacaagatgcagagcgttgaactggattccacaggcagcgcttgctgaatactacgctcaaagatcaacaccaggtggatttctcatcagcgaaggcaccttgatctcccccactgctcctgggtttccccatgttcccgggatatattcagatgaacaagtggaggcgtggcgaaacatagtggatgccgtgcatgccaaaggcagcattatcttctgtcaactttggcatgttggccgtgcctctcatccagtgtatcaacctggtggagctccaccaatttcgtccaccagcaagcccatatcggcgaggtggaggattctgctgcccgatgggtcctatggcgtgtacccagagcctcgtgcacttaccacttctgagatatctgaaatagtgcatcattatcgccaagcagctattaatgcaattcgagcaggttttgatggaatcgagattcatggagcacatgggtatctcattgatcaattcttaaaggatgcaatcaatgatagaacagatgaatatggtggatcactagaaaaccggtgcaggttcttaatgcaggtggttgaagctgttgtctctgccattggagcggaaagagttgctatcagaatttcaccagcaattgatttcaatgacgcctttgactctgacccacttgggctaggcttagcagtgattgaaagactcaacaatttgcagaaagaactgggcacaaaactcacttatcttcatgttactcagcctcgatacacagcttatggccaaaccgagtctggtagacctgggagtgaaaaggaggaggctcatttgatgcataacttgagataggcttatgagggaacatacatgtgtagtggtggctctactatgaagttggtaatggaagctgttgctgaaagccatgctgacttggtatcctatggtcttctttttatttctcattcagactatggtttatagctcatgctacatgcacctcttacaaagtttaataggatgacattttacaccgaggatcctgttataggctacacggattatcctttccnnnnnnnnnnnnnnnnnnnnnnnnnnnnnnnnnnnnnnnnnnnnnnnnnnnnnnnnnnnnnnnnnnnnnnnnnnnnnnnnnnnnnnnnnnnnnnnnnnnnnnnnnnnnnnnnnnnnnnnnnnnnnnnnnnnnnnnnnnnnnnnnnnnnnnnnnnnnnnnnnnnnnnnnnnnnnnnnnnnnnnnnnnnnnnnnnnnnnnnnnnnnnnnnnnnnnnnnnnnnnnnnnnnnnnnnnnnnnnnnnnnnnnnnnnnnnnnnnnn

SEQ ID NO: 1570 - DNA, 2418 bp, Glycine max
  misc_feature (1)..(1): n is a, c, g, or t
  misc_feature (9)..(12): n is a, c, g, or t
  misc_feature (16)..(20): n is a, c, g, or t
  misc_feature (23)..(23): n is a, c, g, or t
  misc_feature (25)..(26): n is a, c, g, or t
  misc_feature (30)..(35): n is a, c, g, or t
  misc_feature (38)..(44): n is a, c, g, or t
  misc_feature (47)..(49): n is a, c, g, or t
  misc_feature (51)..(52): n is a, c, g, or t
  misc_feature (54)..(56): n is a, c, g, or t
  misc_feature (58)..(60): n is a, c, g, or t
  misc_feature (71)..(72): n is a, c, g, or t
  misc_feature (74)..(74): n is a, c, g, or t
  misc_feature (81)..(82): n is a, c, g, or t
  misc_feature (85)..(85): n is a, c, g, or t
  misc_feature (95)..(95): n is a, c, g, or t
  misc_feature (97)..(97): n is a, c, g, or t
  misc_feature (100)..(101): n is a, c, g, or t
  misc_feature (103)..(103): n is a, c, g, or t
  misc_feature (108)..(108): n is a, c, g, or t
  misc_feature (123)..(124): n is a, c, g, or t
  misc_feature (134)..(134): n is a, c, g, or t
  misc_feature (141)..(141): n is a, c, g, or t
  misc_feature (145)..(145): n is a, c, g, or t
  misc_feature (147)..(148): n is a, c, g, or t
  misc_feature (151)..(151): n is a, c, g, or t
  misc_feature (157)..(157): n is a, c, g, or t
  misc_feature (159)..(159): n is a, c, g, or t
  misc_feature (162)..(162): n is a, c, g, or t
  misc_feature (181)..(181): n is a, c, g, or t
  misc_feature (185)..(185): n is a, c, g, or t
  misc_feature (189)..(189): n is a, c, g, or t
  misc_feature (191)..(191): n is a, c, g, or t
  misc_feature (203)..(203): n is a, c, g, or t
  misc_feature (224)..(224): n is a, c, g, or t
  misc_feature (228)..(228): n is a, c, g, or t
  misc_feature (246)..(246): n is a, c, g, or t
  misc_feature (255)..(255): n is a, c, g, or t
  misc_feature (286)..(286): n is a, c, g, or t
  misc_feature (296)..(296): n is a, c, g, or t
  misc_feature (332)..(332): n is a, c, g, or t
  misc_feature (339)..(339): n is a, c, g, or t
  misc_feature (395)..(395): n is a, c, g, or t
  misc_feature (453)..(453): n is a, c, g, or t
  misc_feature (460)..(460): n is a, c, g, or t
  misc_feature (484)..(484): n is a, c, g, or t
  misc_feature (536)..(536): n is a, c, g, or t
  misc_feature (548)..(548): n is a, c, g, or t
  misc_feature (552)..(552): n is a, c, g, or t
  misc_feature (612)..(612): n is a, c, g, or t
  misc_feature (631)..(631): n is a, c, g, or t
  misc_feature (657)..(657): n is a, c, g, or t
  misc_feature (659)..(659): n is a, c, g, or t
  misc_feature (675)..(675): n is a, c, g, or t
  misc_feature (677)..(677): n is a, c, g, or t
  misc_feature (724)..(724): n is a, c, g, or t
  misc_feature (735)..(735): n is a, c, g, or t
  misc_feature (737)..(737): n is a, c, g, or t
  misc_feature (748)..(748): n is a, c, g, or t
  misc_feature (755)..(755): n is a, c, g, or t
  misc_feature (769)..(769): n is a, c, g, or t
  misc_feature (796)..(796): n is a, c, g, or t
  misc_feature (837)..(837): n is a, c, g, or t
  misc_feature (855)..(855): n is a, c, g, or t
  misc_feature (928)..(928): n is a, c, g, or t
  misc_feature (956)..(956): n is a, c, g, or t
  misc_feature (973)..(973): n is a, c, g, or t
  misc_feature (978)..(978): n is a, c, g, or t
  misc_feature (986)..(986): n is a, c, g, or t
  misc_feature (993)..(993): n is a, c, g, or t
  misc_feature (1017)..(1017): n is a, c, g, or t
  misc_feature (1024)..(1025): n is a, c, g, or t
  misc_feature (1055)..(1055): n is a, c, g, or t
  misc_feature (1087)..(1087): n is a, c, g, or t
  misc_feature (1098)..(1098): n is a, c, g, or t
  misc_feature (1136)..(1136): n is a, c, g, or t
  misc_feature (1148)..(1148): n is a, c, g, or t
  misc_feature (1200)..(1200): n is a, c, g, or t
  misc_feature (1205)..(1205): n is a, c, g, or t
  misc_feature (1258)..(1258): n is a, c, g, or t
  misc_feature (1270)..(1270): n is a, c, g, or t
  misc_feature (1320)..(1320): n is a, c, g, or t
  misc_feature (1336)..(1336): n is a, c, g, or t
  misc_feature (1403)..(1403): n is a, c, g, or t
  misc_feature (1468)..(1468): n is a, c, g, or t
  misc_feature (1498)..(1498): n is a, c, g, or t
  misc_feature (1526)..(1526): n is a, c, g, or t
  misc_feature (1556)..(1556): n is a, c, g, or t
  misc_feature (1566)..(1566): n is a, c, g, or t
  misc_feature (1581)..(1581): n is a, c, g, or t
  misc_feature (1608)..(1608): n is a, c, g, or t
  misc_feature (1735)..(1735): n is a, c, g, or t
  misc_feature (1740)..(1740): n is a, c, g, or t
  misc_feature (1754)..(1754): n is a, c, g, or t
  misc_feature (1774)..(1774): n is a, c, g, or t
  misc_feature (1795)..(1795): n is a, c, g, or t
  misc_feature (1834)..(1834): n is a, c, g, or t
  misc_feature (1838)..(1838): n is a, c, g, or t
  misc_feature (1893)..(1894): n is a, c, g, or t
  misc_feature (1896)..(1896): n is a, c, g, or t
  misc_feature (1901)..(1901): n is a, c, g, or t
  misc_feature (1904)..(1905): n is a, c, g, or t
  misc_feature (1913)..(1913): n is a, c, g, or t
  misc_feature (1923)..(1923): n is a, c, g, or t
  misc_feature (1937)..(1937): n is a, c, g, or t
  misc_feature (1946)..(1946): n is a, c, g, or t
  misc_feature (1966)..(1966): n is a, c, g, or t
  misc_feature (1984)..(1984): n is a, c, g, or t
  misc_feature (1987)..(1987): n is a, c, g, or t
  misc_feature (2000)..(2000): n is a, c, g, or t
  misc_feature (2007)..(2007): n is a, c, g, or t
  misc_feature (2027)..(2027): n is a, c, g, or t
  misc_feature (2046)..(2046): n is a, c, g, or t
  misc_feature (2067)..(2067): n is a, c, g, or t
  misc_feature (2087)..(2087): n is a, c, g, or t
  misc_feature (2090)..(2090): n is a, c, g, or t
  misc_feature (2099)..(2099): n is a, c, g, or t
  misc_feature (2151)..(2151): n is a, c, g, or t
  misc_feature (2170)..(2170): n is a, c, g, or t
  misc_feature (2190)..(2190): n is a, c, g, or t
  misc_feature (2193)..(2194): n is a, c, g, or t
  misc_feature (2197)..(2197): n is a, c, g, or t
  misc_feature (2200)..(2200): n is a, c, g, or t
  misc_feature (2203)..(2203): n is a, c, g, or t
  misc_feature (2211)..(2211): n is a, c, g, or t
  misc_feature (2220)..(2220): n is a, c, g, or t
  misc_feature (2223)..(2224): n is a, c, g, or t
  misc_feature (2240)..(2240): n is a, c, g, or t
  misc_feature (2243)..(2243): n is a, c, g, or t
  misc_feature (2256)..(2256): n is a, c, g, or t
  misc_feature (2262)..(2262): n is a, c, g, or t
  misc_feature (2268)..(2268): n is a, c, g, or t
  misc_feature (2271)..(2271): n is a, c, g, or t
  misc_feature (2274)..(2274): n is a, c, g, or t
  misc_feature (2277)..(2277): n is a, c, g, or t
  misc_feature (2286)..(2287): n is a, c, g, or t
  misc_feature (2298)..(2298): n is a, c, g, or t
  misc_feature (2301)..(2301): n is a, c, g, or t
  misc_feature (2305)..(2305): n is a, c, g, or t
  misc_feature (2308)..(2308): n is a, c, g, or t
  misc_feature (2328)..(2328): n is a, c, g, or t
  misc_feature (2338)..(2338): n is a, c, g, or t
  misc_feature (2341)..(2341): n is a, c, g, or t
  misc_feature (2344)..(2344): n is a, c, g, or t
  misc_feature (2348)..(2348): n is a, c, g, or t
  misc_feature (2367)..(2367): n is a, c, g, or t
  misc_feature (2375)..(2375): n is a, c, g, or t
  misc_feature (2377)..(2378): n is a, c, g, or t
  misc_feature (2384)..(2384): n is a, c, g, or t
  misc_feature (2390)..(2391): n is a, c, g, or t
  misc_feature (2412)..(2412): n is a, c, g, or t
  misc_feature (2414)..(2414): n is a, c, g, or t
  misc_feature (2417)..(2418): n is a, c, g, or t
  Peptide Sequence Number=SeqID_8241
  Probeset Number=SeqID_11349
nggaccaannnncccnnnnnttntnnccannnnnnttnnnnnnnttnnnanntnnntnnntaattataccnntncacctanntcncgcataccancnacnncncatcntaactcctctcgcannccgacgatcntgactcncacncnncanatcacncncanccacacgctctagtcacanaccncacncnactcgcccacancctctcacgccccgacgctanccgnagcgcagtctattgtgangactgcagnatctctgcggactcatcgctacacgcgacgntgagtatgantcagcgtcgtactgacacactccgccagcagacgcnactgtcnacgatcgacgcagatcacgctgtgtactactctacgtgaaccgagtaccggtagtntggtatagcacaacgagactgagacactagtgtcgctaaattgcctactcgcactctntgtctantctttagccgttctgcgatctgcntgatgtctctgtactgcgctcgcgtctgtgcgctcgtctcatctgcgctctntctactgtactntctnctactcacgtttcgactcgtgctcgcacatcgtcgcggttctcgtgatcgccctcgagcncgtcgtcctgcgtacgctngcgctgtactgcagtgctgtcagcgngncgcagtgtcgtgactngngcgcctcacagtcgtccgctgcagtcacgaggtccgactcctaccgncaatgagttgntnccctgagtganacgtcgntcgtacttacgccngtatgcgcagatactcacgcatcacgngtcgcgagtaacagccgaccggcgactcacgcgatcactangtgtgagtttttacgatncactctcgcgctcatgtattcgtacgcgctacacattctgcgtcgtcgtactgctagcgcactgctgcaggangtagtctctacttttgtgctgtgtactngtcatagtgtagttagnctatntgatatantatgtantcatctatcatcgtatgcgtccancatcgtnntctgcgcgctgcgctctctacgtggatgantctgcattgcttagtcgtgtgtatgatattangtatgtatgantactgcgcgtatacactcgtgctacgatgtcgtatatncagcgcatacantctctacgctcgttcgactgcctcgacatcatgctacatcgtaatacgtcgntaccnactcgacgtgcgatctcgactcagctatactcggttagtcatattctactctnactctatctcancgtcgctgtatatgtgacgctgatatgacgtatatatctatatgtacatnagacagacaactatangctcgcagcatgagtagcgcggagtatataatcgtaacgctgacgtcgctgtggtacagccagtaangtgctctcactgtatgtcgctctgatcgcacgacgctgtcgcgtggcctctctgcgctgactcgntcgatgtaacagcacgcgcacgcgtgccanctactcactgacgcgatctaggcgtctntcggaccggccgcagtagctcatacgtacnctcgtatctngcatccacaagctgncgctatactacatagtcgctgagcgtnctacacttcgctattgactcactgctcgcgtcagagctcgtgacgatgacgagacgatgtagatactatatgactcgcgcaccccacttacagtcgtatactcgtctcgctctgactatcacgtcanctacntcgtctcgtcgatngtagcgtacaaacatatttntttatgctactactcatcgtntacatatgtgactgtctattcccgtcactgcgctctaancggncgaagtgatgtacgataactatcgtgtcctgtacacacagtagatatgcaatctnnantatcngannctactatntaccatcgtncagagtactagagnacggatcgngcagctgaccgtgcgtgacngctgcgatcatacgtacntancgtcgtcctacgnctacatngtaagcatgcgtactgtgtngatatcaactaaattactngtctgatgggtcgatgactgntgtcgtagatttagtagtcngantgcgagtgngacgatcgtcgtagtgtcgtacgcagatgcatcataaacactatcgatctanactgcgctggcacgtgctntgatgcatcgctgctgctgntgnngtngtngcngcgtcggntatctgtcntanngcagacgcgagccgtnatnctttgtcgatgcntgcaantggtcngtnacngantcgctacgnnactgtcgatcntcngggntgngctactgactacctgacgangtcacacganccngtnacgntacgcaactactcactgcntagtctgnannatcatnctagcnngtcgcttgactgacagtcgtntngann

SEQ ID NO: 1571 - DNA, 1771 bp, Glycine max
  misc_feature (272)..(272): n is a, c, g, or t
  misc_feature (332)..(332): n is a, c, g, or t
  misc_feature (334)..(334): n is a, c, g, or t
  misc_feature (755)..(755): n is a, c, g, or t
  misc_feature (823)..(823): n is a, c, g, or t
  misc_feature (1049)..(1049): n is a, c, g, or t
  misc_feature (1138)..(1138): n is a, c, g, or t
  misc_feature (1159)..(1159): n is a, c, g, or t
  misc_feature (1230)..(1230): n is a, c, g, or t
  misc_feature (1548)..(1548): n is a, c, g, or t
  misc_feature (1575)..(1575): n is a, c, g, or t
  misc_feature (1620)..(1620): n is a, c, g, or t
  misc_feature (1628)..(1628): n is a, c, g, or t
  misc_feature (1674)..(1674): n is a, c, g, or t
  Probeset Number=SeqID_11350
gtgtctgggttgtgtgtgccgtccgcgcgcgcgtcgcggcgcgtccgctcccgcccgcggcgctgccccgcggatgggccgtttcgaggacgcccgtgtcgcgcgtgcgtctagcggccggcccccggcgtcggcacgcacacttcctccgcttctctattatgtttcagctatttttcattttgtgagagcagttgggcgatgggtgctctgctgtcgacgctagacgttctctgtatatccgcgacggagaacgcgtaccacaatacacntctgcgaatcacgccacgtcaagtcagctcatcactcaccgctatcggttcccagtgaangncggtgggctggcgtgcgacgggcgcgtactcctcgccgacatatcgcctcgtatccgcgtcctcgggtgtgatagcgtgtaggcgtgctcattgtcgcacggtgaagacttgattgaggcgggcgccgcggcgagacagggagagcgcgcgcggcgcgagcggtggtgcagtcactgcgctcgagcgcatgcacggctgcgacgcgctgcgcgctcgcgtcggcgggtagggacccgacgccattgacatagtctctataccgctcgatattactactaatgtataacaagatgagatgtccaacggactgtttggcgacgagtagtagatatgcgtagtctgagagcgcacctacatctatccgcgcacactctcaaccatcatagattctatcgctagatgtgatagtaacgagcggcncagctgagcgtcaatagcgtgcctcagtgacgacgtcgcactgtgtatgccttccctgcgctgtgctngtatgtcgtcgtatcgaggcacgcgctagtcgaggttccgactcgatctagtgcgtacgtgcgaccctacgtcgcgcgcactccatcatttgccgtcggagaccgcgcgcgacgctactcgcccgcggcgcgagcactaccgcgctgtattgactcgtagaccgcttctgtggcacgagctccgtcacgcgctcccaactgtgcgccgatcgttagcgagcacgtntcatctgttatgagtatttggacgcgctgctgtctatcggtatgacctaccgtactacgcgctcgatcgagcaccatcatcaacacagnagccgcggatctgacgatctntgcatacagcacacagctgtgacgaatgtggagactctcgtcgagcagcgtctcgctgctgtggcgcgtgntacgctagactctcgagtcgcgtcgcgtgcgctgcgctcttatgtcgagcgcgcagtcgtcgtctgcgctgagagcgagtcgagtccacgcgtgcgcgtaggcatcgatgtgtctgctatgcgatgcatgacatctatagccatcgctatctacagtaaatatgtgtacactcgcgatcacgctgcgagtgtgtgctctgacacaggtgtgtgtacgcgtcggtaatacgctgcacaatagctcatcgtctgatatataaccaccacgctgatcacacagacgatacatgacgcatctagatgagatacatacgctangtgcttgatcggatgagcgtgcgctcnggtcataacgcacctgattagcgcgaatagcgtacccacacaganagatggcncatgactcgtctgtctgtgctcagcactcgatgtacgcgacaatgngcagtgtgtattgctgcgagttgtctgcgcgctgccttctcattgccgtcatgctctccatccgtgtacagaccatggctcgtctgtgtacagcttg

SEQ ID NO: 1572 - DNA, 603 bp, Glycine max
  misc_feature (464)..(464): n is a, c, g, or t
  misc_feature (477)..(477): n is a, c, g, or t
  misc_feature (484)..(484): n is a, c, g, or t
  misc_feature (574)..(574): n is a, c, g, or t
  misc_feature (601)..(603): n is a, c, g, or t
  Peptide Sequence Number=SeqID_8312
  Probeset Number=SeqID_11351
cgtggatagtagaaagtggaaagagggggagatcctttggttgggagaaaatatcaattttatacaagatcctctttcctaccttctcttcatttccccctttctggtaatttgttatttacatgaggaagtcttataattcttatgtaggttcggctgataccttacaagcccgactatcttgatgagtctattctatggactgaaagccgtgacttaggagatggccacagagctataaggatggtcgtgatggcactacaatagtcctctgggactggaacaaaggtgataaccagcagtggaagatcttaccttactgatttcaattgacgaaattatcaatggctttgaagatgcatcaagttaagaggatagttggcccttgtatttgagtggtttggtgttgcctagagtatggaatggtgtgtagtgcattagcttgtaccaggcgtcggcttttntcattagattaanttgcgtntgtgtcagtgttatcgctgcatgtgacactgttaatgtgcccgtggccgtagttatattgatattccgttgatgttgtgcgtatgtctantatgattcaatgtggaccaggggcgannn

SEQ ID NO: 1573 - DNA, 338 bp, Glycine max
  Peptide Sequence Number=SeqID_8313
  Probeset Number=SeqID_11352
gtgggagactttctcgccattcaaaagttattttagtttattcaggggtataagccactcgcaactatccatggctcctgtaagtaaatatgcggccactaatgctggttatagatcataggttaaatgcccttattccagcatcgtcggttcttgaagagaaattaaattctggagatgatccttgcaccgcttttgttctctcctctgaagctgcattggctggagctcagtcaacggtagacatgcaagcacaggtgacaacttattaatgattttaagtgagagaaattttgtggtgtagatgcttccttataatttagagtttaaacttaatc

SEQ ID NO: 1574 - DNA, 711 bp, Glycine max
  misc_feature (537)..(537): n is a, c, g, or t
  misc_feature (546)..(546): n is a, c, g, or t
  misc_feature (549)..(549): n is a, c, g, or t
  misc_feature (553)..(553): n is a, c, g, or t
  misc_feature (556)..(556): n is a, c, g, or t
  misc_feature (560)..(561): n is a, c, g, or t
  misc_feature (576)..(576): n is a, c, g, or t
  misc_feature (578)..(579): n is a, c, g, or t
  misc_feature (590)..(590): n is a, c, g, or t
  misc_feature (592)..(593): n is a, c, g, or t
  misc_feature (630)..(630): n is a, c, g, or t
  misc_feature (633)..(634): n is a, c, g, or t
  misc_feature (638)..(638): n is a, c, g, or t
  misc_feature (657)..(658): n is a, c, g, or t
  misc_feature (662)..(662): n is a, c, g, or t
  misc_feature (669)..(669): n is a, c, g, or t
  misc_feature (672)..(672): n is a, c, g, or t
  misc_feature (690)..(690): n is a, c, g, or t
  misc_feature (702)..(702): n is a, c, g, or t
  misc_feature (707)..(711): n is a, c, g, or t
  Peptide Sequence Number=SeqID_8314
  Probeset Number=SeqID_11353
acaagacctactactacacacaggcagcgctgccttgataagacaatttaataagatgacttaatacttaatgggagactaagctcctctaagtttttgctccaaggactaaggactaaggactaatacctagcagcttttcacaagaaggatctattaagcaggctaacttaaagataatgactagatcaagagcctatacaagcagttaaaagcccttaataatgataagaaatggaagagctcgagtttttggtcgccaagacacctaataattaacaagagattgacagcatcaagctcggcctccccggctttgctcaatcggctcggagcttccttccaagttaataataataagacgggcaaataagactaattgttgttggctagaagtcagattaagtgagagtttagtgtttactaagatgtagatggctatattaatatagttagtctgtatataagatagttatatactagcaatatataaccgtccatatactgcataatgactatattatattgaattgaacngatgagacnggngacnggngatnngggacccccggaccnanncctcggacccngnnccagatgggtcagactcagaccgacccagggcaaganagnntcgntcttttccgatctaattgnnacancctacgnctnaattgtcatgtgcctgtncccgttcgttanacgtnnnnn

SEQ ID NO: 1575 - DNA, 489 bp, Glycine max
  Probeset Number=SeqID_11354
aacttcgccgatgtttcacatgcccagacaacatgaagggaaggttcatgtttctgtcggggctcctttgtgccacttttcatgtctccttctctattatcgacgggttagttgccaacgggagctttgagttgggtccaaagccctgcggcctaaaaggaacagtggtggtgggcggtatccactcgatcccagaatgggagatctgcggctttgtggagggcatgaaatgcgcccaaaagcaaggggacatgttgctcgtcgtgccagagggtgcctacgcggtgcgcctagggaacgaggcctgcatgaagcagagaatcaaggcgatcaagggcatgtactactggatcaccttgatgggggctcgcgcgggtggccaagaggagaggctgaacattgccgggactgctggattgggggggatggctattgggactttgggcacgaggagggggggggggatgccattgcgctcgtgctgtaagg

SEQ ID NO: 1576 - DNA, 888 bp, Glycine max
  Peptide Sequence Number=SeqID_8315
  Probeset Number=SeqID_11355
gtaaaatggaggaaactcaggaattgacaaggacaacatctacgaggacccaaaccaaacaatccagctaatgtgtttctaccgttacaattctaatagtcccaatctttcatcggagtaaactacggccaggtcgccgacaaccttccggcgccggaggacacggccagcctcctcaaatccaccaccatcggaaaagtccgtctctacggcgccgatcccgccatcatcaaggccctcgccaactccggcatcggaatcgtcatcggcgcctccaacggcgacattgcgagtctcgccggcgatcccaacgcggccacccagtgggttaacgcgaacgtcttgccctactacccggcgagcaacatcactctgatcaccgtcggaaacgagattttgaccttagccgaccagggtcttaagtcgcagctcgtcccggcgatgcgaaatgtccaaaatgccctcggcgcggcctcgctcggtggcaagatcagggtctcgacggggcactcgatggccgtgtttattttttcggacccgccgtcgaccgggctgttcaacccggttctgcaagacactctgaaacagctggtggcgcttctgaaagacaacaaatcgacgctcactatgaacccgtacccgttcttcacttaccagaacgacccaaaatccgagacgctggggttttgcctcttccaggccaactcgaggcggatcaactcaagccacgagaagcttgtcccaaacatgttcaatgctcaggactatgcggtacattctgctttgaacgccaagacgttcgcggaccctgagattgtggctgattacactggccaccccctccgtgccgcccacaacgctcttgaaccaggttatgctaatggcaga

SEQ ID NO: 1577 - DNA, 319 bp, Glycine max
  Peptide Sequence Number=SeqID_8316
  Probeset Number=SeqID_11356
agctgcagaggagttgttgactattctacaagcaacaatatttagaggttgttcaaaaggtttatgatatgagggggccacaggttccagtattaacaaatttgtcaaatataaatgcttaggaaaaagcaaaagaaaatgatgtcccaatgccaaaaattgaacataatgtaacgttaatagtttggttgcctgaggctgacatccaatagattgattcatattagatgagcgagataaatactaaacttagctttaaccaaccaaacaaacaaaaaacgaactgttcctggtttccaaaaataaaagctaaagtttc

SEQ ID NO: 1578 - DNA, 1444 bp, Glycine max
  misc_feature (45)..(47): n is a, c, g, or t
  misc_feature (49)..(50): n is a, c, g, or t
  misc_feature (52)..(52): n is a, c, g, or t
  misc_feature (54)..(56): n is a, c, g, or t
  misc_feature (59)..(61): n is a, c, g, or t
  misc_feature (63)..(66): n is a, c, g, or t
  misc_feature (68)..(68): n is a, c, g, or t
  misc_feature (70)..(74): n is a, c, g, or t
  misc_feature (76)..(77): n is a, c, g, or t
  misc_feature (79)..(118): n is a, c, g, or t
  misc_feature (137)..(137): n is a, c, g, or t
  misc_feature (213)..(213): n is a, c, g, or t
  misc_feature (219)..(219): n is a, c, g, or t
  misc_feature (290)..(290): n is a, c, g, or t
  misc_feature (292)..(292): n is a, c, g, or t
  misc_feature (315)..(315): n is a, c, g, or t
  misc_feature (347)..(347): n is a, c, g, or t
  misc_feature (350)..(350): n is a, c, g, or t
  misc_feature (400)..(400): n is a, c, g, or t
  misc_feature (421)..(421): n is a, c, g, or t
  misc_feature (443)..(443): n is a, c, g, or t
  misc_feature (450)..(450): n is a, c, g, or t
  misc_feature (753)..(753): n is a, c, g, or t
  misc_feature (1035)..(1035): n is a, c, g, or t
  misc_feature (1297)..(1297): n is a, c, g, or t
  misc_feature (1346)..(1346): n is a, c, g, or t
  misc_feature (1348)..(1352): n is a, c, g, or t
  misc_feature (1410)..(1411): n is a, c, g, or t
  misc_feature (1415)..(1415): n is a, c, g, or t
  misc_feature (1417)..(1417): n is a, c, g, or t
  misc_feature (1419)..(1420): n is a, c, g, or t
  misc_feature (1422)..(1422): n is a, c, g, or t
  Peptide Sequence Number=SeqID_8317
  Probeset Number=SeqID_11357
tactatgctaataagacaagagagcatacactgacatacacaccnnnanncnannnccnnncnnnncncnnnnncnnannnnnnnnnnnnnnnnnnnnnnnnnnnnnnnnnnnnnnnntgagcagtccgtgatcatncgcgtataggtgtacagtgctgggcatacgacagcgaacagggagccgaggtagcgtcagtcatcgtactatactngtcggncggctcttctctcttcttcgcaattatatctataggcaaatactaccacagacaatacactcaccgtacananatatcacagccagcacatactantatctagctctcactgcacctcgatcactacncantttctccgtccactcacatcacactgtcatagtacgcaatctctgtcacncaacacggagtgaggcgctgngcgcgatggcgcgtctctatgnagatganaagtgatgctcgcgcagctccacaaccacagttaggtgtaatgactccatcactattcatcgcacatagctactccaatttgcgttcgagctccttactcccagctctcatacatcgactaactctatcacgtacccgtattgctcttatcctccccttgctctattatctacacacaccttacctccaacaagaatagcatacagtgactacgtacacacattagtaacactcaagattgttagtagtacataccgtgactgattgttaaagtatattgctagaggtgattacaagcgatgngtatatatagactgtgggatatttcaggataggactacccctcaccctgacgacctgatagaaatcacgatagacaaagtgcgagagctcagtactactagtatagaatcctaagtcatacgcttcgtcaggccccggtcaaggattgcaagaacgcaagtggtctcactgtcacacacacttctcagtcttctcgctgtatacggagagaacaacaatacctccccgaaccgtctcgactctcatacagctgcgagataatgcgttacataaatctatatnaacacaatagtcgggagggacatcagcaaatacgaacagggtcagccgggtggagacagcgccgcacacagagaggggacgagttataataggcgtattttatgtagccgtactacacagctggaaagagcgcgcgggagtgctctgcgtggtgtatcatagctatctctctcacgtgtatggagagcagagagggggagaagaggcgtttatacaagagagcaaggctgtcgcacaccccacccgacagaaacggagcgancccgggggagcgcacagcgtcacctcacgaccattattctcgcagtgtngnnnnnggtagacatgttggtgtgcgtcgctgagctcgtcacagtaattcatcaatacctaacnntctnanannanattaacagctgatgtaacaact

SEQ ID NO: 1579 - DNA, 739 bp, Glycine max
  misc_feature (1)..(138): n is a, c, g, or t
  misc_feature (739)..(739): n is a, c, g, or t
  Probeset Number=SeqID_11358
nnnnnnnnnnnnnnnnnnnnnnnnnnnnnnnnnnnnnnnnnnnnnnnnnnnnnnnnnnnnnnnnnnnnnnnnnnnnnnnnnnnnnnnnnnnnnnnnnnnnnnnnnnnnnnnnnnnnnnnnnnnnnnnnnnnnnnnnnngcagatcccaaccaccatggatggttacgacgccaccgtcaggctcggcgccatcaacctcaagcacggtcgcgccgcctattttgactccgcctcccccgacgtatccttctcctctccggtcacgcgccagaaagccgccgtcgtcaatcaattcatcgagaatcactacaaaaactatcttcaacgattgcaggatctcaaagacagacgcatagcgctttatataaaaatgcatgactctcatatatcggctgaggagcaggaggaaatgatgaggaacttgtagcgccgagaaactgcgtacatgaggcgtcgagagacgtaaaattggaatggatgacttcgacccttatacggagaaagaacaaggtcctttcaaggagaataggagagtggattctcgccatcatggcagagatttttgccatgaagaaattgaaaaagtcagagatgcttagtcgtggacaggtggaacatgttcgatctgagaggaacttgctggcagaggttgatagcagatgcatagtcaaactccattattcattccaagattcagatttcctatatctcatcatggaatatttacctggtggtgacn

SEQ ID NO: 1580 - DNA, 341 bp, Glycine max
  Peptide Sequence Number=SeqID_8318
  Probeset Number=SeqID_11359
gtttcgagagtcaatacaagatggaagtgttttaatggattgtttaattcttcctgataaagctgatattcctgatgggttggataaatccactgcttctgttgtgcgcgtgagctccgtagtgatgagaaagctttcagggctgcaaacaactgaatccctaggagcacccgccctgaagataaatcctgacagttactccattgcggtgctcctcctagggacagccctcatcctggcttttcctttgacaaagggctttatcaagacgaagctgaatgctagaggcaccttgtctgccattgctccaagtgaaaggaacaccaacagtggggaggttg

SEQ ID NO: 1581 - DNA, 1717 bp, Glycine max
  misc_feature (1)..(1): n is a, c, g, or t
  misc_feature (15)..(15): n is a, c, g, or t
  misc_feature (37)..(37): n is a, c, g, or t
  misc_feature (99)..(99): n is a, c, g, or t
  misc_feature (102)..(102): n is a, c, g, or t
  misc_feature (181)..(181): n is a, c, g, or t
  misc_feature (201)..(201): n is a, c, g, or t
  misc_feature (363)..(363): n is a, c, g, or t
  misc_feature (365)..(365): n is a, c, g, or t
  misc_feature (383)..(383): n is a, c, g, or t
  misc_feature (397)..(397): n is a, c, g, or t
  misc_feature (413)..(413): n is a, c, g, or t
  misc_feature (448)..(448): n is a, c, g, or t
  misc_feature (478)..(478): n is a, c, g, or t
  misc_feature (528)..(528): n is a, c, g, or t
  misc_feature (583)..(583): n is a, c, g, or t
  misc_feature (617)..(617): n is a, c, g, or t
  misc_feature (694)..(694): n is a, c, g, or t
  misc_feature (702)..(702): n is a, c, g, or t
  misc_feature (713)..(713): n is a, c, g, or t
  misc_feature (818)..(818): n is a, c, g, or t
  misc_feature (1071)..(1071): n is a, c, g, or t
  misc_feature (1122)..(1122): n is a, c, g, or t
  misc_feature (1243)..(1243): n is a, c, g, or t
  misc_feature (1313)..(1313): n is a, c, g, or t
  misc_feature (1345)..(1345): n is a, c, g, or t
  misc_feature (1365)..(1365): n is a, c, g, or t
  misc_feature (1446)..(1446): n is a, c, g, or t
  misc_feature (1471)..(1471): n is a, c, g, or t
  misc_feature (1476)..(1477): n is a, c, g, or t
  misc_feature (1491)..(1491): n is a, c, g, or t
  misc_feature (1497)..(1497): n is a, c, g, or t
  misc_feature (1502)..(1502): n is a, c, g, or t
  misc_feature (1512)..(1512): n is a, c, g, or t
  misc_feature (1522)..(1525): n is a, c, g, or t
  misc_feature (1529)..(1529): n is a, c, g, or t
  misc_feature (1544)..(1544): n is a, c, g, or t
  misc_feature (1559)..(1559): n is a, c, g, or t
  misc_feature (1610)..(1610): n is a, c, g, or t
  misc_feature (1624)..(1624): n is a, c, g, or t
  misc_feature (1626)..(1626): n is a, c, g, or t
  misc_feature (1632)..(1632): n is a, c, g, or t
  misc_feature (1646)..(1646): n is a, c, g, or t
  misc_feature (1656)..(1656): n is a, c, g, or t
  misc_feature (1661)..(1661): n is a, c, g, or t
  misc_feature (1671)..(1671): n is a, c, g, or t
  misc_feature (1678)..(1678): n is a, c, g, or t
  misc_feature (1694)..(1694): n is a, c, g, or t
  misc_feature (1704)..(1704): n is a, c, g, or t
  misc_feature (1717)..(1717): n is a, c, g, or t
  Peptide Sequence Number=SeqID_8319
  Probeset Number=SeqID_11360
ncggcgtgctgtatncatcgcgatgattctgacgtgntagtgttactcgcgtgatcgagaggagtgaacgtacatagtatatagtttgatgtcatactnganaccattgcaacgacgacaccacatatagtcgagtctactgctgtgctcagtcatatgtgcgctcgagcatcgctacatnaaccgcatccagtctcagcntgctcgctgctatcatagagagtggcgagaccgccaccacacattatagcatagacgagttagtcaggagttatatcatagtagtatcagcactagtatagactaacacccgccttcatacatactccagtattatagcagcgtgttacgtaagtacatcanantacacatagagaatggcnatgcgagtggaatnatgcggtgcgttatancaactcagcactcgctgtatttcgtggtatgagancctctattaatcgacagaattactcatccntaagttctacattatttagtctatatggcgtgcaggtcgcgcatctattncacgaataatcgcatcgtcgctacatccctcacgtcactaaatctctcatactancatagctccagtgatgaagataataattggtgtngaatagagtctgatcgagacgatcagctcagtgtgtcgacagtaaaatgctttcgacatagtcaccatgttgcgtgntcggacgntgcacatcgtnttgatcgtctgtcgcgtttcgcattagtagagatgtgtagacgaacaatctctatgtccactacgtcatacatatacatttcagtagtgcgcatgtcgctcggtngctgcacacgaaacgatcataccataaatcacgcgatattcatgacatataacatacgacgcagcccgctcgcaatcatatccgcacataaacgtatgccgttactatagtatacaataacgtaggtctcgacatgctcacgtagctgcatgctgatccgttagctgacagatagcgcacaattagtataagtatagtatttagctatacacgttatatcttaccacatgcgcatatccacaacgctacggcntgcgtatatcaattacattgttcttcttaatacgtatctacttactatacntctatccataagtcatcgattggtcgtgtgtgtggtgcgcgtcagcgactgatcagatacctcatcacttcgtctcctgttatcgatcctactctctcgttcgtctatgtcttcgcctcgntagtgttttgtggggtgtcgtgtaatacatgcatgtgtatatggtaagtattgtgagaggtattagtatntgtagagaatgagtgtgtggtctatctatgtnttattatatatatatgacantaataatgataatatgagtatgaagcgtgcgtatgcagagatatgtgacgtcatcatcgataatactgtagtagaataatncacgtgtatcagatacaacttattntatannaatataataacacncgctanacacnacatatcacntcctccgtgnnnngcgnggttgcgctctcctncacctttatattctntgctctctgccactcgctctgcagcactcaacacaatccctctgaagacanactcccgtccaatngngggatngagtctgacgcatntctctcgctncaccncttatctctntccgtcnaacactaccaacacancaacacacanacaacaacaaacn

SEQ ID NO: 1582 - DNA, 316 bp, Glycine max
  Probeset Number=SeqID_11361
tctactctcgaagaagatcgtgaagaagagggtgaagaagttcaagaggcctcggagtgacaggaaaatttctgtcaagacaaactggcgcagaccaaagggtatcgattcccgtgttaggagaaagttcaggggatgcactttggtgccacacattggttatggttgatacaggaagacccgccactatctccgtaatggttttaggaaatttggtgttcacagtgagaaggacttggaactgctcatgatgcacgacaggacttactgggctgagatgggccagattatatgctcgagaagtaggagagatatg

SEQ ID NO: 1583 - DNA, 1769 bp, Glycine max
  misc_feature (76)..(76): n is a, c, g, or t
  misc_feature (215)..(215): n is a, c, g, or t
  misc_feature (511)..(511): n is a, c, g, or t
  misc_feature (544)..(544): n is a, c, g, or t
  misc_feature (841)..(841): n is a, c, g, or t
  misc_feature (1171)..(1171): n is a, c, g, or t
  misc_feature (1255)..(1255): n is a, c, g, or t
  misc_feature (1269)..(1269): n is a, c, g, or t
  misc_feature (1352)..(1352): n is a, c, g, or t
  misc_feature (1437)..(1437): n is a, c, g, or t
  misc_feature (1474)..(1474): n is a, c, g, or t
  misc_feature (1523)..(1523): n is a, c, g, or t
  misc_feature (1628)..(1628): n is a, c, g, or t
  misc_feature (1650)..(1650): n is a, c, g, or t
  misc_feature (1706)..(1706): n is a, c, g, or t
  misc_feature (1767)..(1767): n is a, c, g, or t
  misc_feature (1769)..(1769): n is a, c, g, or t
  Peptide Sequence Number=SeqID_8390
  Probeset Number=SeqID_11362
ttatactccccccctattgtctatatgctatcacacctctcaccctttaccgctttcgtgtttcgacacatacacnattattgtgcttgtatttaacagtttgactataacacccaaatcgccacgcccacatcttctcctcctcccccccttttacaattacaaacatactctatactaatactctctaccttccacttcatataagtcgggcnggggcgttagaggccccctgtaacagaataagtggcggcgggcggacataaatcgcaccgcaactgtctgcgaccagctctaataataattgtccgccaccaccaccctcgcccaaccacattccaaccactctcaacacgcactacccgagtatagatatcgcccccagctcgccatgacaccatgacgcagccctgatcttacgtatactggacagtattctaaatatagaacgttacagtcgcggcgatgcgtgtcgagctatctttacttatctgcgcgcagtttatgcatntttttataatatgatatatctgctgtagcgcgnccgcgcggtctctaatatttattacattatatgggcgtacggacgcactttgggattaatgtttcgataggccggcgagaggcgtagctcaattatcggagtgacggagaacaatgtaatgggacggaggattaaagcgacgcgagcacatcgtcacgacgcgagattactggagccgtctgaacgacaggaagcatctgcgacatgtgctcgatccctcacctttctccttttattattttataattcccttctccgcgcgagcgcagagtagatgaatgtctctatgtatgctgntctgacacctactctacgctagtattcacgtccgcgaccgtgctttatatatacgatcgccgtcgatttctcgctcccgaattctgctcgtgatgcgcatgcacctgatatccgtcgtgagctcccgtcgctacaccatattatccgcgatcaccagtttatctttctattgagatgagttatatgcgcgtcatgacgtggccccctcctacccgcatacgcgatgaataacaaagataaaaatacatatcaactctctatcacatgaatctatagacgctgctccctcgatatatcgacacatatatatacacatctcatgagatacancgcgcgtgtagtacgatctcttgcgtcaactactatgataatgacgcgcgcagctgtgtctttcgtcgccagactaccgccctntatagtctacactntacgagctgatgaatacgcgtgtctgacgcgtggtatctaacctcaccataactagcgacggtgcgtgcgcgctcaactcatntgaatatgtacaacaatatattctgtcgtcccaatcacttctccccacatatgaccgcccgcacgccacgcatacatatagccgngcctgccagattagtaacgcataccactcacagagtnagaatgatggtgtgccgcgcactgcgccgcacatatgtcgcgtatatgnacacgccgaacctcgagaaatgaaatcgtgatacaagaaacttggatacgggacgaatgtagtctgaccagacggcggtcgctgcgacgggtcggagatacatanagtagtgcgtatgcacatctanttcgctctgatcttcgcgacagtgctgcaatatcacgctgcatgactcgcccaganagcgatgatgttacgtatagaatcgatcactcatctagtcgcacgacatatagccgcacanan

SEQ ID NO: 1584 - DNA, 578 bp, Glycine max
  Probeset Number=SeqID_11363
gatgagaatgaggattatggagttcctcctccaagatcagatcaaaaacaggacaggcttgaagactccatcagaagatcaggtgttcaacaaagccaaaaacttgagagacagaatattcccgaacctgcttactatcatgaaaaggacaatgaagagtatggagttcctcctccaagatctgaaatgaaacaagataagcttgaaggttcaatcagaagctctaaagtgcaaggacagaacatacctgaacctgcttattatcatcaagatgaaagtgaggattatggagtccctccaccaaaatctgagaagaagcaagatagacttgatgcctctttgagaggttcgaaagtgcaagcacagaatatacctgaacctgcttattatcaccaagatgaaaatgaggattacggagtccctcctccaagatcaggacaaaatcaacagcaagaccaacttagggcttctttaagaagctcaaagatgcaagggcagaatgttcctgagcctgcttactactatcaagacgaaaatgaagaatatgatgtgcctccttcaagatcagaacaaaagca

SEQ ID NO: 1585 - DNA, 445 bp, Glycine max
  misc_feature (97)..(98): n is a, c, g, or t
  misc_feature (417)..(417): n is a, c, g, or t
  misc_feature (427)..(427): n is a, c, g, or t
  misc_feature (436)..(436): n is a, c, g, or t
  misc_feature (441)..(441): n is a, c, g, or t
  Peptide Sequence Number=SeqID_8391
  Probeset Number=SeqID_11364
atcaagtatgaaaagaaggccttggaggttgttggcaaaaggctcaaaaagaacagtgtctctcttgacgtcgtcaattttggagatgatgacgatnnggataagcctctcaaactggaggccctcctttcttctgtcaataacaacgatggtagccacattgttcatgttccttctggtcccaacgccctctctgatgtccttctcagcacacctgtattcactggtgatgagggtgcaagtgggtatgtttctgccgcagctgctgctgctgctgccggtggtgactttgactttggtgttgatccaaatatcgatccagagcttgctctcgcccttcgggtctccatggaagaggagagagcaaggcaagaggctgctgctaagaaggcagctgatgaggcaggtcagaaagancaagatgggncttcagctnctgcntcgc

SEQ ID NO: 1586 - DNA, 485 bp, Glycine max
  misc_feature (247)..(247): n is a, c, g, or t
  misc_feature (249)..(249): n is a, c, g, or t
  misc_feature (371)..(371): n is a, c, g, or t
  misc_feature (414)..(414): n is a, c, g, or t
  misc_feature (438)..(438): n is a, c, g, or t
  misc_feature (476)..(476): n is a, c, g, or t
  Peptide Sequence Number=SeqID_8392
  Probeset Number=SeqID_11365
ttttttttttttttttttcttattttattattattcgtttagaactttacgctatatacataagacagttagaaacttcgataaactcatacgccgaatatttgaaaataatacgagaatactcataacttgttatttatattccttcacgcttgctcttttatttacaagtgcttgtgagcgtgcttttcagtaccgctgatcataccgtgcttgttgaaagcggtcatataggccttgtcgccananagtcttctggcttcgtgccatctccatctttcttcttcgctgaggttgagtctctccttttcggtcatagccaaatatctggttctttcttcttcagtgagggtgacttggctgtatctggngctgagttctctgaactcaccgatataggtggcggggccgacnctagtggtgatttcttcgttgacnatgacttcgggtctgatttccttagtgatggtttcagnggtgatgac

SEQ ID NO: 1587 - DNA, 1467 bp, Glycine max
  misc_feature (88)..(88): n is a, c, g, or t
  misc_feature (423)..(423): n is a, c, g, or t
  misc_feature (764)..(764): n is a, c, g, or t
  misc_feature (905)..(905): n is a, c, g, or t
  misc_feature (939)..(939): n is a, c, g, or t
  misc_feature (980)..(980): n is a, c, g, or t
  misc_feature (1002)..(1004): n is a, c, g, or t
  misc_feature (1043)..(1043): n is a, c, g, or t
  misc_feature (1103)..(1103): n is a, c, g, or t
  misc_feature (1115)..(1115): n is a, c, g, or t
  misc_feature (1119)..(1119): n is a, c, g, or t
  misc_feature (1207)..(1208): n is a, c, g, or t
  misc_feature (1270)..(1270): n is a, c, g, or t
  misc_feature (1272)..(1272): n is a, c, g, or t
  misc_feature (1277)..(1277): n is a, c, g, or t
  misc_feature (1279)..(1280): n is a, c, g, or t
  misc_feature (1290)..(1290): n is a, c, g, or t
  misc_feature (1354)..(1355): n is a, c, g, or t
  misc_feature (1366)..(1366): n is a, c, g, or t
  misc_feature (1384)..(1384): n is a, c, g, or t
  misc_feature (1416)..(1416): n is a, c, g, or t
  misc_feature (1427)..(1427): n is a, c, g, or t
  misc_feature (1454)..(1454): n is a, c, g, or t
  Probeset Number=SeqID_11366
ctgtggtagacaatgatctccaccgttcgccgtcttctctcgccccaacgctccattcaccacaaccgtgattacaaccgacctacanaggcgacaaagtgaggcgaaatcgtgcgcggccgcgcactcacttcgaaaatcataattcgtaacccatatatcacgccgccgccgcccaccactacacgcggcgagggaggaccgtggccggtacggaatgctgatccggctcgttatctcttgacgcagccccgctcttacacgtgacacgaccacaatagtagataatgatacgtgtgttcgcatcgtgtatagtatcacacgtgtgtcacaattaattagagagatgctgatcgtccgcccgcgatattatctgcattgcagtcgttgatccgagtacgcccctcgcggcacgctgcggtnctgtagtgactcatctgcagcattcacgcctgcactatgcataccttgctcatatgtacctcacgccccgcaacgccccccccccctctttctctttatgttagtttacgacaagaggcattgatctgcacctgtagtgatatcgccactcacctaaccggcggcatacaggacagtatacttatatattctacagtgcgaacggcgcgcccgaccgaccgcactctcacacatagcgttacgggcctgtatacctagaaggggagccgccctatcttatatcgcacccgtgagattactcttttcatccactactttagcacggcgcggcaccacccgcnccatattacacatggacgctagcgccgcgtctatgatggtgtgtgtgcgtttggttcgatatagtgtcttgcgcgcaccctccgccgcgcgtttataaataatttgcgtacgctcgctcgcactttgtttcactgcccccncgtctacgcgggataatatgggggataggaaccncaccgctcggcgcgcgaagcacccacccgatgttcacaccnaacactctcaattgagtgcgtnnnatcttccgacactgctcaatccgcgcgccacggacggcngagcaacgggcggtatcaattctacttattaggtgggacgttgtcgcgcgagtcacgacnctactcgaaagntgantaagcacacataaaggccggagacaaaccatcgctgcagggagaagtctagtcgccaagatctgtagattcgttatgcttaaagatanntgtttgacttctgtacttcttgacatccgcgagtgagatgctacccacacattaaacaccancnccgcncnnttacagcggnggtgaatgtgtacattcattcacaacaacacacgcacacgcgccgccgcgatgctcgtgtatannatgactcacanacgagcacgctcgcctangtcccagtagcgacacgcgccggcccgctccnccacacgtcangtatcaatccaagcgccacgtaatgancgatctcacaggg

SEQ ID NO: 1588 - DNA, 554 bp, Glycine max
  misc_feature (111)..(111): n is a, c, g, or t
  Peptide Sequence Number=SeqID_8393
  Probeset Number=SeqID_11367
cgggtcttcgcccccggcgacctgaagctgttgctgctggcgttgattgccgaacagccgtgccacggctacgacctgatccgccagatcgaaggcatgttcgacggtgcntacagcccgagccccggcgtgatctacccgaccctgaccttcctcgaagaaagcgaaatgatcctcggcgacgcggctgccgggaaaaagagctacagcgtgaccgacgccggacgtcagtccctgatcgaacaggccgtggccctcgatggcgtacgcatgcgcatcgatgtcagcaagcgttcgctgcgcggccatgaacggccgctggaaatccacgaggcggtgcacaacctgcgccacgccctgcaactgcacaacggtcgctggagcccggaagaaatccttcgggttcgcgacctgctgaacaacaccgccaaggccatcgtcgatgggccagcatccgctccatcctgctcggagaaaccggaatgaatgcagtcaatcaacaagggattcaccgtgtcatgcacgagatcaaacgacgccgcctggaagtgttg

SEQ ID NO: 1589 - DNA, 551 bp, Glycine max
  Peptide Sequence Number=SeqID_8394
  Probeset Number=SeqID_11368
ctctcattgttgccacagaggaggcaccatgcacaacgcatctctctctgtccatttgctttgtcttgactctctcctcccttctttacttcacatccttcatattccttcttcaccagtctccaaaccctgcaacaagatgaacataggtcaacagcgaaaataaatgggtctataccacggcctaggagaaacttgacgctacctctgggtgtggcatatggcaacacccattgatgactcgccggagtgtgccaccccaactggcagcagaacaggcccaggctaactgactgcgcaatagggcatccgcaagaacgccatcggtggaagggacagcctgatctacgtggcggaccacaaccgcgatgaccatgccgtaaacccgaacccgggaagccttcggcacgccgagatccaagacgagcccttatggataatcttagacagatacatggcgatccagctgaaggaggagcttctcatgaactccttcaagaccatctacggatgacgcgccaccgtccacgttgctgccggtccatgcataa

SEQ ID NO: 1590 - DNA, 760 bp, Glycine max
  misc_feature (32)..(32): n is a, c, g, or t
  misc_feature (305)..(305): n is a, c, g, or t
  misc_feature (307)..(307): n is a, c, g, or t
  misc_feature (311)..(311): n is a, c, g, or t
  misc_feature (315)..(315): n is a, c, g, or t
  misc_feature (321)..(321): n is a, c, g, or t
  misc_feature (332)..(332): n is a, c, g, or t
  misc_feature (338)..(338): n is a, c, g, or t
  misc_feature (358)..(359): n is a, c, g, or t
  misc_feature (361)..(361): n is a, c, g, or t
  misc_feature (370)..(370): n is a, c, g, or t
  misc_feature (380)..(380): n is a, c, g, or t
  misc_feature (384)..(384): n is a, c, g, or t
  misc_feature (396)..(396): n is a, c, g, or t
  misc_feature (401)..(401): n is a, c, g, or t
  misc_feature (410)..(411): n is a, c, g, or t
  misc_feature (426)..(427): n is a, c, g, or t
  misc_feature (432)..(433): n is a, c, g, or t
  misc_feature (435)..(435): n is a, c, g, or t
  misc_feature (440)..(440): n is a, c, g, or t
  misc_feature (442)..(442): n is a, c, g, or t
  misc_feature (444)..(444): n is a, c, g, or t
  misc_feature (452)..(454): n is a, c, g, or t
  misc_feature (458)..(458): n is a, c, g, or t
  misc_feature (465)..(465): n is a, c, g, or t
  misc_feature (469)..(470): n is a, c, g, or t
  misc_feature (474)..(474): n is a, c, g, or t
  misc_feature (477)..(477): n is a, c, g, or t
  misc_feature (483)..(483): n is a, c, g, or t
  misc_feature (493)..(493): n is a, c, g, or t
  misc_feature (495)..(496): n is a, c, g, or t
  misc_feature (498)..(498): n is a, c, g, or t
  misc_feature (501)..(501): n is a, c, g, or t
  misc_feature (503)..(503): n is a, c, g, or t
  misc_feature (506)..(506): n is a, c, g, or t
  misc_feature (513)..(513): n is a, c, g, or t
  misc_feature (516)..(516): n is a, c, g, or t
  misc_feature (519)..(519): n is a, c, g, or t
  misc_feature (530)..(531): n is a, c, g, or t
  misc_feature (546)..(546): n is a, c, g, or t
  misc_feature (549)..(549): n is a, c, g, or t
  misc_feature (563)..(563): n is a, c, g, or t
  misc_feature (566)..(566): n is a, c, g, or t
  misc_feature (573)..(574): n is a, c, g, or t
  misc_feature (577)..(578): n is a, c, g, or t
  misc_feature (582)..(583): n is a, c, g, or t
  misc_feature (585)..(585): n is a, c, g, or t
  misc_feature (588)..(588): n is a, c, g, or t
  misc_feature (590)..(592): n is a, c, g, or t
  misc_feature (596)..(597): n is a, c, g, or t
  misc_feature (606)..(606): n is a, c, g, or t
  misc_feature (608)..(609): n is a, c, g, or t
  misc_feature (617)..(617): n is a, c, g, or t
  misc_feature (619)..(620): n is a, c, g, or t
  misc_feature (624)..(626): n is a, c, g, or t
  misc_feature (630)..(630): n is a, c, g, or t
  misc_feature (632)..(632): n is a, c, g, or t
  misc_feature (635)..(637): n is a, c, g, or t
  misc_feature (639)..(639): n is a, c, g, or t
  misc_feature (643)..(645): n is a, c, g, or t
  misc_feature (647)..(647): n is a, c, g, or t
  misc_feature (652)..(652): n is a, c, g, or t
  misc_feature (656)..(656): n is a, c, g, or t
  misc_feature (665)..(665): n is a, c, g, or t
  misc_feature (667)..(667): n is a, c, g, or t
  misc_feature (671)..(671): n is a, c, g, or t
  misc_feature (675)..(675): n is a, c, g, or t
  misc_feature (679)..(679): n is a, c, g, or t
  misc_feature (681)..(681): n is a, c, g, or t
  misc_feature (688)..(688): n is a, c, g, or t
  misc_feature (691)..(691): n is a, c, g, or t
  misc_feature (693)..(693): n is a, c, g, or t
  misc_feature (696)..(696): n is a, c, g, or t
  misc_feature (699)..(699): n is a, c, g, or t
  misc_feature (703)..(703): n is a, c, g, or t
  misc_feature (705)..(706): n is a, c, g, or t
  misc_feature (708)..(708): n is a, c, g, or t
  misc_feature (713)..(713): n is a, c, g, or t
  misc_feature (715)..(715): n is a, c, g, or t
  misc_feature (717)..(717): n is a, c, g, or t
  misc_feature (719)..(719): n is a, c, g, or t
  misc_feature (721)..(721): n is a, c, g, or t
  misc_feature (723)..(723): n is a, c, g, or t
  misc_feature (725)..(725): n is a, c, g, or t
  misc_feature (730)..(730): n is a, c, g, or t
  misc_feature (732)..(732): n is a, c, g, or t
  misc_feature (734)..(735): n is a, c, g, or t
  misc_feature (739)..(739): n is a, c, g, or t
  misc_feature (743)..(748): n is a, c, g, or t
  misc_feature (750)..(750): n is a, c, g, or t
  misc_feature (752)..(752): n is a, c, g, or t
  misc_feature (754)..(754): n is a, c, g, or t
  misc_feature (757)..(757): n is a, c, g, or t
  Peptide Sequence Number=SeqID_8395
  Probeset Number=SeqID_11369
aaggtgtctgtcaaacttatcatgaatgaaancaatcttacctcagaaaaacgggctgatagctgggtctacaacgtgtttgctctttacttcatccacacatacattgcaatcttttatcatgccttgttgcatcgtaatttttcaactcttcgccaagtgttgattcagcggctccttctttctgaggtgttggaaaacctggtggaaaattcattgccttatctcaagtatatctataaaaagtacagggttcaacacatgatgaatgagaaaggagatgcaagagaaaagttccagttctntnctanagtngagaangaatacctgangccctnttactctgctatcatctggnnangagcttgtngatgggctantttnacgatttcttanacgtnggccttgcnncgttggaatgaattnnatgtnngntggcncntntccacctnnntttnttttttntctnntganccncctttntgttactggntnntngcntnganctgctgnatnttncaagcgggttnnttccttcccctctanagntagagctgcccatnttnttcaacnntcnnaccnngnttnannnttannttgcgtctntnntatggctntnnttannnggantncgnnncntgannntnatatntacntggtctaantnaatntctncttntngttggtntgncncanttnatantnntnaagtntncntngnancntatcntntnngtanttgnnnnnntntntntcntcg

SEQ ID NO: 1591 - DNA, 610 bp, Glycine max
  misc_feature (610)..(610): n is a, c, g, or t
  Peptide Sequence Number=SeqID_8396
  Probeset Number=SeqID_11370
tcagctacgtaggccccccccccagctgcaaaaatcttatatgaagaagatttctcaacaaaggacaagtcttttaaagatttctacaatagatatcttatcccaatgagagaaaaaattgaagaatatgcggaaaagataaacaatatagtgaaagagaaagagctagagttctttaatatgaatgaaattacacaaagattaatcacagacttctccaaagaaaaacgcgaattagaagctacacttcgtgaaagaaatattgctattgctaacctcagagaaacaatcgaaaatcttcagaatagaagtgtgcatagtggaggaaatagtggcagagtccattctcaagataacattgatttaccaagacaagtgaatgcgaataacctgcgagtgaatacatggacaccagataagctttattcattcagagcaaagagcagtgcgaataaagatagcagactacagactatccagaaattgcaaagccagaaattgagacataagaatagctcggaagattcagcaaataaaatgaatgattttattcaagattcgatcaatataagtcagatcaactttgagacaaaccctgatgatttctcan

SEQ ID NO: 1592 - DNA, 1362 bp, Glycine max
  misc_feature (1)..(2): n is a, c, g, or t
  misc_feature (10)..(11): n is a, c, g, or t
  misc_feature (18)..(18): n is a, c, g, or t
  misc_feature (20)..(21): n is a, c, g, or t
  misc_feature (28)..(28): n is a, c, g, or t
  misc_feature (32)..(32): n is a, c, g, or t
  misc_feature (103)..(103): n is a, c, g, or t
  misc_feature (181)..(181): n is a, c, g, or t
  misc_feature (217)..(217): n is a, c, g, or t
  misc_feature (287)..(287): n is a, c, g, or t
  misc_feature (289)..(289): n is a, c, g, or t
  misc_feature (371)..(371): n is a, c, g, or t
  misc_feature (452)..(452): n is a, c, g, or t
  misc_feature (532)..(532): n is a, c, g, or t
  misc_feature (1029)..(1029): n is a, c, g, or t
  misc_feature (1277)..(1277): n is a, c, g, or t
  misc_feature (1302)..(1302): n is a, c, g, or t
  misc_feature (1315)..(1315): n is a, c, g, or t
  misc_feature (1327)..(1327): n is a, c, g, or t
  misc_feature (1336)..(1336): n is a, c, g, or t
  misc_feature (1351)..(1351): n is a, c, g, or t
  misc_feature (1357)..(1357): n is a, c, g, or t
  misc_feature (1362)..(1362): n is a, c, g, or t
  Probeset Number=SeqID_11371
nntttttttnnttttttngnnggtgtgngcgncgcgcggtcacacgtgggataaaggaagtatagcacgggggcgcgcacaggtgtagagagagggggagggngcgccagaataagcacaccaccaccgcgtgcggcccggcacctcacccatcatgtcgtcgagcgcacggcgcgcgcgntactagtactacctatgccaggtactcccctcctgntggccgtgtcgaggttagagtgtctcgttatctcgacgggcatccagtagcgacgcttctagctcacgtngncgctgcgctcgcgcgcgcctccacacgttataggaggtggagggaggtgcggagatctacaaattatataccttaggaaatnacacatactacgtatacactatacatcttgcattggtcatacactctgctctgcgcttgatgaaatatcagcgccctacgngactgatgcgcttgatctttctctcttctctccgagtctcgtaatacctatctcaatccgtcgacaaaactactcttccnactgccttgtgtatttgtgcctcaagaattgtcgggtgtagcctgatacaacaaccgcgcgcaaaaagtgtaaataggaactcctgaacagaatcacagccccgtacgtcaacacacacttcacggaggctgcggtggtgtgtatgtgtggcgcgttcgccggaggaacgcgacacacgcttcacctgagtcccggtcgtttatcttacgacacacctatatccgtacactgaaaaaagcaatacaccacactttacatctcctcatagcatgtgagaacctttcatagcatcactactctcgccctccaccctcggggttgatgtgtgtactagacttctagtcactctataaaacacaaaactccgcggactgatcatctcacggtatcgccacaattacacaaacttcgtgatgtttatccgcctcgtcgcgttgttattggttcaccccccacatgcctaccttcacaatcactgtcactaacgagtgagttngacggcatcacaatgctcatcatataccaagcctaccgcctcgcagttaccctcgcgaggtcacgtcggcgcacactctcttaaattctatatatcgcgctctcatcacatcacgctccttccacgctcctagagacagctgcctctacgaacaatgctatcatatgacatatattagtagatatcaccacgagaagacgcgtaattcatatcgtgaccattcacaaatatagatgcggggtgcgcgntctgatcgtgacgcgcgactctccntctacgtcgctcntgctcgctgttntctgatgantatgcatctcggttnaccctncctcn

SEQ ID NO: 1593 - DNA, 334 bp, Glycine max
  Peptide Sequence Number=SeqID_8397
  Probeset Number=SeqID_11372
ataatgggtcctgtgatagaaccctatgaagagagggaattccaggtcattattcactttctccggaataatcgtttaacacctcccaaggtggcatttaggactaaagtgtttcatccggacatcaacagcaatggtaacatttgtcttgatatcattaaggagcagtggaaccctgcactcaccatctttaaggaactgctttgaatttgatcaacacagagtgatacaaatccgtatgatcaatttgatccggaaatcgcttatatgtacaaaactgaccgggccaaatataaggccaatgtactaagatggacccagaagaatcccatgg

SEQ ID NO: 1594 - DNA, 1505 bp, Glycine max
  misc_feature (1101)..(1101): n is a, c, g, or t
  misc_feature (1108)..(1108): n is a, c, g, or t
  misc_feature (1202)..(1202): n is a, c, g, or t
  misc_feature (1505)..(1505): n is a, c, g, or t
  Peptide Sequence Number=SeqID_8468
  Probeset Number=SeqID_11373
cccacgcgtccgcaagattattatgaaaaaaatatagttttcataagaaaaaagggctagcaatttatttggaggccatgagaaattttaacccaccatcacttaaaatctaattaattttgtttttagttttaatctagcctgggaagggtatagatggtgaggctgagctgaacgcagtaagcactaaggagtagcgagtattggctgatacttgcaccctcttaacaataacatgagacagagaaagggttgacggaaaggaaaaccaaatcaaacccaacccaccttgtccgatctgccaccaggtgtggttgttgtgatttgaatggaggcaagtggaggtggcggtggcggtgcttcaccgtctgcaccagtgaagcaatatctgcacgatttctcgaagctgtttcagtactatctggataaatccactccacattccacgtacagatggattgggacttttgtgatagcatccatctacgttttacgcgttgtttatgtgcaggggttttacattgtctcttatggcctcggaatctaccttctgaatctcttgattggttttctctcccctttggtcgatccagagctcgatccctccgattcccctttgcttcccaccaaaggctccgatgagttcaaacccttcattcgccgcctccccgagttcaagttctggtattctttcacgaaggctctctgcatagcatttgtgatgacttttttttccctgtttgatgttcctgtcttttggcctatattactctgttactgggttgttctctttgtccttacaatgaggcgtcaagttgcacacatgatgaaatacaaatatatccccttcaacttggggaagcagaagtatagtgctaggttatgccaaaatttaccaaaggccccttccccagaaaccctttcaggtatgatttttcgggtacggtgataagcaaaatggaccccccaatgcacttttctgccagaaggtccttgcttacaacctccgtaatagtccgtatcccttcgatatgtcgttcttttccctgtcgtagtagacccctagtccagctccagtgagaccaccaagagaaagctcanccagaanccagcccctccacgacagattttcccagcatcacttttctgatcctgtcctcctccactcccagactctctctctttgccagacccatctttgncagattgatctgaatccaatgctggtttttctccactaacattagcagcagaagcatcagaagaagaagaagaagatagaagccttgggcacaaccccaacgacccatttccataaccttgattcccaacctggtgagggtgatggagtggttgaagatgagaagagaagggtggtaaaagcgtggagggtctgccatggcgaagaaggtgtgagaagagaaggcgcgtggaatagcgaaattggttaaccttgctggatacgatgtacgccattagaggaattatgtgaaaaccttaacctn

SEQ ID NO: 1595 - DNA, 606 bp, Glycine max
  misc_feature (1)..(5): n is a, c, g, or t
  misc_feature (354)..(354): n is a, c, g, or t
  misc_feature (468)..(468): n is a, c, g, or t
  misc_feature (475)..(475): n is a, c, g, or t
  misc_feature (606)..(606): n is a, c, g, or t
  Peptide Sequence Number=SeqID_8469
  Probeset Number=SeqID_11374
nnnnngggtaccgggccccccctcgagtcgctacgtaggccccccccccacaaattagcttatgtttgagctaaatttagcttatgaataaacttttatatttttttaattttcttaccctagaaataatatggagaagtttatcaaaatagactgtaaccatatgaaactctaaatgttgattaataaacaacactaaaagtacttaagcagcgatgtctttaagtattatcctcaatattagagtttcatttcgataatcggtatgtttctattaaaagttaacatagaataacaaagtaaaactccaattttaattcaagaacaaaatcaaaagcacttagaaacctgtantctaagttttgtgctaattttaaatcctcctatatccttttctttttcctattaatccttgtacttgctaaataaagaaaaaagttaaatgaagtttatatttgatgcaaatgnaaatagncttcagtttgtctcccagattgtcctaaaaggtgttgggttccaatgaattttatactttgggagatgcaaaatggagagagagaaccctgtgaggcaatgatgaggaaaacccgaaggaagtaatgcttn

SEQ ID NO: 1596 - DNA, 1484 bp, Glycine max
  misc_feature (58)..(58): n is a, c, g, or t
  misc_feature (77)..(77): n is a, c, g, or t
  misc_feature (129)..(129): n is a, c, g, or t
  misc_feature (217)..(217): n is a, c, g, or t
  misc_feature (232)..(232): n is a, c, g, or t
  misc_feature (429)..(429): n is a, c, g, or t
  misc_feature (608)..(608): n is a, c, g, or t
  misc_feature (668)..(668): n is a, c, g, or t
  misc_feature (906)..(906): n is a, c, g, or t
  misc_feature (956)..(956): n is a, c, g, or t
  misc_feature (1413)..(1413): n is a, c, g, or t
  misc_feature (1450)..(1450): n is a, c, g, or t
  misc_feature (1457)..(1457): n is a, c, g, or t
  Probeset Number=SeqID_11375
ccgcacatcacatcaggcgtcgaccacggatacaactccagtatggaagctgtatgancagaacaagagagtgtcancggacgggagagctcttgatagctgtacgtcaagactacaatgtgtattcanctctatcacagggtgccatacatccgagtaaacacgtcagtcctctgaggtgtatacgagtcagtactgtcgctgacacatgcatgcnatactgcgcacgcantccacgtcaatatatcatatcacagaagcgtgtaggctacgagtgcagcatgagcgcaatgtgtagattgccgcacggacatacgctcacacatgctcgatcacaatacattactgcacatcgtgagacgtgaggtgcgacgtgagggcagtcgcgtctgcgacggcatgatacgcgaaatcgtattatatacgaanctcagcctgctattgcggccgcctcctctacgagcatccagtcatcagcaggtgcgggcagcggtcgtccaatacatcgccagttagcgcggatgacacaactatattaccatggtgcgcggctagtggagatcgtagaatccgacaacactaggctgagaggcgtatatccgtcgggncgccgagctggacaagcaccactcgagcaccaattcctcaatacagatacgtcgttagtngcggagtgatcggctggcaatcatctgtgaggcgtccatcgagcaccttgccacatcacgtctgcgtgacactctacaccatctcctgaccgcgtggagttgtgtctcgctcacatcgagcgaaacatcacactacagatcaggtgatcattctcgacgtgaccgaggctcgtatatgcgctttgtccgtcgcgccggtcgcctaggtcgtatgactcttcgcgtcgacaccttttcncgcggtaatcacgcgtgcgccgactgttttgtatatttatcagacggcgncaggaaagcgcgccgtcagtatcaatatatacccgcgctccgtccaacacctcacactaatatctagtatataacgtgctccagctcacacgccactatcgcacatagcggccggcgatgtagcgcctcggctgtcgtgatatcagcgataggtactgttgactgtttgctatccactcgcgcgcctgtcgctctatgtactgatatatagattagattttctccgtctcgctgctcagcaagtgagcaaacgcgagactgcgctgccgccgtcacgcacacactctaccagttgcggtatccctatgagagcgagagatgtggtcggcaggtggtgcggtcgcgtgcatgacgacgcgccctccagctaaagataggcaagcgcgtatacttgatgcccaacacctacgtaccccccgctgcgcgtaaataccccacttccacctataagcggggnggtctgagatatgcaccctctactctatgagggttgnagtgagngggaaggggggtgagtgggggtgtgtg

SEQ ID NO: 1597 - DNA, 1382 bp, Glycine max
  misc_feature (1)..(1): n is a, c, g, or t
  misc_feature (247)..(247): n is a, c, g, or t
  misc_feature (340)..(340): n is a, c, g, or t
  misc_feature (534)..(534): n is a, c, g, or t
  misc_feature (715)..(715): n is a, c, g, or t
  misc_feature (895)..(896): n is a, c, g, or t
  misc_feature (931)..(931): n is a, c, g, or t
  misc_feature (933)..(933): n is a, c, g, or t
  misc_feature (1339)..(1339): n is a, c, g, or t
  misc_feature (1341)..(1341): n is a, c, g, or t
  misc_feature (1344)..(1344): n is a, c, g, or t
  misc_feature (1346)..(1346): n is a, c, g, or t
  misc_feature (1353)..(1353): n is a, c, g, or t
  misc_feature (1357)..(1357): n is a, c, g, or t
  misc_feature (1361)..(1361): n is a, c, g, or t
  Peptide Sequence Number=SeqID_8470
  Probeset Number=SeqID_11376
natgcatattattacttggacacaccagagaatactcgtggaatattagagcagacgcagagagcgcaaagaggacacagcgtagggagtagagagagaggagaaaggagatggatatgcagagggagatgtagacagatatatacataatagagtatatgagtcacagtgagctcgctcattcagtatgtgatatatgtgttatattatatatgtatatgtgtggcgtgtagtgagagtgatgtanatgtgtcaaacagcgatattccgagctggcagcacgcggacgtgcacgatacagatatagatatacaatatactacatcacgactcatgaagnatgcagagagctgtatagtgcggagagatatgtatcgaagattagtcttgagtgtgtgtgtacgatcgtcgcgctagtagtgtatagctcgtatgatccatcgcagtcttgtgagtagcacgcgagcgagagtgtaatcgcggagagcgtggatgataaggtgagagtagcaggacgagcgaagataaagaatncgagactcgagacataatagacacatgcgatcgtcatacgaataaaacgacgacagtcgttacaatgatgaagacagtagagggggtggtgcggcactacgcagaacagacgggcaatatgagcgcgagcaggacagtcttcgttcatagtattgagctaacatcgaggtatacgtcatcncattcgaagtggagatactcacacgagataagatatacagcatgactagataatatcaaaactcacatcgctcagtagactctatcaggtataacatatatagagttcagtgatgataggcgggaggcgcgaaagcgatagagagaaaaaaaaagtataaagatataaataagagagagnngagcgacagagagaagcaggagcgcagaagtagantnattatatactatctgttagaagatgagtaatacatagacgagagtaagagtggtaggaaagtgatagatgattgtgagtttagaggtatctgtcactgatgacaccgtctggttggtctgttattgagttgataacaatatagtatatcatgtttttacaggcagcgttgacatggtagttctgcattggagtggcacattagacattaaagacagcgacttaatacgcgtaaggagaaagagtattacttgtattgaggtagtagaagatgtgtatccgcctacaggcgcccactctaatatatttaatgagctgacaattaatagtagtttaattatattattggtaagagtgaggagactcgacgggggtgcatggtgccttgtgtgggattggagggttgtntngtntntggtgtngatnaaanaaaaaggagagggaaggacaa

SEQ ID NO: 1598 - DNA, 1771 bp, Glycine max
  misc_feature (68)..(68): n is a, c, g, or t
  misc_feature (92)..(92): n is a, c, g, or t
  misc_feature (99)..(99): n is a, c, g, or t
  misc_feature (137)..(137): n is a, c, g, or t
  misc_feature (174)..(174): n is a, c, g, or t
  misc_feature (220)..(220): n is a, c, g, or t
  misc_feature (345)..(345): n is a, c, g, or t
  misc_feature (389)..(389): n is a, c, g, or t
  misc_feature (460)..(460): n is a, c, g, or t
  misc_feature (478)..(478): n is a, c, g, or t
  misc_feature (596)..(596): n is a, c, g, or t
  misc_feature (604)..(604): n is a, c, g, or t
  misc_feature (645)..(645): n is a, c, g, or t
  misc_feature (673)..(673): n is a, c, g, or t
  misc_feature (1648)..(1648): n is a, c, g, or t
  misc_feature (1692)..(1692): n is a, c, g, or t
  Probeset Number=SeqID_11377
ccaccccctctagagtctcgcagctcgatctctagtcgctctattgccaataagcatcgcagcgtcancgctgacgcacgctgtagtatgangacatcntttgacacattgggtgtcatctgaccatgagaggcacngtctcgcatcgctacgattagcagaccgtccgcttancatactgtcagcatatagctcgctgacggtgtgtcagtccgcgcancgggtgctttgaacatcacgagcgaggtgtatagcgcgagtatcttcacacacaataccgtcaccacgcttattctacatatagatgttgtagtgtgtcagtgcgtgatcttgtgtagtgatgantcctgacttgttcgtcttgcgtcgagcactcacactccgtccgncgcgatcctgtacgcatgtctcactacgttcgtgctctcgtgcggtgtgacgcctactttgttcagataanattatacggtctcatacntactctgcgcaacagccgcgcgtgccgcacgcgtctagagtcacaccgacatcgaagcaatcgcgagctcttgatgacaccacgatagctattccgtccatgccgtcgggtcatacanttagaaanttgatgctcgtctgagcctgcggctcgtacacgcgggcgcntaagcggcgggtccggcagcaaatgtantcagtcgtcgcctccagagcgtcaggttggcttccggagttccgcgactgctcctccgtgtgactgtcttcttccgccaacccggttctgtgacttggcgcaccactcgcaccacacctcatggattatgtcccgcgggcgcgtgcgcggtctcgccgcgctgcaccatcattgtctgcgcgaccgactgggagcgaatctttgtcgcgagtgtacacacatactctgtgcgcggcgcgataccacgctcgtgtgtgcccacctcctgcctgtcttgtcaagaccttgcatgcgccggcggcttcgcatagcgtctcacaacaatcaccgcgcaacgcgccgggcttatccctccatacctaattatatagcttttcgtgtgtctcatgtgtcgcggcgtttctagcgcagatctctcttccatgcatggttgcgcacgctgctagactctcgcgtcggcgggtctttcgcgccgtgtcggtgtttgtgatgttatatgtatagcgctatagtgtggcggtagtagatatgatgcgcaggagcaataacaaaaatagagggcacgcgaaggcgcggcaggtcgtaatggtagggtgggtgggtaggtggataattagttaatgcgttagcgcgcggccgttccacgatcagaaattgcgaatatgaacgacgccataaccgcaccgggcgcgcgctagacccacgcgcccgtctcctggttcgacgcccggcgagcatgcaacgttgcgctcccagtgacccacaccatacgtaacacgggcctcccgccgcacgcgcgcgtcgtcgtagctcgggcggcgcggtgacgtggcgcccaataatatcttctgtatataaaaatatagtgcatcgtcgtcttgactctttccactttcttcccgctttcaattatggagaacaccacgcgagagcagtacgccaccatagtcgtattggtgggaaaaaaatcactcntccctctcccccctcggcctatcacccccccctccaccacaccncctaccttttccgcatattcccctacgaacgcccgcgttcgcttctccttcacggcgccttgacgctggtcgctccgtg

SEQ ID NO: 1599 - DNA, 570 bp, Glycine max
  Peptide Sequence Number=SeqID_8471
  Probeset Number=SeqID_11378
accgaacggccgagggcaaggaatcaattaacgaggaaacggaaaaacccccaatttgcaaaaccccttttcccgggggttgggcgatttatttaatcaactggcccgacaggttttccgacttgaaaacgggccgtgagcgccacccaatttatttgagttagctccctcctttggcccccccgggttttcccttttttctttcgggttgttttttttttggaattttgaacggattacaattttcccccgggaacaaaaaataccctggtttcccccaacttgaaatttacccccccttaaggggacaaaaactgggggttccccccggggggggccccttttaaaattatggattccccggggtgcaggaaattttttttttttttttttttttttttttttttttttttttttttttttttttttttttttttttttttttttttttttttttttttttgtgttttattttttttttacaaactaattagtactttttacattcccaaagccattgtaaaggaaaatttctaacttcctgtccctggtatgaccgtgggaacgtga

SEQ ID NO: 1600 - DNA, 1595 bp, Glycine max
  misc_feature (49)..(49): n is a, c, g, or t
  misc_feature (56)..(56): n is a, c, g, or t
  misc_feature (72)..(72): n is a, c, g, or t
  misc_feature (121)..(121): n is a, c, g, or t
  misc_feature (156)..(156): n is a, c, g, or t
  misc_feature (166)..(166): n is a, c, g, or t
  misc_feature (188)..(188): n is a, c, g, or t
  misc_feature (246)..(246): n is a, c, g, or t
  misc_feature (317)..(317): n is a, c, g, or t
  misc_feature (355)..(355): n is a, c, g, or t
  misc_feature (393)..(393): n is a, c, g, or t
  misc_feature (475)..(475): n is a, c, g, or t
  misc_feature (508)..(508): n is a, c, g, or t
  misc_feature (544)..(544): n is a, c, g, or t
  misc_feature (597)..(597): n is a, c, g, or t
  misc_feature (886)..(886): n is a, c, g, or t
  Peptide Sequence Number=SeqID_8472
  Probeset Number=SeqID_11379
cggacagttcgtctattctattgtcattccggacggcccgagtctcagntctggcnagcctgcacgagcacnattgtgcctgcaatgcgtcgtatgatcggtcagtggtgtgctcacgcantatcagcagctgctcgtctcagcttaatgtctgtntcagctgcgnagtgagagcgatgtacgctgtnttactcagtagggagacggcgcgcattgcatgggagttcatcttcagaggcgcacgangatgtgctaaagtgagcgagtaattgagtgaggcatgtattgtagtgacgatcgtttacgagatcgtgtgnacgatagtcagagcggcctattcactgtcacgatgtgnagtagtttgaattatacgagctgtcgcgcggcataganggggtgcgcggcgaagatccgtccacataatatatacttctgactagtgagttcagcttagatatgagtgtatctctcgccnctctcggagtgacactgacgtatctgccagggngtggagagtatatcatatatattgagcgctgatggnagtgtcgtgagacatctttagttctgagaggcactctcatacgtacatcgctntgtgtctaagtagtagtatgaatgtgaccgagtaccatacttattccgtagagcgtgatctgtgtgacaaacgatggggcgtggctggtgctgaggtgtgaggcaacaattacagtcgagagagacgcgacgtcgctgttgtttggccttggccactgtggtcagataatgtttgttcgctacgccaactcaactgcgcggggcggatatagatatctgctggtgcgacaggggtgtgagagctattgcagcgatgagatctgcggcggtggtataatgactcaacatngtagtatatcctctgttgggcgacaagctcgtcttcatctggatgctaaattgataacctgtcgccacgagtacttttggcatatgttgggaggggtgtgggggctagattatcgtcctcataaggtaggtggtgccacatgacaccagtagttagtactacgactagatttttgagtcgacggggtgatgtttactactggttgtgggcgcacagtggatgaggtggtgaaaaagaggcgacgagtcacgtgccactcagtgtaacactatgttttagtctcaagataataacttcctttcatataataccatgcgaggagatggagacagtaatgtgcacttctggccgtgggtgatcgattggtgccgggcggtggctttatcaatacgatggatccagcgagggcaggctcataatacatagtatcctcgccctggcatgatataatataataataccattcaccttcggagtgtctcgttattagattgtcgtggtcagcggtagagatgataggtaatgaagagtggcccctagcaccttacgcatacatacctcctgtgttgccatgtgtatgtccttccatacagacaagtacaataatatattgattttcagcacctggcgcgggtgacggctgggctgtggagtgtgcgacgaggaattaattaatgtaagatatgtcactataacgagagagaggagg

SEQ ID NO: 1601 - DNA, 1489 bp, Glycine max
  misc_feature (1)..(2): n is a, c, g, or t
  misc_feature (22)..(22): n is a, c, g, or t
  misc_feature (26)..(26): n is a, c, g, or t
  misc_feature (55)..(56): n is a, c, g, or t
  misc_feature (60)..(60): n is a, c, g, or t
  misc_feature (66)..(67): n is a, c, g, or t
  misc_feature (71)..(71): n is a, c, g, or t
  misc_feature (106)..(106): n is a, c, g, or t
  misc_feature (121)..(121): n is a, c, g, or t
  misc_feature (139)..(139): n is a, c, g, or t
  misc_feature (156)..(156): n is a, c, g, or t
  misc_feature (161)..(161): n is a, c, g, or t
  misc_feature (173)..(173): n is a, c, g, or t
  misc_feature (184)..(184): n is a, c, g, or t
  misc_feature (197)..(199): n is a, c, g, or t
  misc_feature (205)..(205): n is a, c, g, or t
  misc_feature (208)..(208): n is a, c, g, or t
  misc_feature (219)..(219): n is a, c, g, or t
  misc_feature (233)..(234): n is a, c, g, or t
  misc_feature (248)..(248): n is a, c, g, or t
  misc_feature (256)..(256): n is a, c, g, or t
  misc_feature (279)..(279): n is a, c, g, or t
  misc_feature (296)..(296): n is a, c, g, or t
  misc_feature (341)..(341): n is a, c, g, or t
  misc_feature (345)..(345): n is a, c, g, or t
  misc_feature (349)..(349): n is a, c, g, or t
  misc_feature (351)..(351): n is a, c, g, or t
  misc_feature (360)..(360): n is a, c, g, or t
  misc_feature (375)..(375): n is a, c, g, or t
  misc_feature (450)..(450): n is a, c, g, or t
  misc_feature (467)..(467): n is a, c, g, or t
  misc_feature (558)..(558): n is a, c, g, or t
  misc_feature (586)..(586): n is a, c, g, or t
  misc_feature (595)..(595): n is a, c, g, or t
  misc_feature (712)..(712): n is a, c, g, or t
  misc_feature (717)..(717): n is a, c, g, or t
  misc_feature (783)..(783): n is a, c, g, or t
  misc_feature (785)..(785): n is a, c, g, or t
  misc_feature (791)..(791): n is a, c, g, or t
  misc_feature (796)..(796): n is a, c, g, or t
  misc_feature (808)..(808): n is a, c, g, or t
  misc_feature (867)..(867): n is a, c, g, or t
  misc_feature (1015)..(1015): n is a, c, g, or t
  misc_feature (1156)..(1156): n is a, c, g, or t
  misc_feature (1161)..(1161): n is a, c, g, or t
  misc_feature (1206)..(1206): n is a, c, g, or t
  misc_feature (1284)..(1284): n is a, c, g, or t
  misc_feature (1287)..(1287): n is a, c, g, or t
  misc_feature (1311)..(1311): n is a, c, g, or t
  misc_feature (1405)..(1406): n is a, c, g, or t
  misc_feature (1412)..(1413): n is a, c, g, or t
  misc_feature (1438)..(1438): n is a, c, g, or t
  misc_feature (1457)..(1457): n is a, c, g, or t
  misc_feature (1461)..(1461): n is a, c, g, or t
  misc_feature (1483)..(1489): n is a, c, g, or t
  Probeset Number=SeqID_11380
nnagatagtatggagactcaanaagngcactcacgctagcagcgcgttatctatnngcantatatnnatcnctgctctgtctcgtgtatgatcacttacactagtnagaccatagactacntttgttacgtaagacagntatgatgatcatgaganagcgncatgcgtacagnaacatcgatangcgttatctacgnnngctgcncgnatcacacgatnctagaacctatgcnncacggcacgagctnatcatagntctcaccgctcatctactcagtnctcgctttcacgaggcntcgttgctgcgatacatgagatttcggagatccgtcctctgttgngcanagananattgtcgtntcactcagcactcancgctgctgctgcgcatagtcgctcatacaagcaccaacatatatgtgtacagatcgatgagactagcggcctgtntgtgtcgcgaggtaggncgcatcatacgcgcggcgtgatgttcatgagatacatgatttcagactgagccgcccacgtttcgcgctatcgtgacagagcggagtacanctgtgccgggctgcagggtcgcgcgagngccgctggnccatcaactatccatccaccacacagcacatcatctccaccaacaccccactccactcagcgaccagcgcgcacctcagccgccagacaagacaaagcgcagagtctatcactacantctcngcatacgatgcacagacaacaaacgcagagccgagcatactcactccaatacacagacaccctcancnctcttntcctncgtccatacatntcacatgcagccacacactgccccaccacacatcacctagacctgcacacgagcacagnattccctctcactcatctctgcatctctcacccactttcatacacacgcataccaccccaccccccgcacaccttttatttctctccctcgtgtctgcataccccgctatactacacccaataccaatttgtatgatcgtccgggcgngtaatcctttgtgacctcccctcgctcgcttttctaccaaaccaatatattccatgctctgcgcctgtgtgtgttgcccggcgccccgcctactaatcccacccgccacaatataccctagacatgtgtttggaagatganatcangcacacaataccacatacaaagtaccactcggggagcggatgacnaacagactatatgccactcgccccgtgtttatcttgcctgagtcgttgattgtaaagaataatagaagaaagatatanagnatatatatctttctctagtctcgncgcgcgagcgattctctatattattatatatatgcacaacgtcgcaccccctacccttagatcgccgacacccgcccagcttttgtttgggggnnggcggnnggtcgattgtttgtcggccgtgtgngtcgccgcctcgccgcatnctgnggcggggggggggggccccccnnnnnnn

SEQ ID NO: 1602 - DNA, 1029 bp, Glycine max
  Peptide Sequence Number=SeqID_8473
  Probeset Number=SeqID_11381
aaaatatcggattttctctcaacttcctatccactaccctcctctattttttctagttactccttgatgaacatggacaatcctatccaacaaacctccgaaccaaccgcaaccaatcctcccaaaaatgatgatcatattcctgtcgaagcttttgaattcagatttcctagccgaactgaaaaaaggaatattattctcaagcgtgttcttatcggatttattgctgtatttgctactgttgcatttataagtgctataatctccaagaatgcttacttaaatgagcttgaagccaagataaacgataatctccagacatctaatgttaaattccttgataatactcaagctcctcctgttgtatttacagctgaagctattgaggaatcactatggaaagactcaccttaccttacagtgctgaagaacctagctgctcaaagatatagatacgtgattttgaaggaaacagaagagaagggtaaaggcaaaattgcaacagggtattatgatactacaaatgtcactgattttattgggcaatttcatgaaggacaacaaagagttggatatataactgtgggtcctgaaggatatgaattgatttatttgatcatctataatcccgagaatatcaaggttcaagaaattttggataatgtgtytgctccaggtgatgaaaaagccttggcagaatttgatattaagaatttcaaaaaaattgttgtaaagaaaatcgatgatatcgagaagaaaattgttattcctgaagctcctcctgttgtcactaaagaaagtgaataattttgaaattggcttgatytgaaraagactggataattttcaaatgaagaaatggttatatcaaaggaataagagagatgatatgatagtaagtttattgattatgaattyttatttgtttaacttattawatatgggtggatttttattccattctgatgttgattgaattagacagaataaatgtttttatactttgtttcatgaaattcaaaagaaatg

SEQ ID NO: 1603 - DNA, 1789 bp, Glycine max
  misc_feature (21)..(21): n is a, c, g, or t
  misc_feature (28)..(29): n is a, c, g, or t
  misc_feature (65)..(65): n is a, c, g, or t
  misc_feature (103)..(103): n is a, c, g, or t
  misc_feature (143)..(143): n is a, c, g, or t
  misc_feature (282)..(282): n is a, c, g, or t
  misc_feature (469)..(469): n is a, c, g, or t
  misc_feature (631)..(631): n is a, c, g, or t
  misc_feature (659)..(659): n is a, c, g, or t
  misc_feature (742)..(742): n is a, c, g, or t
  misc_feature (768)..(768): n is a, c, g, or t
  misc_feature (919)..(919): n is a, c, g, or t
  misc_feature (966)..(967): n is a, c, g, or t
  misc_feature (969)..(969): n is a, c, g, or t
  misc_feature (1063)..(1063): n is a, c, g, or t
  misc_feature (1106)..(1106): n is a, c, g, or t
  misc_feature (1128)..(1128): n is a, c, g, or t
  misc_feature (1195)..(1195): n is a, c, g, or t
  misc_feature (1207)..(1207): n is a, c, g, or t
  misc_feature (1212)..(1212): n is a, c, g, or t
  misc_feature (1238)..(1238): n is a, c, g, or t
  misc_feature (1243)..(1243): n is a, c, g, or t
  misc_feature (1259)..(1259): n is a, c, g, or t
  misc_feature (1280)..(1280): n is a, c, g, or t
  misc_feature (1284)..(1284): n is a, c, g, or t
  misc_feature (1296)..(1296): n is a, c, g, or t
  misc_feature (1349)..(1349): n is a, c, g, or t
  misc_feature (1359)..(1359): n is a, c, g, or t
  misc_feature (1361)..(1361): n is a, c, g, or t
  misc_feature (1418)..(1418): n is a, c, g, or t
  misc_feature (1602)..(1602): n is a, c, g, or t
  misc_feature (1604)..(1604): n is a, c, g, or t
  misc_feature (1606)..(1606): n is a, c, g, or t
  misc_feature (1652)..(1652): n is a, c, g, or t
  misc_feature (1661)..(1661): n is a, c, g, or t
  misc_feature (1708)..(1708): n is a, c, g, or t
  misc_feature (1763)..(1763): n is a, c, g, or t
  misc_feature (1789)..(1789): n is a, c, g, or t
  Probeset Number=SeqID_11382
ttttacccctctcttcccccnctcactnncctttctattgaatctatagggcgtgtgcttcgctncctctcgcctctctctgcagtggttgagaggtgctggnttctcacgtatctgtcatagatcataaccgcgcgaccccngcctctgtcccaggacccggactagcctctcctactttatctgttgtgcgactactagtgtaacagtcatatcatctactacgagactgagtatcgccgcgaagaagttacgcgtgaatgatctctactatacgtcttntctttcaccttcatgtatcgctctttcttccgccacgagcgacatctcactattcaacccctacacgcaggtcgtgctcttgctgatacgttactgagttcgagagagagagaatgagagtagggtattgtgcgtgtgatacgtggacttgagcaaatgtgcgcagatcgtggctatgaggatactncgagcatatttattcactaatcacagcaatattcacactgcgtacgcagcattgatatacattcgtcatatgagtggcgatctgcatgaggaggcatgaggcagtgtttcgtacgcgtgtggacggagacgaatatagtatatgtggtctgcagacatgaantgtagtgcctccgctaatcgagtagcancatagcaccgcggtctcatacgaaacatctatacgacaacttcgcgcgtcgactgtagcgacaccgaggtgtggatagaagtngagagaggagtagaatgatatggatntgaccgatccgctcatcacgaccgtctcttcgacgtcgatgacgagctgacacaggtacgagcctctcagtcattgagcggtgaatatggagagctctacggcgaggcgcacgacgatgatgctgttggtttatcaggtggctgtgatggncgtacgagtcgatgagtgcgttagcagcgctgactcgcgccgtgaanngntgcgcgcttttgatccgtcgctcatgcgcgctgtgatagcatctgcgtgcgttgtgagtcgtacgtggcactcgtcgacgcggtgcgactacanacaacgaggcatgactatacgcagtgtcactcagcacaccgcntcgccagcccgcgcctgctcancacgactgctcaatgatgataatcctcatggcccattcacacgatacatgatagcttctatcagcanacgacggtcgcntagcncgaccttcagtacacactcgatcatnaggtngtgaacgagatgctcnaaattcgttgaactagtgatncganagatgcgtgtgntgtcgtcgtcgcatcgcatgtcatacgtgatacatacctacgacgatatgcgncaggcattgnanatgtatcgcgctaccactcgcagagcttatcgtaagatgtgtctataatgtgctagntctgcactcagcttaagagaatcacggtgaggaagggagtacacggtcaatgatcacatacggacggtgtctgcgagagactagacgcggcgacacacacatgactgtgtgtgtgacgtgacaggagtaggagacggacactactcgagagtgtcgactgctcgtcagctggttactcgttagntntncagacgcactgctatatcgcgctgtgtgtgctagatctctcggtgnagctcgtcntctccgcgacgagcgcgctcatactgctgactcgcggagtgtcgctngatgagcaatactaacatcgtgcagacttacgcctcgtgcgatcacagcattgangtgatatatcatcgagacatgtatan

SEQ ID NO: 1604 - DNA, 1676 bp, Glycine max
  misc_feature (33)..(33): n is a, c, g, or t
  misc_feature (65)..(65): n is a, c, g, or t
  misc_feature (79)..(79): n is a, c, g, or t
  misc_feature (247)..(247): n is a, c, g, or t
  misc_feature (477)..(477): n is a, c, g, or t
  misc_feature (1162)..(1162): n is a, c, g, or t
  misc_feature (1177)..(1177): n is a, c, g, or t
  misc_feature (1227)..(1227): n is a, c, g, or t
  misc_feature (1293)..(1293): n is a, c, g, or t
  misc_feature (1385)..(1385): n is a, c, g, or t
  misc_feature (1397)..(1397): n is a, c, g, or t
  misc_feature (1424)..(1424): n is a, c, g, or t
  misc_feature (1472)..(1472): n is a, c, g, or t
  misc_feature (1581)..(1581): n is a, c, g, or t
  misc_feature (1588)..(1588): n is a, c, g, or t
  misc_feature (1604)..(1604): n is a, c, g, or t
  misc_feature (1629)..(1630): n is a, c, g, or t
  misc_feature (1644)..(1644): n is a, c, g, or t
  misc_feature (1676)..(1676): n is a, c, g, or t
  Peptide Sequence Number=SeqID_8474
  Probeset Number=SeqID_11383
ttgccctatttatgtggggtgtgtgttatatgnggagagatgatgtgggttgaatgatgtataangagagaaggagcgngcctgacgatcgctacactcctatatatacgctgtggaatgttcggctccggtcgcgtcggtgtgggcccggacttcttctgctatactatgctgcgggatgcaccccctgcgcgcaatagcgacgggatagtcgcctctatatctatcttctctcttcgttatgtgnatgatacttttgttgagacatgagtgtagactgtaaatagtctctcgacagttatactttatcattcagcgcgtgaataatataagacgcttataccatctagagggaatgagaggatatcgagtgtgtaaaatgcttccgttaagtgatgcggtgtatgtgacctgtacatgctatacccgcgcgcccgccgcgcgcgtcctcctctctccactcgcccgcgctgacgngcacgcgccgcctgccgttcactcgtccctcccaccaccccaccatgctccctcatcacttctcacaaacaaatctcacgtccactacactacctccaacagtagcatatctgcccctggtatcggcagacctgcgctccggctcgcggcctgcgtaccctcagcgagtcacgatccgcggcgcgaagccgactcgccacgatgccgtacatatacgccactaacaacgcacgccaactataaatccgtattaatagacttcttcatcttcctctcgagttgttattgagtggcgcagagcacgatagtgcgctgcatactgtgtcagatacactcttgctactccgaccgtgctgcgcactgtgtgctacgatggtatgcatatatgtactcatatacttctcaatcgctctgtcacactgtcgtgaagcgcgcacgactgacaaacgaccgtgctgcgtcactcagaatcttcctccatatccgacacagagctgataactaatcagctcgcgcgcgccgcgtcaggagcggatcgcgcgctcgtagactggttcagcatggcgatcgacagcgtgtctgtactcacctgatatgctccaactacgtagacgggtgctgtgacgtgacgttgctgctacatgtgttgtgtgagggtctctccatctcgacaatactctcactntgacatgcatgttanctacctgactgtcataactcactgttgtggaacgtgcgctgttgagtgcngacgtgatcgcatagaggacgagatgccacattgcgtcgcggcgtgtggtcgtctgtcgactcgtntgccgcgctagctgagtgatggtgcggtgcactcggtgtgtagcgtcttggcgtcgagcgagtcgcgatatcgtgatcttcgagctgtgccncagtccaactangacgtaaaacgaagcgcacgagcgccnattatgcatgatatacctgcactcttagctcgtggtgtgtctgcgtcntccacggattatagcgccgccacgatatcaactcacacacacagcggacgttcgcagttgttatatcatgtattcttagcttcgatgtatctctgaagtagtatatctngactaantcgtatagtgtatcantgcatagtttgatatatcctgctgnntgtagtgcgtcgcngttgtgtctagcacgatcgtatactgtctctn

SEQ ID NO: 1605 - DNA, 1784 bp, Glycine max
  misc_feature (5)..(15): n is a, c, g, or t
  misc_feature (26)..(27): n is a, c, g, or t
  misc_feature (48)..(48): n is a, c, g, or t
  misc_feature (80)..(81): n is a, c, g, or t
  misc_feature (89)..(90): n is a, c, g, or t
  misc_feature (92)..(101): n is a, c, g, or t
  misc_feature (104)..(105): n is a, c, g, or t
  misc_feature (113)..(114): n is a, c, g, or t
  misc_feature (116)..(117): n is a, c, g, or t
  misc_feature (119)..(120): n is a, c, g, or t
  misc_feature (155)..(155): n is a, c, g, or t
  misc_feature (257)..(257): n is a, c, g, or t
  misc_feature (316)..(316): n is a, c, g, or t
  misc_feature (628)..(628): n is a, c, g, or t
  misc_feature (653)..(653): n is a, c, g, or t
  misc_feature (821)..(821): n is a, c, g, or t
  misc_feature (888)..(888): n is a, c, g, or t
  misc_feature (912)..(912): n is a, c, g, or t
  misc_feature (1028)..(1028): n is a, c, g, or t
  misc_feature (1030)..(1030): n is a, c, g, or t
  misc_feature (1035)..(1035): n is a, c, g, or t
  misc_feature (1082)..(1082): n is a, c, g, or t
  misc_feature (1085)..(1085): n is a, c, g, or t
  misc_feature (1094)..(1094): n is a, c, g, or t
  misc_feature (1097)..(1097): n is a, c, g, or t
  misc_feature (1099)..(1099): n is a, c, g, or t
  misc_feature (1107)..(1107): n is a, c, g, or t
  misc_feature (1111)..(1111): n is a, c, g, or t
  misc_feature (1170)..(1170): n is a, c, g, or t
  misc_feature (1258)..(1258): n is a, c, g, or t
  misc_feature (1266)..(1266): n is a, c, g, or t
  misc_feature (1320)..(1320): n is a, c, g, or t
  misc_feature (1322)..(1322): n is a, c, g, or t
  misc_feature (1324)..(1324): n is a, c, g, or t
  misc_feature (1359)..(1359): n is a, c, g, or t
  misc_feature (1430)..(1430): n is a, c, g, or t
  misc_feature (1498)..(1498): n is a, c, g, or t
  misc_feature (1533)..(1533): n is a, c, g, or t
  misc_feature (1567)..(1567): n is a, c, g, or t
  misc_feature (1592)..(1592): n is a, c, g, or t
  misc_feature (1594)..(1594): n is a, c, g, or t
  misc_feature (1598)..(1598): n is a, c, g, or t
  misc_feature (1758)..(1758): n is a, c, g, or t
  misc_feature (1760)..(1760): n is a, c, g, or t
  misc_feature (1784)..(1784): n is a, c, g, or t
  Probeset Number=SeqID_11384
ttttnnnnnnnnnnnttttgtgttgnntttcctctctcgtctgtctcncgcgcgcccggaggtgtcttcacgcacccacnncccccccnnannnnnnnnnnaannaaacaccnncnnannacacacacagacaacaataatatatacacgcatcnatcacgagaacatattacgtaaggtgtaagtgattagagtgtaccgtggtccacactcacacacacactcctctactacacttatagaagagatgtgagtgnctcgtgttagtatctggcatcgtctctgaggttatatctctgtcacgccacaccactantctcatcatctctcctattatcaacgaacaatcctgcactctagacttactcgtgtgagacgtgattgactcctcgggtctctgtgtgtgctgtacacacgataacatcatgtatgtatctgttatgtcattagtttatgtttctctattctctatgatcttcttctcactatgttcgctgtgatcggtctagcggtcggagacatctcgcctgccatcaagatgcatccgcacggtgttcgagagcgcgtgcggagtgcccactgtaaggcgtgtccgtgtagtctggtccatacagaacaacacacgacngcgtggtcgataagagagagtgatngataagatgatatagagagatagtctgtatgtatgatgagggatgcgcgcatgcatatcaactgaagtatatacacacaactgatctacaagtgtctactagcaacaccatcaacgcagactacacatcaaagtatataacagtatagatactatcatcgtgtcacgnatcactataataatcactgcacactcatgctctatgaggcgagagaatgggcagtaaataacacagnatagtattgtgagcactgatgagnagacgcagcgacagagtgaccgtagacaggagagcaccacagcgagactcaatagtgcgtgactatcatggtagaaagcgcgaacgtcgactgacgcaagagtgcgcacatgcagntngtgtnacgcgatctgtgtatacatatgtcgatgaatacgtatagagcgcgtnttncgcgcctcnccnangcgcaccnaccnaccacgctctatctgctccacatcacgccgcgagcgatgatatatgtatgtgtgtctcnacacaccctcacacacacgaccgatacacatccacacaacatacacacggatgcgcagatacactatgacactaaatagtctctctcnttctacantcgatacttgcattatctgtatacgctaaccagcgccctcctgcaccttatatntncngctacttgcctctctggcgttttcatcctctctcnctcctcacacgctcgcggacatatgtgaccaactcatatactcttctgtgtcagcacgcgaacgagcaccngcgcgcgggtgcatgttatgtgaacgcgactcatccacacacgtctcacacgacactacttacgaganagacactgatattccattacacattgatactgtanagattactatgactatcgttgctctatagtaaantatcatcaaagtagcgaatacattnanacancacccggctagcgcagtcagcaatctgccgtactcatcaatcacaacacgctgcccacgcgactctgccgatcaataactgactctctactgcgccatgcgtgactagcacctcactacacatggcacactatacattgcaacactaatctcactaaaantnatcgatataacctcatacatctan

SEQ ID NO: 1606 - DNA, 1412 bp, Glycine max
  Peptide Sequence Number=SeqID_8475
  Probeset Number=SeqID_11385
ctggttcaatacattgaactacaacaaagctttcggcgatcacctgttgaatgtactcgtaggtactgaagcggtgaaaacctatgctgccactaccgttgccagcaggagcggttttgcattcgatgacctcgactaccgctacctcgatgcaggttctgcatcaggcctcagcaacagcggtgcaggcgctacgcgaagcgcgctgttctctcagttcggtaaagtgaactattcttacaaaaacacttacctcgccgatttcactttacgccgcgacggttcttcccgtttctctgaaagcaaccgttatggtattttcccggcgttctctttgggtgtgcgcctcaccgagtttccctttatgcaaaaactgcgtttcgtgaacgacctgaaagttcgcggcggttggggaagaaccggaaaccagctcatccccaatgtgtacaacgcttatactttgtacgcatccgatcccaacaacaatgcgtatgatatcaatggtaccggatcatccatcgtgggtggcttcagcctggtacagtttggtaaccgcaacggtaagtgggaaaccaccacttccaccaacgtgggtttcgatgcgtcgctgttgaataaccagatggatgttgtgttcgactggtatacccgcaccacatccgacatgctggcgcagattgctatgccacgcaccatgggaacggctaccattccttacaccaatatcggtgagatgcgcaacacaggtttcgacctgggtatcaactacaagaataagatcggtaatttccgttaccaggttggcgccagcatcagccattacaagaatgaagtaatcaaactcaacgatgatcccaatgcaacattgtttggtttcagtacacgtctcccgcccatctccgctactaaaagaggtctgcctattgccggcttctacggttatattgtagatggtgtgatcaaagacgatgcagaagccgccactgcacctaaattcggcacctatacccgtgcaggaacctttaagttcagggatgtgaatggcgatggcgtgatcactgctgccgaccgtaccatactgggtaatccgcatccggatttcacttacggactgaacctgaatgtaggatataagaactgggatctgactgtattcggacagggatcgcagggcaataagatattcaactatgtaagatactggaccgatttcaatacgttccagggtaaccgttccaaagacatcctgtacaattcctggaagaagcagggcgatatagccaaactgccccgcctgaattcaggagatgcgaccagtcagcaagtgtcttcttattttatcgaagacggttcttacatgcgcatcaagaatatccagctcacttataccataccttcttcctggctgaagc

SEQ ID NO: 1607 - DNA, 461 bp, Glycine max
  Peptide Sequence Number=SeqID_8554
  Probeset Number=SeqID_11386
cttttcttccctcttctttgccggaaactcctttctccctcccgaagcctttccttcttcttcttctcttctatcattccactccctcgccgccccgctcactcccccagacgctgacaccaatgctctccacgcgctcatggaagtcaagatcagagcgaggtcgagaaccatggcggtggctccaagctcgaggtcgaggatggcagaggcgcgctcctcactctgatctccctcgccgattcaacgtcaccatgattggagatttctgatttgggggtggggattttctgattcgggagttaggatttggcttggctacttagagatggtggacttttgttggctgtttggtgccggtgtggtggtgatggtggttcaagtgtcgtggtgatggttcatatggtggctcgttttttatatatatatttatttacaatttgtggcggttaaaaaatgcc

SEQ ID NO: 1608 - DNA, 1444 bp, Glycine max
  misc_feature (33)..(33): n is a, c, g, or t
  misc_feature (98)..(98): n is a, c, g, or t
  misc_feature (104)..(104): n is a, c, g, or t
  misc_feature (197)..(197): n is a, c, g, or t
  misc_feature (307)..(307): n is a, c, g, or t
  misc_feature (657)..(657): n is a, c, g, or t
  misc_feature (667)..(667): n is a, c, g, or t
  misc_feature (1067)..(1067): n is a, c, g, or t
  misc_feature (1428)..(1428): n is a, c, g, or t
  Probeset Number=SeqID_11387
cattagaacccgatatatgtatgtatagagtgntatatacagcgtctgcggatatgcatatctcagacgactgatgtatattttatcgcgatgtcagnagttgnggtcggtggttgaggcgtcaatacatcccgccacatcagtaaaaaatattactatacacacacgtgctgcggacgcgcatattagttcttccnccaagcgtcctacatacgtgtaataccactaaggacttcatcgccgagcggacacatctatccaagacgtgtggtgtgttgtctcgctatcatcgacacagcgcgtcgcntcttatctaactacgatcgctctagatgttatcatactatattatctgtaacgctcacagccataagacatattatatgcagaagtaataataatatatgtagatcaactctatgtgtggccgtagattcgaaagtaagtaaagaacataggcgagtgtgcggttagttgatagagtggagtaacagaacccaatgaaaaaatggtataaacaggagtggcaataagaaaatgtcgagggagattaacggaacgtgcccgggaaaggggatatgcaatagcgggaaataatacgatctatcggtatcacacgataatccgctcgtcctttcccatttcatgatcttgcgntcctctaccnggcggtccctaatctcgaaattataatctcacggatgaaggatttataattaatgtccaatcatcaatacacacggtcgcacaaccgcatccatataagcacaacctgatgttaggacaaattaagaagtcggtgattgatgagaatataataatcggtcttcaagtattaatacattagccgcgtggcacaacatatagcataggataatatccgatatcgagctatttgcagcacgtcacgcgcactggtcgcgcggcggcgtctataatctgccccacgttgctataatgtattcatcaactacaataaatttatgagtccgcaccacagccaccgcacccaacacatcgcacaagaggagggagtaacaaattctgtagtcccgacttcctgcaanagaaaatatgtcattcgattacccaggtgtcggggtgtgagatgagtgaccctaatctgtagacgccatactgaagaagagtcttatgacacccctcaaaacacccgacatcttcgggtgcgtgggcgttgttgcgtggctatgcccctttctccagtgcatacatatatcatcctattatttctattagaaacagtgaatatattagacattggagggtcagtcgggcaacctattatcattacacccaatactataaggaggagaatgagacgagcaaaataaccaattcgagatcggacgagacacaacagataaggatacataagaccagagaatataatgttgaaggtacggcaantatatggttcttattt

SEQ ID NO: 1609 - DNA, 1515 bp, Glycine max
  misc_feature (11)..(11): n is a, c, g, or t
  misc_feature (43)..(43): n is a, c, g, or t
  misc_feature (67)..(67): n is a, c, g, or t
  misc_feature (70)..(71): n is a, c, g, or t
  misc_feature (131)..(131): n is a, c, g, or t
  misc_feature (146)..(146): n is a, c, g, or t
  misc_feature (376)..(376): n is a, c, g, or t
  misc_feature (393)..(393): n is a, c, g, or t
  misc_feature (482)..(482): n is a, c, g, or t
  misc_feature (488)..(488): n is a, c, g, or t
  misc_feature (1172)..(1172): n is a, c, g, or t
  misc_feature (1317)..(1317): n is a, c, g, or t
  Peptide Sequence Number=SeqID_8555
  Probeset Number=SeqID_11388
ttggtttgtgngggtgtgtgataaacatgtcccctttctctcnctctgtttcgtttatttattctcnccnnccgtcgccacaaccggggtggggctgggcgtacaacccacatacacaatattgttaatgngacagagagggtggnaaaccgtcattcctcgcgcctcaaagggtcggctaccaatacgtcgtttgtagtgccctccttgctccgcctctagttgtgtttttgtctgtatcaactctctgtgtgtctttgtttggtctagtaaatacataaacaaaaacacaaaaggtgcggcgcgctaacacggtggctcggcttgaatcttagcccttattctatatcgccctcctgtgttgtcttcctgtgcncttccgcgcctttccangtttggcgcccttgtcctctactgtgctcctcgcccatagtttgtttatttgttttggggtatacacagaataaacaccggtgtgtcgngttccncttcttctcttcccatctcactctaacatttaattcttctttgttgttttgtcttcttcgctactccttcgtcttcgatccctttccgcacgacgcaggctgggcctcgggcccacacacatgcgccacccactacacactcggttggggtgggtggtcttctctctgttgctgcgctcctcgtttcgttcgtcccgtccgttctacctctccgtctctcccctcatgctacagcgcacgcaccacgatctgtgccctgcacctcctcaccctctttctcgctgacttctctgcgtggccaataaatgagggcggccgcccacaccacctcgcctcccgccactcctcccttacttgtttggtgctctctctcctctacctctccctcccctcctctccacctcctctcctcgtccgtctctcttcctctccttctcctcatcactagctgcttcctctctccgggctccctctctcccctctctccttttttgttgcattccctcctgctctctcctcgtcctcctttattcttgttgctttcttatctatatatctgtctgttaccaattaaaactgggtgcgtccgtgctcaccatcaaatattgcgtgtcgtctctgttcctcatactcgtctgtcttgtggtggtatatgacttatttgctaccatcttcctacgtccngatctactctccctcacccacctcacctcctcccatctctcatctacccacccccactctctctcttgatctaactctctctcctgcgctccaccacatcctctcgcgcgctcacactccacttctagctctctatgcacctcgncgacccgctacttcgctcaacgctcagctcgcgctcccttaccctcgcgtcgctgtgtgcctctcccgctatctcgatcacagttctcgtctgctctctctcgcgcgcgctccgagatacatactatcacttgtgccctctctcatttgcgtgtagtgtctgtataactgcgctgccgctcctcgcgtgcgggcggtg

SEQ ID NO: 1610 - DNA, 494 bp, Glycine max
  misc_feature (348)..(348): n is a, c, g, or t
  misc_feature (359)..(359): n is a, c, g, or t
  misc_feature (370)..(370): n is a, c, g, or t
  misc_feature (434)..(434): n is a, c, g, or t
  misc_feature (436)..(436): n is a, c, g, or t
  misc_feature (441)..(441): n is a, c, g, or t
  misc_feature (461)..(461): n is a, c, g, or t
  misc_feature (467)..(467): n is a, c, g, or t
  misc_feature (474)..(474): n is a, c, g, or t
  misc_feature (476)..(476): n is a, c, g, or t
  misc_feature (478)..(478): n is a, c, g, or t
  misc_feature (480)..(480): n is a, c, g, or t
  misc_feature (484)..(484): n is a, c, g, or t
  misc_feature (490)..(494): n is a, c, g, or t
  Probeset Number=SeqID_11389
attagggttttccaaactttctgagtgttatcacgccgtccgtcttcgtcttcgtcttcgtcttctagattcgcattagaagatcatgggtttcgctgcgatttggaactctcatcccaagaagtacgggcctggttcccgcacctgccgtgtttgcggaaactcgcatgggctgattaggaagtatggtcttaactgctgtagacagtgcttccgcagcaacgccaaagaaattggattcatcaagtaccgttaaagaagatccgtggttgtttgagcaggaagagtcatttgcggttttaagttttactttaatcttgtaatggatcttataaatgtttttttagnttcaacaaggnatttaagctgntgaacattttagcttccttggtttatcaaacatcctgattctactaccatttgattatcatagntnctttnggaaaaaaaaaaaaaaaagnttatcnataccgncnancnccangggggnnnnn

SEQ ID NO: 1611 - DNA, 396 bp, Glycine max
  misc_feature (19)..(19): n is a, c, g, or t
  misc_feature (41)..(41): n is a, c, g, or t
  misc_feature (45)..(45): n is a, c, g, or t
  misc_feature (231)..(231): n is a, c, g, or t
  misc_feature (236)..(236): n is a, c, g, or t
  misc_feature (255)..(255): n is a, c, g, or t
  misc_feature (289)..(289): n is a, c, g, or t
  misc_feature (305)..(305): n is a, c, g, or t
  misc_feature (335)..(335): n is a, c, g, or t
  misc_feature (380)..(380): n is a, c, g, or t
  misc_feature (382)..(382): n is a, c, g, or t
  misc_feature (387)..(387): n is a, c, g, or t
  misc_feature (390)..(390): n is a, c, g, or t
  Peptide Sequence Number=SeqID_8556
  Probeset Number=SeqID_11390
ttttttttttttttttagnggaatgaaatgaaaattatatnttanccgagagagaaaaaattatctacttataatacaaggatcttagataatcatctgatcaatcacaaatcacctatggtagttcaaggaatggctgtttacactttataagcataactctcaaattaaaattgtttgcaacataaaaaaaaaaacatcatatctcataaacaacgacattctatccanaaaanaacgtgaccccaacggatntatataaatggaacaggaaaacaaaaggcgacanaataattcaaaacggnggaaggaacaaacaaaacggaaaaagcgcncgcggacgttattctcggggtcttgtttgtttgggagagaagaananaaggngcntgaatg

SEQ ID NO: 1612 - DNA, 413 bp, Glycine max
  Probeset Number=SeqID_11391
tttttccagaggtttttagggtttcttcaccgacaacactctcttactcgctcgctctcgaaaacatgactgcggaattgaaagaggagatcctcgccgccaaattagaggagcagaagatcgatctcgatacacctgaagttgaagacgataatgatgaggatgatgattccgaggatggcgacgagggggatggacatgatgatgatggagagtccggtggtggtcggtctaagcaaagcagaagcgagaagaagagtcgtaaagctatgcttaagcttggcatgaaacccatcactggtgttagccgtgtcaccatcaaaaagagcaagaacatcttgtttgtgatatcgaagcctgacgtgttcaagagcccagcctcagatacctttgtgatcttcggtgaggccaag

SEQ ID NO: 1613 - DNA, 484 bp, Glycine max
  misc_feature (1)..(1): n is a, c, g, or t
  misc_feature (15)..(15): n is a, c, g, or t
  misc_feature (33)..(33): n is a, c, g, or t
  Peptide Sequence Number=SeqID_8557
  Probeset Number=SeqID_11392
nagggaacgcgaagnccagcacaacgacataangagaggcggcagagaaaacaccgccctcgcgaagatcccacacgatgaaaaacatggagagggggtggaggaatctaatgaaaccttatatgatgaaggggctaacaagggcgacgcaccggcagtgccagagacgctaaaaaagtacaacaagctgttgtctcttggcatcaagattgaaggcgcgtcaggaagatagcgtgacaaaagggccggaacagaagcaaacctaaagaaggctggcttccacacaggggagcagttaagtctcaaggatccacagcggagcacgccaaatgcacttacagacaaatcagcaaagagagagaatctgttgaggcagggatacagaattgttggaatcaccggagaccaatggagcgagctgcggggagaccacagaggcgaaagcaggacctttaaggcgccgaagcccatgtacaacagtgag

SEQ ID NO: 1614 - DNA, 1590 bp, Glycine max
  misc_feature (25)..(25): n is a, c, g, or t
  misc_feature (63)..(63): n is a, c, g, or t
  misc_feature (336)..(336): n is a, c, g, or t
  misc_feature (338)..(338): n is a, c, g, or t
  misc_feature (354)..(354): n is a, c, g, or t
  misc_feature (455)..(455): n is a, c, g, or t
  misc_feature (1341)..(1341): n is a, c, g, or t
  misc_feature (1572)..(1573): n is a, c, g, or t
  misc_feature (1590)..(1590): n is a, c, g, or t
  Peptide Sequence Number=SeqID_8558
  Probeset Number=SeqID_11393
ccacacattatctgtattctatacngatccatacacgtctacacgtgtatcaactacacatgnatgtgtaacatagtatatagaatctacaggatgcaatctcatatcgcacacgtagttcatatatatgcatcgtatcacacggacgccacttcgcacgagcggcttcgaggtatacgatatagatcacgctggatctgcgtagatggttgtaggtcacaaggaggccttactaaacgagcttacaagcggactcggtataagccacacgcacggcagccagtgaggccgagagatgtcaggaccgagtgtcacaacgagtgttgcagcctcgtntntccgcgggcgcgtatnggcgagcgagatgtcaatatatctacttatagtagtgtgtatttatattgcagcatgagattagaatgagaggaatacattgcatgtagaatatgatgtanagaataatgcaatagactgagaacggaatcgcgatagcacatgtcaagacatccagcactcgtgtgtgtactgatcgaaccacgtgtagatatcgtgaatagttcaatgtaagtgctgcgcgagacggttagactgtacgacggagtcgcatagagtacacaccatcactcatgggacaagacatagttctcacctctagtattatccctcacaagaagatcgagaatgtatgttctcagttagacgagaatagtgattgatgattattcacacgcttggtagaagtctatagtgtatgtggagggtgagtggtacgtcgccgaagttatacattttgatgtgcagtagtgttatttgtctgtatgtgatagtattagggattgacacgttacagcgagtgaatgaatcagcaatactaaaatgatggtcgaacgatagtgccacggcgttcgagagatgttatagaaatctctgtcatcggcagattaatagactaggaggtgcgtgatgcgagtatgtgcggcagagcagaagaaagcgggttgagagcgcggcatggttagacgcgcgagcgaatagattccgtcagtggtaattctttatactgttgatagatttatgtttgtatggtaaaatatatcattcgtaggtattaatattctagcaggctgtggaatgtaatggggagtgtgggaagatataaaagagggaggagggggaagtgtagagcgtgtaggatatatcgatgccgcactatgcttattatatcgatggggagcgattggggtgaatagtaacagaataagtagcaacgatgacacgggtaaaagcaaaaagagcgcgacgagataagagagaacgatcggtggatcaaactcgagctgncaccctcttcctatactctaccgttgagataagttatctgttattgtagaaaagaagatttatgatactaccaaattatatttaatggtggatgtgaggggagtgagctcacttatagaggggtgtagggataatagaccggagctgtgtgaggtcgcggcggggtgggagcggtggggttggagagaggagggtgaagaagaagcaggggaagaggaaaaaaaaaaaaannaaaataaaaaaaaaaan

SEQ ID NO: 1615 - DNA, 452 bp, Glycine max
  Probeset Number=SeqID_11394
acggagccaaacacgccaaccagacttgttccgacaccaacagaagagcaaatctaacaccctctccggctaaatgctcccttcccgggagcctaacggcaacaacgatggcgcaaaacgtgaatcgtgatcgtcatcactcttttttgctacactctcattttttaatcactcagaatggcggtgtggcgacgaacgctggtgcggcggtggtgaagagggtgctgaagcgctttgaagagcttctgatggtttgaaacaaagcgatagagggaaaagacgcatggtactgaacgcatctagaacctttgttggttcacaacatcgaaatgggactccccgaagcagtaaaggaatttcttggcgatttggtctacgagccttgtgtcgctgcttctttcttgagtttggagcatccaaagcttcgaacttttctcgcacaggtttgtttg

SEQ ID NO: 1616 - DNA, 1967 bp, Glycine max
  misc_feature (20)..(20): n is a, c, g, or t
  misc_feature (22)..(23): n is a, c, g, or t
  misc_feature (26)..(29): n is a, c, g, or t
  misc_feature (32)..(32): n is a, c, g, or t
  misc_feature (34)..(38): n is a, c, g, or t
  misc_feature (42)..(42): n is a, c, g, or t
  misc_feature (52)..(52): n is a, c, g, or t
  misc_feature (54)..(54): n is a, c, g, or t
  misc_feature (56)..(56): n is a, c, g, or t
  misc_feature (65)..(67): n is a, c, g, or t
  misc_feature (80)..(80): n is a, c, g, or t
  misc_feature (142)..(143): n is a, c, g, or t
  misc_feature (153)..(153): n is a, c, g, or t
  misc_feature (158)..(158): n is a, c, g, or t
  misc_feature (160)..(160): n is a, c, g, or t
  misc_feature (200)..(200): n is a, c, g, or t
  misc_feature (205)..(205): n is a, c, g, or t
  misc_feature (210)..(212): n is a, c, g, or t
  misc_feature (215)..(215): n is a, c, g, or t
  misc_feature (219)..(219): n is a, c, g, or t
  misc_feature (223)..(223): n is a, c, g, or t
  misc_feature (226)..(226): n is a, c, g, or t
  misc_feature (231)..(231): n is a, c, g, or t
  misc_feature (280)..(280): n is a, c, g, or t
  misc_feature (314)..(314): n is a, c, g, or t
  misc_feature (336)..(336): n is a, c, g, or t
  misc_feature (378)..(378): n is a, c, g, or t
  misc_feature (489)..(489): n is a, c, g, or t
  misc_feature (504)..(504): n is a, c, g, or t
  misc_feature (506)..(506): n is a, c, g, or t
  misc_feature (509)..(509): n is a, c, g, or t
  misc_feature (543)..(543): n is a, c, g, or t
  misc_feature (693)..(693): n is a, c, g, or t
  misc_feature (712)..(712): n is a, c, g, or t
  misc_feature (714)..(714): n is a, c, g, or t
  misc_feature (719)..(719): n is a, c, g, or t
  misc_feature (735)..(735): n is a, c, g, or t
  misc_feature (754)..(754): n is a, c, g, or t
  misc_feature (810)..(810): n is a, c, g, or t
  misc_feature (847)..(847): n is a, c, g, or t
  misc_feature (884)..(884): n is a, c, g, or t
  misc_feature (930)..(930): n is a, c, g, or t
  misc_feature (934)..(934): n is a, c, g, or t
  misc_feature (960)..(960): n is a, c, g, or t
  misc_feature (962)..(962): n is a, c, g, or t
  misc_feature (1121)..(1121): n is a, c, g, or t
  misc_feature (1127)..(1127): n is a, c, g, or t
  misc_feature (1146)..(1146): n is a, c, g, or t
  misc_feature (1158)..(1158): n is a, c, g, or t
  misc_feature (1169)..(1169): n is a, c, g, or t
  misc_feature (1186)..(1186): n is a, c, g, or t
  misc_feature (1206)..(1206): n is a, c, g, or t
  misc_feature (1390)..(1390): n is a, c, g, or t
  misc_feature (1405)..(1405): n is a, c, g, or t
  misc_feature (1446)..(1446): n is a, c, g, or t
  misc_feature (1604)..(1604): n is a, c, g, or t
  misc_feature (1616)..(1616): n is a, c, g, or t
  misc_feature (1631)..(1631): n is a, c, g, or t
  misc_feature (1653)..(1653): n is a, c, g, or t
  misc_feature (1691)..(1691): n is a, c, g, or t
  misc_feature (1705)..(1705): n is a, c, g, or t
  misc_feature (1756)..(1756): n is a, c, g, or t
  misc_feature (1762)..(1762): n is a, c, g, or t
  misc_feature (1782)..(1782): n is a, c, g, or t
  misc_feature (1788)..(1788): n is a, c, g, or t
  misc_feature (1807)..(1807): n is a, c, g, or t
  misc_feature (1834)..(1834): n is a, c, g, or t
  misc_feature (1893)..(1893): n is a, c, g, or t
  misc_feature (1924)..(1924): n is a, c, g, or t
  misc_feature (1935)..(1935): n is a, c, g, or t
  misc_feature (1959)..(1959): n is a, c, g, or t
  Peptide Sequence Number=SeqID_8559
  Probeset Number=SeqID_11395
tgtggttggtggtgtggggngnnggnnnngtngnnnnncctncctagttttntntntaggttatnnnacagagccgagcntgaggtgaggtcgcgatccttctctactctcaatataatctatacgtgtatgacggacattnngagtaggggnagagngngctgtcaggatctaaatgtgctggcctcgtgatgtgttgnagagnataannnatnattngaanacnagatngtcagaccgtagagctcgccgatgctgtatgtgagagtggtgtaagtanaaactcttttcacaatctcactgcagttactatnatagtacaagcatagagataanaagaaataggtgttttaatgagagtgtagagatagagagagntgaggaagcaatcagcgtcgcagcttctcgtcccccgccgtggcgtggccctgcccagactcgtgccagtgtcgatcctctgctctctctcttctctctccgtacctgatntcggtgttgtgtgtntntgnggggcgaggcgtgtgcccggccgcatggtcgcgngcgtatcgtctcacgatcagctcaatcagtggcgcgtacacagccgtgtgttatcgctgcgattgtgaggtgcgtgtctcggattatgtgtgatcaggtggttgtatgcgacgttgtacgatgctcgagctcgtcagtatgctgcgggcntgggtgtgagtcaatcatntnatacnaacgacaatactatanaccatcgacagtgacatangaccggggcagaacggagtggcgatggcgatgtctctgctcatgtgtcgcgtgctngtattatagtatgaagttcgtaggtagacgacatgtnaggcgagagttgtctgcgatgtgtagtgtatgtgtgncagagctgtgcagagaggatgtatggcgatgcaggcatacacaccnctanagatatatatcgacgagtgagatgancngtcttacatgatatactctacactactatagtatgatagtgtgccatgtacgtatatgcgagagctcgatgtatagacactgtgtgtagagtcgcagcaagagcgacgtgtgagctagagacatgtgctgttgagaaagagagcaccagccatatatanataggnagggtaacatgcgtcgcancatatacgcaantgtgactgcgnagtcgagcgctacagcntagcatcagcgaacacgctngacgcgctccactgtcctctcatctcggtgatgtgcgcgcgctgatagttgttcgttgcgagttactgatggcagctatgaccgctgcgcccgtacgtggtccatactagcgtgcactcgtgcttgtatgtgtgcgtcgcactaccttatcgaatatcgtgcgcacatccttctcgctgctctnattctcatctgtcgntgtcctcgatgcttcatggacctattcgacatgctcggctngtgtgatactctcgcgcactgcgctcatcatcaactgaaacttatactctctggtatcagtgtcgtgatcatatgcttcgctgtcgcacgagctcgcctcgtggcgtgttggctgtgtgctgggttgtatgtgcggttgtgagcgtgtcttgcgtcgncgtcgctgaccncagtctgcatactcnactcatgcacatcctcagcacnctcactggtgcacgtagctcagcatgcgcatatgcagncacgacctacgctntcgctttacgatgtagtagctgggtcgcaggcgcgcctctgagcgcactgngcagtncgtagcgatgtgagaccatnatgacntctagaccagtggctgccntcgatgcgcatgcgtgtccgtgcgacnccgtcgtgcgtcgtcgtcgagacgtttgtctatgtgtgctctcatctcacacgctacgncatcattactccgattctactgacagctcgngtatacgacgngtaaagcgcaatcggtacgatggnacacgcgg

SEQ ID NO: 1617 - DNA, 1492 bp, Glycine max
  misc_feature (63)..(63): n is a, c, g, or t
  misc_feature (68)..(68): n is a, c, g, or t
  misc_feature (77)..(77): n is a, c, g, or t
  misc_feature (230)..(230): n is a, c, g, or t
  misc_feature (251)..(251): n is a, c, g, or t
  misc_feature (381)..(381): n is a, c, g, or t
  misc_feature (529)..(529): n is a, c, g, or t
  misc_feature (865)..(865): n is a, c, g, or t
  misc_feature (924)..(924): n is a, c, g, or t
  misc_feature (958)..(958): n is a, c, g, or t
  misc_feature (1046)..(1046): n is a, c, g, or t
  misc_feature (1121)..(1121): n is a, c, g, or t
  Probeset Number=SeqID_11396
gtttagagtatttagaaaatacactacaaaaattaaatcccctgtgcttggaggagggcgggnccacnacgatacgnccgggaactcaatttaatattaacacaaaggcaatcagatatacagagacggaggatcgtggttgtgtataatttctagacgataccacacaattacatatacgggagcagagggatgagacaacacattcccagagcaggtgctttgcctanggagcgctgtgatcgtgccangagtgagcgatgtatgttcttttcttgtcccgcgacgaaccctctctcatacccattacatgtaatacaacaagatatgctagtccccctcgcgctctttgcccgcccacactcacctcgaatggtggtnactctaacatataatgacacctctctatggattgccgtaggcttactttagagaatatcttgaaggacggcgacatatatagcggtgtggtgagaggagaggaattgattcaaatatatcggctattcaatattacaacactgtcacntcgacgctacgtagacgttccgcgacattgcacgtcacatcactataatggatgctgcgagtaaacggtgcgttgatttggaccagtccataatataccagacacgcacatcgatatctcattgttatttcactgttatactgcatgtgtcttccgtcctcttggtggaatttccccgagcgagcacgtcacatatattcctcaattaatcacatatatactcatgttagccaatgtgcactcacgctaaatgattcttgtatacaaccgattgagagagttctgctgagagtcgcgagtatagaactagaagtaagtatattatatattgttttnatcaataggtgcgtaatattttgaggaagaatgagaatataaatataatcagtgagaanccacgaatacataccccgcccccacctcgctccnatgaagtagtagagtttggtatttatgtatgtaatcaacatacagactgaacaagaactacgtttaatcactactacaatacgagaanagttatatacgctatcgatgatatgatgatcgcatattgatacgttacactaactgtatggatgatattaatgantagaacagatatgaaacgatagtcgtgctacatacttatggtcgtacgcataagcgagcattcgcacttgcacgtgtagcgaacgacgacacgctgtgtatagccacagtctgtaatatgtagacggttgactcgggtgtatgagtttatgtgtgtagtcaatgatatattatcataacatcacatcgtaacaacgtaaaatacgctcggctactttaagtctcctgtgtactagacctataatattaaccatgacataatgcagccctcatgccggtaatataatgatatattatcagctcgcgcgaagcacgatccgctactcggacgtaggcagctactgattccggggtagagatacttcgcgctgt

SEQ ID NO: 1618 - DNA, 482 bp, Glycine max
  Peptide Sequence Number=SeqID_8560
  Probeset Number=SeqID_11397
acctttactctagggttctcaagcttccctctccgatccgtttctttctccaagctcaggtcaagatgcaagctgtgattcgttcgtttgtgtccggtggaaatgttgtgagatcatctctgctgcagcatctccgtgtggtcaacccggcgattcagccttccgtgttgtctactcgctctgagtccactcagcctgctcgtatggaggagcatgggttcgagagcacaaccatttctgatgttatgaacgccaaaggcaaaagcgctgatggatcttggctttggtgtaccactgatgactctgtttacgatgctgttaaatccatgacacaacacaatgttggtgccttggtggttgtgaaacctggtgagcaacaatctcttgctggaatcattacagagagagattatctgaggaagatcatagtgcaaggcagatcatccaaatcaacaaaagtaggggacattatgactgaagag

(The sequence listing continues in the following parts.)
